United States Patent Application Publication US 2014/0259212 A1 - sequence listing, part 18

SEQ ID NO: 56819 - protein, 267 aa, Kineococcus radiotolerans SRS30216
MSGTLALVGAGVMGQTLLGGLLRAGREPGGVLVVDRRPGRARELHERFGVRVVDDVGAVAGASTVLLAVKPQDLLALLDSLAGHLAPDALVVSLAAGVTTAAIEARLPAGTAVVRVMPNTPSLVDEGMAGLSGGSACGDEQLAEAEDLLRSCGRTVVLAEKHLDAVTALSGSGPAYVFYVVEAMVEAGVLLGLPRATATELVVQTVVGAGAMLRETGQHPTVLREQVTSPAGTTAAALRQLDDSGVRAALVAAVEAAAARSRQLSGS

SEQ ID NO: 56820 - DNA, 786 bp, Streptococcus suis 89/1591
  CDS (1)..(786): transl_table=11
atgaagattggatttatcggactgggcaacatgggagcggccttggctcatgcagtcagccagcagccagatacccagctcctcctcagcaaccacaacccagcaaaagcccaagttcttcaagagaaggtaggcggtcagcttttttctaatggggaaatagcagagcaggccaaggtcattttccttggggtcaagcctcacctgattcagacagtcttgtcaggcttacaggaccagattagccagaatccgtcggccatttggatttccatggcagcaggagtgcctcttgacagcctggcagcatttgtgtcggcagataagctcatccgcatcatgcccaacacacctgtcgctatcggccaaggtatgacgacctatagcttggtcaatcaagagcttgctccgctattggaacaaatcctagaaaaatcaggcaaggtccaacaggtgccagagagcctgatcgacgcagcaacggctatcgcaggctgcggaccagcctttgtctatcagatgattgaggctttgaccgatgccggtgtgcaaaacgggctcacagctcaagatgccaaggttttggcggctcaaaccctagctggaactgctcagatggtcttaaccagcgataaacacccagcccagctgagacaggaagtgacctcgccaggcggctcgactatcgcaggcgtggtagctcttgaaaaagaaggcttccgttacgccattattagggcagtcgccgccgccctcaaaaagactagaaaattaggcaaaaaatag

SEQ ID NO: 56821 - protein, 261 aa, Streptococcus suis 89/1591
MKIGFIGLGNMGAALAHAVSQQPDTQLLLSNHNPAKAQVLQEKVGGQLFSNGEIAEQAKVIFLGVKPHLIQTVLSGLQDQISQNPSAIWISMAAGVPLDSLAAFVSADKLIRIMPNTPVAIGQGMTTYSLVNQELAPLLEQILEKSGKVQQVPESLIDAATAIAGCGPAFVYQMIEALTDAGVQNGLTAQDAKVLAAQTLAGTAQMVLTSDKHPAQLRQEVTSPGGSTIAGVVALEKEGFRYAIIRAVAAALKKTRKLGKK

SEQ ID NO: 56822 - DNA, 810 bp, Erythrobacter sp. NAP1
  CDS (1)..(810): transl_table=11
gtgtcagaaatcaaccaactactcatcatcggctgcggcaatatgggcggagcaatgctcgccggttggcttgctgccggtgtcgatccctcgcgctttgcgatcctcgatccgggaatggaagccgcgcctgaaggcgtgacgctttaccgagatcccgccgaggccgaggcggcgggcgcgcatgacgcggtgatgctgggcttcaagccacagcaactcggcaatcttgcaccagggctgcaaaagctgaccggcgaaggagtgacgatctattcgctgctcgccggactgacgctggcccagctgaagaaggcgtttccgggtgctgcggcccatgtgcgcgtcatgccaaacctcgcctcgcgcataaacaagtcgccgatcattctgctcgaagatggtcttgatggaagcgagcgcgacgctgcgtttgcgctgttcgatctgctcgggactgcagtgtggctcgaggaagaaggcaagttcgacctcgttaccgcgcttgcaggctcagggccgggctttgtctaccggttcatcgacgcgcttgcagaagcggcgcgcaatctcggactggaggacgagcaggccaccagtctcgcgctcgcaatggtggatggggcttcctcgcttgcggcgggctcggacatttcgcccggtgagctggccgaccgcgtcgccagtcccggcggaatgacccgcgaaggcatgaacgtgctcgatgcagacaaagcgttggtcaagctgcttactgacaccctgatcgcaacgcgagaccgtggcgcggagctttcggcaggcggatag

SEQ ID NO: 56823 - protein, 269 aa, Erythrobacter sp. NAP1
MSEINQLLIIGCGNMGGAMLAGWLAAGVDPSRFAILDPGMEAAPEGVTLYRDPAEAEAAGAHDAVMLGFKPQQLGNLAPGLQKLTGEGVTIYSLLAGLTLAQLKKAFPGAAAHVRVMPNLASRINKSPIILLEDGLDGSERDAAFALFDLLGTAVWLEEEGKFDLVTALAGSGPGFVYRFIDALAEAARNLGLEDEQATSLALAMVDGASSLAAGSDISPGELADRVASPGGMTREGMNVLDADKALVKLLTDTLIATRDRGAELSAGG

SEQ ID NO: 56824 - DNA, 828 bp, Oceanospirillum sp. MED92
  CDS (1)..(828): transl_table=11
gtggataaacaacctgtattagcatttatcggcgcgggcaatatggctcgggcaatcattggtggtctgattagcaacggctaccctgcaaataagatctgggccagtgaacccgatgcagaacgtttatcagacttaaaagttcaaggtttgcagaccacaacggataataaccaggcagtgatggccgccgacgcggtaatacttgcggtgaaaccgcaggttcttaaaccggtcaccgaagcgatgaaagatgcggtccaggcaaaacagcccgtcattatttcagtcgctgcaggcattttatctaccagtatcgatcgttggctgggaggtaacaccgctatcgtccgctgcatgccaaatacaccggctctggtaggcacaggcgcgagtggtttgtacgcaaacagccaggtatctgatgaacaacgttccgctgctgaaactatcctcaaggcaacgggaattaccctttgggtcgacgaggagtcacaactagacgcagtgactgccgtatccggatcaggccctgcttactatttcctggtgatggaatctatgatccaagcgggcaaaaagctgggcttatccgaagaggtcgccactaagctaacattgcaaaccgctttgggggcagctcaaatggcatcatccagcgatgttgacccagcagagttgcgccgtcgggtaacctcacctaacggaacaacagagcaggcaattaagacatttatggatgaaggtttgccagcaacctttgaaaaagcgctgcaggcttgtaatgaccgctccgaagaattagcaaaagaactaggcgacgcttaa

SEQ ID NO: 56825 - protein, 275 aa, Oceanospirillum sp. MED92
MDKQPVLAFIGAGNMARAIIGGLISNGYPANKIWASEPDAERLSDLKVQGLQTTTDNNQAVMAADAVILAVKPQVLKPVTEAMKDAVQAKQPVIISVAAGILSTSIDRWLGGNTAIVRCMPNTPALVGTGASGLYANSQVSDEQRSAAETILKATGITLWVDEESQLDAVTAVSGSGPAYYFLVMESMIQAGKKLGLSEEVATKLTLQTALGAAQMASSSDVDPAELRRRVTSPNGTTEQAIKTFMDEGLPATFEKALQACNDRSEELAKELGDA

SEQ ID NO: 56826 - DNA, 816 bp, marine gamma proteobacterium HTCC2207
  CDS (1)..(816): transl_table=11
atgagtaagatcgcatttattggcggcggcaatatggcctcgagtattattggcggcatgttagccaatggctttcagccagagcaaatttgtgtcggcaatcgcggcaccgaaaaatgtcagcgactccagcaggcctatggtattgctgcaacctctgataatcacgccgcagtggccggtgctgacatagtagtaatggcagtcaaacctcaggttatgggtgccgtagtcaaagatttggctagctcaatcaatccaggcgccgtggtagtctcggttgccgcgggtatccagctgtgcaactttcaagattggctcggcgcgagtcgcgctattgttagagtgatgccaaatacaccctcaatggtgcgctgtggtgctgccggcctatttgccaatgccctagtcagcaatgagcaaaaagtctctattgaatccatctttaacgccgtgggtatctcttgctgggtagataacgaagcacagatcgatgcggttaccgcggtatctgggagcgggccggcctacttttttctgtttatggaaaccatgcagcgagtgggtcaagagctgggactatctgagcaagtagcccgagaattgactattcagaccgcactgggggccgcagagatggccagtaacagcgaacataacaccgaggaactgcgcctgcaggtctcatcacctggcggcaccacccgtgcagcgattgcacagttcgaagcgctcgatatagaggagactattcgtcaagctatgcgggccgcacacaatcgtgccggagaaatggcgcaagagttttctaactag

SEQ ID NO: 56827 - protein, 271 aa, marine gamma proteobacterium HTCC2207
MSKIAFIGGGNMASSIIGGMLANGFQPEQICVGNRGTEKCQRLQQAYGIAATSDNHAAVAGADIVVMAVKPQVMGAVVKDLASSINPGAVVVSVAAGIQLCNFQDWLGASRAIVRVMPNTPSMVRCGAAGLFANALVSNEQKVSIESIFNAVGISCWVDNEAQIDAVTAVSGSGPAYFFLFMETMQRVGQELGLSEQVARELTIQTALGAAEMASNSEHNTEELRLQVSSPGGTTRAAIAQFEALDIEETIRQAMRAAHNRAGEMAQEFSN

SEQ ID NO: 56828 - DNA, 825 bp, delta proteobacterium MLMS-1
  CDS (1)..(825): transl_table=11
atgagtaaagaagcgtacaaacttgcttttattggcggcgggcagatggccggggcgttgcttaagggtattctggcggcagatctctaccgggccggggagatcgtggtggccgagcccgaggccgcccgccgggagttgctggctcgtgaattcggggtggcggtggtggccggggccgctgattttcccgccgcctgtccggtggtggtactggccgttaagccccaggtgctgggcaaagtcctggaaagttaccgggggcggctggccggtgagcgactgctgatttccattgccgccgggatctctctggcctttatcgaggaatgcctggcgccggaaccggtacgggtgatccgggtgatgcccaatactccggccctggtgcaggccggggcttcggctttggcccccggtagccgggccgatgccgatgacctggaggtgggccggcgactttttgccgccgtgggcagtgtcgtgatcctggaggaaaggcagttggacgcggttaccggtctcagtggcagtggcccggcctatgtatttaccttctttgaagctctggtggaggccggggtcaaggtggggttgagccgggaagtggcaaccgagttggcccgccagaccatttccggttccatgcaactggccgccgccgatcagcagcagaatcccgccgcactacgggccatggtgacttcgccgggaggcaccaccatcgccggcttgcatgttctggaacggggcggttttcgcggcctgttgatggatgccgtggaaacggccaccaggcgcagtgtcgagttgggccggggttga

SEQ ID NO: 56829 - protein, 274 aa, delta proteobacterium MLMS-1
MSKEAYKLAFIGGGQMAGALLKGILAADLYRAGEIVVAEPEAARRELLAREFGVAVVAGAADFPAACPVVVLAVKPQVLGKVLESYRGRLAGERLLISIAAGISLAFIEECLAPEPVRVIRVMPNTPALVQAGASALAPGSRADADDLEVGRRLFAAVGSVVILEERQLDAVTGLSGSGPAYVFTFFEALVEAGVKVGLSREVATELARQTISGSMQLAAADQQQNPAALRAMVTSPGGTTIAGLHVLERGGFRGLLMDAVETATRRSVELGRG

SEQ ID NO: 56830 - DNA, 831 bp, Marinobacter sp. ELB17
  CDS (1)..(831): transl_table=11
ttgagcaaatcaccgaccatttcatttattggtgccggtaatatggcgagcgctattattggcggcatgctggataacggctatcaagccggcgaaatttgggtcagcgccccagacgacgagcatttgcaaggcttgcgcaagcgtttcggcatcagcgtaaccaccgacaaccgctactgcgcccaacaatctgacattgttgtattggcggtaaagccgcaggtcatggccagcgtgtgtgaagatattgccgcggtggtgcgcaatacccggccactgatggtttcaatcgcagcaggcttgacctccgacactatcgacggatggcttggcggtggcgtacctatggtgcgggtgatgcccaataccccgtcactggtgggcaaaggagccgcgggcctgtttgccaactcgcgggtcagcgaacagcaaaaaaacgacgttatggccatttttgacagcgtaggctctgccaactgggtgcagcaggaagaacaattacacgcagtaaccgcattgtctggcagcggccccgcctattttttcttgatgctggaggctctggaagaagccgccactaacgctggcatggcggcagaaacagcccgcgaactggccatccaaaccatggcaggtgccgcagaaatggcggcccgcagcgacttggaaccggcgcaactcaagcgtaatgtgatgtcacccggtggcactaccgagcaggcggtgaacacgttcgagcaaggtggtttgcgcgaactggtgcaaaaagcctactcagcggcctatacccgctctcaggaaatggccaaagaactggtcggtaaataa

SEQ ID NO: 56831 - protein, 276 aa, Marinobacter sp. ELB17
MSKSPTISFIGAGNMASAIIGGMLDNGYQAGEIWVSAPDDEHLQGLRKRFGISVTTDNRYCAQQSDIVVLAVKPQVMASVCEDIAAVVRNTRPLMVSIAAGLTSDTIDGWLGGGVPMVRVMPNTPSLVGKGAAGLFANSRVSEQQKNDVMAIFDSVGSANWVQQEEQLHAVTALSGSGPAYFFLMLEALEEAATNAGMAAETARELAIQTMAGAAEMAARSDLEPAQLKRNVMSPGGTTEQAVNTFEQGGLRELVQKAYSAAYTRSQEMAKELVGK

SEQ ID NO: 56832 - DNA, 843 bp, Drosophila melanogaster
  CDS (1)..(843)
atggccaagttggacgaaaagatcggcttcatcgggggcggaaacatggtctacgccataggatccggactggtgcgctgtgggatcgtgaaggctagccaggtgcaggtctccggtccccacattgagaacctgcaacggtggcgggatctgggagctgtgacctgcgacgacaactgcatggtcctggagcactcggacatagttttcatctgcgtaaagccacacatgctaacgccgtgtgccgcccagcttaagtacaagcacgtgccgtcggccaaggatgccagcaagctggtggtgtcggttctagcgggtaccagcctccaaacgctggaggaggccttcagcttcatgggcagttcggagctgaaggtgatacgcaccatgcccaatacatccatgcaggtgggcgagggctgcactgtttacactggcaacgcacgcgtttcgcatcacgacttggaaaagattcacctaatgctcaacgccctgggactggcgcaacaggtgcccgagtccatgatcgacgccgttacgccggtagctggatgcggtccggcatttgtttacaccatcatagaggcactggccgatggcggcgtcaaacagggcgttccgcgtcagatggctcttcagtttgcggctcagacgcttctgggagcggccaaaacggtgctgctcactggcaaacatccggcggtgctgcgggatgaagtctgttctcccggtggcgccaccatagtaggcgttcatgaactggaaaaggggaacctcaggtctactttaataaacgccgtggaaaagtcgtcacagcgttctgctgaactgggaaagaagtga

SEQ ID NO: 56833 - protein, 280 aa, Drosophila melanogaster
MAKLDEKIGFIGGGNMVYAIGSGLVRCGIVKASQVQVSGPHIENLQRWRDLGAVTCDDNCMVLEHSDIVFICVKPHMLTPCAAQLKYKHVPSAKDASKLVVSVLAGTSLQTLEEAFSFMGSSELKVIRTMPNTSMQVGEGCTVYTGNARVSHHDLEKIHLMLNALGLAQQVPESMIDAVTPVAGCGPAFVYTIIEALADGGVKQGVPRQMALQFAAQTLLGAAKTVLLTGKHPAVLRDEVCSPGGATIVGVHELEKGNLRSTLINAVEKSSQRSAELGKK

SEQ ID NO: 56834 - DNA, 867 bp, Glossina morsitans morsitans
  CDS (1)..(867)
atgttagatgagaaaattggttttattggtggcggaaatatggcttttgccatcggttctggtctaatcaatcgtggtattatcaaaaccgaccaagttctagtatcagggccaactctagagcatttacaacgttggcgtgatttgggtgttgcgacaactaatgataacaaccaagtagtggataaaatggatactatattcatttgtgtgaaacctcacatacttaaaccgtgcgctgaagagttgaaaagaaatcatcgtccttcgagcaaagataaggataaagtctttgtatcagtattggctggagttaatttgaaagatttggaagcaagtttctccttcattgataatttaaaaatgatacggtgcatgcctaatacgcctatgcaggttagtgaaggttgcacggtttattcctccggctcacatgttgtggagcacgatttggaaaaagtccatatcatgttaaattcgttgggtattgctcaacatataccagaatctatgataaatgcagtttccggtttatccggttgtggtccagcatttgtttacacaattattgaggctctagccgatggtgctgtgaaaaatggtgttccccggcaaatggctttacaatttgctgtacaagtggtcgtgggtgccgcaaaaactgttatggtaaccggaaaacatcccgctgtattaagagatgaagtatgttcaccgggcggagccaccattgttggcgttcacgaattggaaaaaggaaatttaagagctactttgatgaacgccgtggaatcgtcttcaaaacgatgtgcggatttgggatgtaatgatgatacaaattttgaattctgcgaaagatgtctataa

SEQ ID NO: 56835 - protein, 288 aa, Glossina morsitans morsitans
MLDEKIGFIGGGNMAFAIGSGLINRGIIKTDQVLVSGPTLEHLQRWRDLGVATTNDNNQVVDKMDTIFICVKPHILKPCAEELKRNHRPSSKDKDKVFVSVLAGVNLKDLEASFSFIDNLKMIRCMPNTPMQVSEGCTVYSSGSHVVEHDLEKVHIMLNSLGIAQHIPESMINAVSGLSGCGPAFVYTIIEALADGAVKNGVPRQMALQFAVQVVVGAAKTVMVTGKHPAVLRDEVCSPGGATIVGVHELEKGNLRATLMNAVESSSKRCADLGCNDDTNFEFCERCL

SEQ ID NO: 56836 - DNA, 927 bp, Ustilago hordei
  CDS (1)..(927)
atgccaggatacacattagctgtcatcggatgcggtacaatgggcgtagccatcctttcgggtgtgcttgactcgcaacgctcccagcaagcccaagctgctgcttcaatggcatcgtccgtctcctccttgcacgattcttcagcaggcgatgacctcaccgaactacccaatcgctacatcgccactgtcaaccgagttgaatcggtccgtcgacttaataaaaccttcgctcaatatcccgacatcgagatccatgcaggcaagaacgtccaagcagcccgtgatgccgacgtcatcttgctcggttgcaaacctcaaatggtccaagacattatcgctgaagaaggaatgaaagaagcacttgatggcaaactcgtcatttccatctgtgccggtcttcgtatctcgcagattacagaatgggtcactcccaagacaaaagtcgttcgagctatgcccaatactccgtgcaagatcagggagggaatgaccattctcactcctctctcgcccaacctgcccaatgctgagcttgaccgcagcatcttgctttctatcttcagcgcagtgggcaaaagcaggtttttggacgagaagcatttcgatgcatgcactgcgctggccggatcgggtccagctttcgcatgcgtgttcttggaagcaatggcagatgggggtgtaatgatgggtttgccgagaacagaagcgttggagctggcagcgcagacaatgcagggagctgcaaggatggttatgcagagtggaatgcatcctgctgctatcaaggattcggtcactactcctggtggatgcacgattgctggtctgctcaacttggaggatggcaaggttcgaagcacggtggcgaggacgatccaggctgctgctgaacatgctagtggtcttgggcagacgaagaaatga

SEQ ID NO: 56837 - protein, 308 aa, Ustilago hordei
MPGYTLAVIGCGTMGVAILSGVLDSQRSQQAQAAASMASSVSSLHDSSAGDDLTELPNRYIATVNRVESVRRLNKTFAQYPDIEIHAGKNVQAARDADVILLGCKPQMVQDIIAEEGMKEALDGKLVISICAGLRISQITEWVTPKTKVVRAMPNTPCKIREGMTILTPLSPNLPNAELDRSILLSIFSAVGKSRFLDEKHFDACTALAGSGPAFACVFLEAMADGGVMMGLPRTEALELAAQTMQGAARMVMQSGMHPAAIKDSVTTPGGCTIAGLLNLEDGKVRSTVARTIQAAAEHASGLGQTKK

SEQ ID NO: 56838 - DNA, 819 bp, Aedes aegypti
  CDS (1)..(819)
atgagtaacatgctcaaaatcggttttctcggcggtggaaaaatggcacaagcgatggccaaaggattcatttcggcgggtttaacaaaatgtgaaaatatgacggcaagtttccatccatccgatttgccaaacattgaggctttcaaatcgtttggggctcagacttttacagaaaacgttcctgttgtgaagcgctcagacgtgatatttgtatcggtgaaaccaacagtagttccaactgtattggaaaatgtgcgatctgaaagtgatggaaaactcttcatttctatcgctatgggagtaacattggcagatttggagcagtcgctttcgtcaaatgctcgtgtaattagagtgatgcccaatacccctgcactggttcgcagtggagcttccgtatatgttcgaggtaagacagctacgccagatgattgttctgtaacgcaaaagcttttcgaggctatcggtacttgtgaagaagttgcggaaagtatgatggatcctgtgacagcactttccggtagcggaccggcatacatttttgtgctgatagaatcattagccgatggaggcgtaagaatgggtctaccaagggatttggcttatcgcttagcagcgcagacttttcttggcgctggtcaactggttcgtgatactggtcgtcatcctggacaattgaaagatgatgtaacgagcccagccggatcaactgctgcaggattggcgtttctggagcaaaatgcattccgacatgccgttgctggagcagtagaagcagcgacacttcgatgtcgcgaggtttcgggcaataaataa

SEQ ID NO: 56839 - protein, 272 aa, Aedes aegypti
MSNMLKIGFLGGGKMAQAMAKGFISAGLTKCENMTASFHPSDLPNIEAFKSFGAQTFTENVPVVKRSDVIFVSVKPTVVPTVLENVRSESDGKLFISIAMGVTLADLEQSLSSNARVIRVMPNTPALVRSGASVYVRGKTATPDDCSVTQKLFEAIGTCEEVAESMMDPVTALSGSGPAYIFVLIESLADGGVRMGLPRDLAYRLAAQTFLGAGQLVRDTGRHPGQLKDDVTSPAGSTAAGLAFLEQNAFRHAVAGAVEAATLRCREVSGNK

SEQ ID NO: 56840 - DNA, 879 bp, Aspergillus oryzae
  CDS (1)..(879)
atgggaattcacactcaattaacaattgccgtcatcggctgcggaacgctgggaactgccattgctgccggtattctcagtccaaaagaaaggactgacctcgaagtccaccatcttaccgccactgttggaaccgaatcttcaaagcggcgggttgaaaatgccctatctcaacattcgtcacgactcacggtccttacccaggaaagaaatgtccgcgcagtgtgggaagctgatgtggtattgttggctatgaatcctgtcaagagagcagatgtctttgccgcactaggattcagagatattttgcaagggaaactagtcctcagtatcatggcaggtatcactactaaagcgttgaatatcctagccctcggtgaagactctgccccagacaatgaaagcgcgcttcaatgcgtgcgtgcaatgcccaatatggcggccaagatccgagaggctgtgacattgtacactgctggctccggcacaaccaaggagaatttggagattgcgtcctgggtctttagtcaagttggggaggctcatagaatccccgaaagctcttttgatatctgtgccgtttcagttggttgtgccggctccctgcttctcctcgcgatcgatgggctactggatgctgccgttgcggagggtgtgaagagacctgacgtgcaaaacctggtggtaaacagtgcgattgggatgatgaagctggtacctgctggagatcacgtaagtgttctccgagagaagattgcctctcccggaggttgctctatccgagcgctcctggagttggaaaagttgggagttcgggcggcgttcacgaccgccatcatggcggcagcggagaaatctaaacacatgtcattgtcttga

SEQ ID NO: 56841 - protein, 292 aa, Aspergillus oryzae
MGIHTQLTIAVIGCGTLGTAIAAGILSPKERTDLEVHHLTATVGTESSKRRVENALSQHSSRLTVLTQERNVRAVWEADVVLLAMNPVKRADVFAALGFRDILQGKLVLSIMAGITTKALNILALGEDSAPDNESALQCVRAMPNMAAKIREAVTLYTAGSGTTKENLEIASWVFSQVGEAHRIPESSFDICAVSVGCAGSLLLLAIDGLLDAAVAEGVKRPDVQNLVVNSAIGMMKLVPAGDHVSVLREKIASPGGCSIRALLELEKLGVRAAFTTAIMAAAEKSKHMSLS

SEQ ID NO: 56842 - DNA, 855 bp, Aspergillus oryzae
  CDS (1)..(855)
atgacaaccctcgcatttatcggctgcggaaacatgggctccgcaatcctagacggcctgctagaggccacccgctcggagccccaaaaatccaaaatcgaatacttcatagcgaccaccaagagcgcggcctcagccgagaagcttagcgagaaataccgctcagatccatcacgagtgttagttgcgtctgggtccaacgttaaagtcatggagcagtcagacatcgtcctgctagcgtgcaagcctttcctggcgcagagtattctgtccgagccgggcgtagcgaaagcgttaaaaggaaaattcgtcatcagcgttatggcgggcaagacgcctgccgagatcatggagtacatctatggggattcagcccaggcgatgaataggccggtgattgtaacggccatgccgaatgtggcggcgcgattgcgccagtccatgactattatcgaggagaacccggcgctttcgaaagatcgggcggagattctgacttggatctttgagcagattgggacggtcaagtttgtggcgccggatttggtcaatgctgggtcgatggtttctggggccgcgatggcgctcttgactcttgctgttgatgggattatggatggggctgttatggagggtttccgacggccggatgctatggaggtgtcggcgcaagtgttggaggggttggctgggttgttgagggagggcgttcacccggcggttttgagggagagtatttcttcgccgagggggtgtactattcaaggactgtatgctttggagaagaatggggttcggggggcgtacgctgaggcgttggttaggggggtgaagcatttgaggggagagaactag

SEQ ID NO: 56843 - protein, 284 aa, Aspergillus oryzae
MTTLAFIGCGNMGSAILDGLLEATRSEPQKSKIEYFIATTKSAASAEKLSEKYRSDPSRVLVASGSNVKVMEQSDIVLLACKPFLAQSILSEPGVAKALKGKFVISVMAGKTPAEIMEYIYGDSAQAMNRPVIVTAMPNVAARLRQSMTIIEENPALSKDRAEILTWIFEQIGTVKFVAPDLVNAGSMVSGAAMALLTLAVDGIMDGAVMEGFRRPDAMEVSAQVLEGLAGLLREGVHPAVLRESISSPRGCTIQGLYALEKNGVRGAYAEALVRGVKHLRGEN

SEQ ID NO: 56844 - DNA, 855 bp, Aspergillus oryzae
  CDS (1)..(855)
atgccttcccttcaagagagcaagctcgccttcatcggcggtggcaacatggcctctgccatcatcggaggtctcgtcaacaagggcgtccagaaacagaacatctgggtttccgagccttgggatgtcaaccgggagaagatggcggctcttggggtgcagaccactactgccaatgttgaggccgcaaaggatgcggacctggttattattgcagtcaagccacaggttaccaagggcgtgtgcgaggaattgggagctgcctggtcacagcgtacaaccttgcccgttgtggtcagtatcgccgcgggaatcaccctcgatagtctggtccaatggctccgtacaagcgatggacgcaacgcccacgttgttcgtgtgatgccaaacacaccagcgcttgttggtgagggagcttcgggtctgtatgccagcaaggatgtgacgtcggaagagaaggagctcgtcaatgctgttcttggaagtgtcagcaaggccaccgagtgggtagataaggaagagttgctcgacgtcgtcacggggctttctggatcgggccccgcctactttttcgccatggtggaacatttggttgccagtgcgactgccctgggtctttctgaagaacaggctaccagattggctgcacaaacatgtctcggcgccggcaagatgcttgtcgagtcatccgacagtccgagccagctgcgcaagaatgttaccagcccgaatggaaccacatatgccgcccttcaaacattcgagtcactaggcttcaaggagactgttgacaaagctgtgaattccgctacctcccgagcagctgagttgggaaacactcttggcaagcaataa

SEQ ID NO: 56845 - protein, 284 aa, Aspergillus oryzae
MPSLQESKLAFIGGGNMASAIIGGLVNKGVQKQNIWVSEPWDVNREKMAALGVQTTTANVEAAKDADLVIIAVKPQVTKGVCEELGAAWSQRTTLPVVVSIAAGITLDSLVQWLRTSDGRNAHVVRVMPNTPALVGEGASGLYASKDVTSEEKELVNAVLGSVSKATEWVDKEELLDVVTGLSGSGPAYFFAMVEHLVASATALGLSEEQATRLAAQTCLGAGKMLVESSDSPSQLRKNVTSPNGTTYAALQTFESLGFKETVDKAVNSATSRAAELGNTLGKQ

SEQ ID NO: 56846 - DNA, 900 bp, Aspergillus oryzae
  CDS (1)..(900)
atggcgagctctaccctttgtattcttggctgcggcaacttgggcggcgctattctaaagagcttaatcgatggccccaaagataaacacggtagtgccccgttcacacggttcatcgcatgtgtcaggagccaagaatccgagcagcgcctgactacacaattctcccaccagtcgcaaagcttgacggttacccgagacaacatcaaggctgttcaggagtcggatgttgtagtcttgggcgtggaccccgctgtcgtcgagaaggtgctgtcaactcccagccttacggaggccttatcgaacaagctcctcatcagtgtcgctgctggctggacccggcagaagcttgagaccaccctgtatggcagtccaaccacaacgagcaacgccgaaggtcgggcgtgggtagtgcgtacgctgcctaatatcgctgcgtcggtctcacaaggtctcacggccatcgagatatcagagccagaagttcccgaacactaccagaagatcacggatgcggtctttgacaacctgggaaagacagtacacatccccccgactctgatggatgcaacgaccgcggtggctggatcgacacccgcgttctttgctgtgatagtcgacgcaatgatcgatgctgccgtggcggttggcgtgccgagggacctggcacgaaccatgacggttcaggcgatgaccggaactgcagcccttctgcaaagcggaatgcatccggccgttctgagagatcagggcacgtcgcctgagggatgtactattggaggattgatggtcatggaggaggctggggtgcgcggtcatgttgggagagccttacgagaagccgtaaccattgcgcgccttatggacggtacccgtcatttgaacgatactagacagtag

SEQ ID NO: 56847 - protein, 299 aa, Aspergillus oryzae
MASSTLCILGCGNLGGAILKSLIDGPKDKHGSAPFTRFIACVRSQESEQRLTTQFSHQSQSLTVTRDNIKAVQESDVVVLGVDPAVVEKVLSTPSLTEALSNKLLISVAAGWTRQKLETTLYGSPTTTSNAEGRAWVVRTLPNIAASVSQGLTAIEISEPEVPEHYQKITDAVFDNLGKTVHIPPTLMDATTAVAGSTPAFFAVIVDAMIDAAVAVGVPRDLARTMTVQAMTGTAALLQSGMHPAVLRDQGTSPEGCTIGGLMVMEEAGVRGHVGRALREAVTIARLMDGTRHLNDTRQ

SEQ ID NO: 56848 - DNA, 1178 bp, Zea mays
  CDS (80)..(943)
tgccagtttgcgttcgccacccgtccaaaaccccccaaccaaagcccgctccggcagcccccaccccaccatcgcgtcaatggcggcgccgcctgtccagcctgtgccaaccgcggcggcggcggcggcggctgtgaacggggacgcgttccgtctgggcttcgtcggcgcgggcaacctggccgagagcatcgcccgcggcgtggcggcgtcgggcgtcctcccggcctccgccatccgcaccgcgccccaccgccgccccgagcgcggcgaggccttcgcgtccttcggcgcgtgcttgctccaaaccaatgcccatgttgtggacgacagcgatgtgatcgtcatctccgtgaagcctcagatcgtgaagcaagttctacttcagctgaggccacggctgtcagaaaaaaagcttctcgtgtccattgctgccggcatcaagatgcaagatttgcaggattggtctggtcaacgacgtattattagagtaatgcccaacaccccttcagctgttggacaagctgcatcagtcatgtgtttgggagagatggctactcaggatgatgaaaaccgtgtaagaaaactgttcagtgccattggaaaagtctggacagctgaagagaaatattttgatgctgtaactggtctgagtggtagtggcccggcctatatcttcctagcaatagaggccatggctgatggtggagttgctgctgggcttcctcgggaccttgcccttggtcttgcatctcaaacagttcttggtgctgcaactatggtgagccagacaggcaaacatccagggcaactgaaagatcaggttacttctccagcaggtactaccattgccgggattcaggagctcgagaagggcgcattccgtggaacgctgattagtgctgttgttgctgccgcaaagcgctgccgcgaactgtcatagagttcgaaacaaggctgcattttgttgatatacatgcgttggtatgcaaggtgcaaatcttctggaatagtagactaataatgtactgggtggcttcagaatcatgtgatatgataagtacatgctcccttctaaagcttggtgtcaccattatatggtcaaacggcaagccttaacaataaatccaaaaattggggcagaaaaaaaaaaaaaaaaaaaaaaaaaaaaaaaaaaa

SEQ ID NO: 56849 - protein, 287 aa, Zea mays
MAAPPVQPVPTAAAAAAAVNGDAFRLGFVGAGNLAESIARGVAASGVLPASAIRTAPHRRPERGEAFASFGACLLQTNAHVVDDSDVIVISVKPQIVKQVLLQLRPRLSEKKLLVSIAAGIKMQDLQDWSGQRRIIRVMPNTPSAVGQAASVMCLGEMATQDDENRVRKLFSAIGKVWTAEEKYFDAVTGLSGSGPAYIFLAIEAMADGGVAAGLPRDLALGLASQTVLGAATMVSQTGKHPGQLKDQVTSPAGTTIAGIQELEKGAFRGTLISAVVAAAKRCRELS

SEQ ID NO: 56850 - DNA, 1025 bp, Triticum aestivum
  CDS (30)..(893)
  misc_feature (830)..(830): y is t or c
tagccgccgcgcccctctcctactccccaatggcggccgcgcctccccagcccgccgcgcccgcccccggccccgcgaacggcggcgacgcgttccgcctgggcttcgtcggcgcggggaacctggccgagagcatcgcgcgcggcgtcgcggcgtcgggcgtcctcccggcctccgccgtccgcaccgctccccaccgccgccccgagcgcggcgccgccttcgcctccctcggcgccaccatcctcgcctccaacgcccaggttgtggacggcagcgatgtgatcgtcatctccgtcaagccccagattgtgaagcaggttctggttgagctcaagcccttgctgtctgaagaaaagcttctggtctccatcgctgctggcatcaaaatgaaagatttgcaggattggtctggtcagcgcagaattattagagtaatgccaaacaccccctctgctgtcggacaagcagcatcagtgatgtgtctgggagagacagctactgagaaggatgaaaaccgtgtcaaaagcttatttagtgccattggaaaagtttggacagctgaagaaaaatattttgatgcggttactggcttgagtggtagtggtccggcctacattttcttggcaatagaggccatggctgatggtggagttgctgctgggcttcctcgggatcttgctcttggtcttgcagctcagacagtgctaggtgctgcaaccatggttagcgagacgggtaaacatccagggcagctgaaggatcaggtcacttcccctgcaggaactaccatagctggtgttcatgagctcgagaagggttcgtttcgyggcacactgataaatgccgttgttgctgccacaacaagatgccgagagctctcaaaaaattagtcctcttataatcctggtagccattgttagttttgctacaattccagaataaaatggtggacatgatttatgagatcttaatctcagactccaaacaagttatcgataaattttcctggtctagctgtgtag

SEQ ID NO: 56851 - protein, 287 aa, Triticum aestivum
MAAAPPQPAAPAPGPANGGDAFRLGFVGAGNLAESIARGVAASGVLPASAVRTAPHRRPERGAAFASLGATILASNAQVVDGSDVIVISVKPQIVKQVLVELKPLLSEEKLLVSIAAGIKMKDLQDWSGQRRIIRVMPNTPSAVGQAASVMCLGETATEKDENRVKSLFSAIGKVWTAEEKYFDAVTGLSGSGPAYIFLAIEAMADGGVAAGLPRDLALGLAAQTVLGAATMVSETGKHPGQLKDQVTSPAGTTIAGVHELEKGSFRGTLINAVVAATTRCRELSKN

SEQ ID NO: 56852 - DNA, 813 bp, Tigriopus californicus
  CDS (1)..(813)
atgagtgccaacctgagagttggtttcatcggagcgggtaaaatggcctcggccttagctcaaggcttcattaaaggtcaggccgtcaaatgtgcttcgcacgtgtctgccagttgtccaatcgctgacaagcatcttttggaacacatgaaacaaatgggttgtcagacattccattgcaataaagagctcatggattgctctgatgtggtcattctggccgtcaaacctcaaatcatgccattggttctccccgatatcaaatcattggtagcctctaaactcatggtgtcgattgcggcaggagtccagcttgcccagctccaagcagatcttaatcccgactccaagattgtccgattaatgcccaacaccccgtgtatcgtgcgggaaggggtgtcagtcttttgctcagggcctcaagttacaccacaagacaacgcaacggtaaaacaactctttggaacggttggacaaatcgatgaggttaaagaatcgatgattgatgcagtcacgggcgtgtcaggatctggccctgcctacatgtacttaatcattgaggcgatggcagacggtggggtcaagcaaggactcccaagagatctggcctacaagttggcagctcagacgatggtcggtgctggtcgtatggttttagacacacatactcatcctgctgtattgaaggacgaggtctgctcccccgggggtaccacgatcacggctttggacatgttggaaaagagcggccttaggaccagtatcatgcaggctgtggaggccgccaccaaacgatgtactcagatctcatga

SEQ ID NO: 56853 - protein, 270 aa, Tigriopus californicus
MSANLRVGFIGAGKMASALAQGFIKGQAVKCASHVSASCPIADKHLLEHMKQMGCQTFHCNKELMDCSDVVILAVKPQIMPLVLPDIKSLVASKLMVSIAAGVQLAQLQADLNPDSKIVRLMPNTPCIVREGVSVFCSGPQVTPQDNATVKQLFGTVGQIDEVKESMIDAVTGVSGSGPAYMYLIIEAMADGGVKQGLPRDLAYKLAAQTMVGAGRMVLDTHTHPAVLKDEVCSPGGTTITALDMLEKSGLRTSIMQAVEAATKRCTQIS

SEQ ID NO: 56854 - DNA, 1096 bp, Vigna unguiculata
  CDS (99)..(923)
ggccaaaccaatctgtgtgactgcgtcacttctcttctttctctgtttccctaattcagtctcatatccaaactgatttctctgcaaagtaacccaaaatggaaatcgctcccattcccgtcgacacctacaccctcggtttcatcggcgccggaaaaatggccgagtccattgcccgcggtgccgttcgctccggtgtcctgccgccttctcgcattcgcaccgccgtacactccaatcccgcgcgccgcacagcgttcgaatcattcggcgtcaccgttctctcatcgaacgacgaagtcgttcgccaaagcaacgtcgtcgttctatcggtcaaacctcaattagtgaaagacgtggtgtcgaaattgaagccgataatcacgaaggacaagcttttggtttcagtggctgctggcgtcaagttgaaagatcttcaggaatgggcagggagcgacagatttataagagtgatgcctaatacacctgctgcagttggcgaggcagcatcagttatgagcttaggggcagccgcaacagaggaagatggaaatgttatagctaaattatttgggtcaatcggcaaaatatggagagctgaagagaaatattttgatggaataactggcctgagtggtagtggtcctgcgtacatttatttagcaatagaagctttggctgatggaggagtagcagctggtctaccacgtgatctttcattaagtctagcttctcaaactgtattgggagcagcatcaatggtgacgcagagtgggaagcacccggggcaactgaaggatgacgttacttctcccggtgggacaacaattacgggcattcatgagttagaaaacggtgggttccgcggaacactgatgaatgctgttgttgctgctgctaagcgcagccgtgagctttcttgaatgtagagattagtattgtacctttttaagctaaaatcatattttggcagaattttcagtttatttgaactttgccgtaggagttatttcgttcgggctagcatcatgtatgcgtatgtgtgtctgtttgatgttaatagtataaataaaacacttggcctcgaaaaaaaaaa

SEQ ID NO: 56855 - protein, 274 aa, Vigna unguiculata
MEIAPIPVDTYTLGFIGAGKMAESIARGAVRSGVLPPSRIRTAVHSNPARRTAFESFGVTVLSSNDEVVRQSNVVVLSVKPQLVKDVVSKLKPIITKDKLLVSVAAGVKLKDLQEWAGSDRFIRVMPNTPAAVGEAASVMSLGAAATEEDGNVIAKLFGSIGKIWRAEEKYFDGITGLSGSGPAYIYLAIEALADGGVAAGLPRDLSLSLASQTVLGAASMVTQSGKHPGQLKDDVTSPGGTTITGIHELENGGFRGTLMNAVVAAAKRSRELS

SEQ ID NO: 56856 - DNA, 873 bp, Bradyrhizobium japonicum
  CDS (1)..(873): transl_table=11
atgggtcccggccttcgccgggacgacaccgaatttgtggtgaccacagtggcgaacagcactcttcaaaacatcaccggcaccatccttctcgccggcgccggcaagatgggcggcgcgatgctgaccggatggctggcgggcggactcgatccgcgccgtgtcgcggtggtcgacccgcacatcgcgcctgagatcagcgcgcttgccgccaagggcgtggcgctcaatcccgatgcgaaggcggcaggtcaggtcgagaccatggtcgtcgcggtgaagccgcagatgttccgcgaggccggcgcgaagctgaagcccttcgtctcggagaagacctccgtggtctcgatcatggcgggaaccacgatcgcctcgcttcaggaggtctgcggcggcgctgtcgtgcgcgcgatgccgaacacgccggccgcgatcggccgcggcatcacggtggcggttgcggcgaaaaacgtcagcaccgcgcaacgcgcggtggccgacgcgctgctgcgcgccaccggctcggtcgaatgggtcgaggatgaaagcctgatggatgcggtgaccgcggtgtccggctcgggaccggcctatgtgttcctgctcgccgaggaacttgcgcgcgccggtgtcgaagcgggattgcccgaggcgctggcgacgaagctcgcgcgcgaaacggtggcaggctcgggcgagctgctgcatcaatccgagctgccctccggcacgctgcgccagaacgtcacctcgcccggcggcaccacggccgcagcgctcggcgtgctgatgggcgagcccggcctgcgcgacctgatgatccgtgcaatcgcagcggcgacgcagcggtcgaaggaattggcgaagtag

SEQ ID NO: 56857 - protein, 290 aa, Bradyrhizobium japonicum
MGPGLRRDDTEFVVTTVANSTLQNITGTILLAGAGKMGGAMLTGWLAGGLDPRRVAVVDPHIAPEISALAAKGVALNPDAKAAGQVETMVVAVKPQMFREAGAKLKPFVSEKTSVVSIMAGTTIASLQEVCGGAVVRAMPNTPAAIGRGITVAVAAKNVSTAQRAVADALLRATGSVEWVEDESLMDAVTAVSGSGPAYVFLLAEELARAGVEAGLPEALATKLARETVAGSGELLHQSELPSGTLRQNVTSPGGTTAAALGVLMGEPGLRDLMIRAIAAATQRSKELAK

SEQ ID NO: 56858 - DNA, 816 bp, Zymomonas mobilis
  CDS (1)..(816): transl_table=11
atgagccatattcatttcatcggcagcggccaaatgtccgaagccatgatccgagccattatcaagcataaaaccgcttcggccagtgacatcaccgcctatgacatccggccggaacgggaaaaagaactgcatgacaattatggcatcacgacttttgccaaaccgaaaaaaaatattgaaaccctccaaaaagccgacattgttgttatcggggtcagaccacaagacgacctgaaagcggtgacagccgatattgctcaaaatgccaaagaaaaggccttgattgtttcgattgtcgctggtgtcacgcttgcccaatttgaagacctacttggcaaagaaagagctatcgcaagaattatcccgaacacactcaccgacaccggattgggctatagcggggtggtcatcaacaatcaggcagacaaagccctaaccgaaaaatttgtttccggttttgggaaatgcctctttttggaagaaagcctgatcgacatttttacgggttttggcgtctgcgggcccaattacgtctattattttatcgaagccttggttgatgccggcgtgctagctggcctgcctcgtgatattgcatgggaaaccacgatggaaaatctggtaggctcggtaaaaatgctggaaatatcaggtaagcatccacgccaattactggacatcaacaattcacctgccggtgtcggcatgaatagcctcttcgccttgaaccaaagcgacttcaccgcaggcctacaaaatagcgtcctcgcggctgtcaaaagaacaaccgaactaggccagaaaaaagattaa

SEQ ID NO: 56859 - protein, 271 aa, Zymomonas mobilis
MSHIHFIGSGQMSEAMIRAIIKHKTASASDITAYDIRPEREKELHDNYGITTFAKPKKNIETLQKADIVVIGVRPQDDLKAVTADIAQNAKEKALIVSIVAGVTLAQFEDLLGKERAIARIIPNTLTDTGLGYSGVVINNQADKALTEKFVSGFGKCLFLEESLIDIFTGFGVCGPNYVYYFIEALVDAGVLAGLPRDIAWETTMENLVGSVKMLEISGKHPRQLLDINNSPAGVGMNSLFALNQSDFTAGLQNSVLAAVKRTTELGQKKD

SEQ ID NO: 56860 - DNA, 831 bp, Arabidopsis thaliana
  CDS (1)..(831)
atggagattcttccgattccggcggagagtttcaaggtaggattcatcggagctggtaaaatggcggagagtatagctagaggtgtggttgcttccggtgtgcttcctcctaatcgtatatgcaccgccgttcactcaaatctcaatcgccgtgatgtcttcgaatcctttggcgtcaatgtcttctccactagcgaagaagttgttaaagaaagcgatgttgtcatattctctgtgaaacctcaagttgttaagaaggctgtcacagaattaaagtcgaagctttcaaagaataagattctggtttctgttgcagctggaatcaagttgaatgatttacaggaatggtctggtcaagatcgattcataagggtgatgcctaatacacctgccgctgttggtgaggcagcttcagttatgagccttggcacaggagcaacggaagaggatggagcaattgttgctatgttgtttggcgcggtggggaagatattgaaagctgatgagaaaatgtttgatgctgtcactggtctcagtggaagtggaccagcatacatatttttagcaattgaagctttagccgatggaggagtagctgctggtttaccccgagagcttgcattgagtttagcttcacagaccgttcttggagctgcaacgatggttagcaaaactgggaagcatccaggtgtgttgaaagatgatgttacctcacctggcggcactacaatagccggagttcatgaactagagaaaggctctttccgggcaacacttatgaatgcagttgttgctgcagctaaacgaagccgcgagctctcacagagctaa

SEQ ID NO: 56861 - protein, 276 aa, Arabidopsis thaliana
MEILPIPAESFKVGFIGAGKMAESIARGVVASGVLPPNRICTAVHSNLNRRDVFESFGVNVFSTSEEVVKESDVVIFSVKPQVVKKAVTELKSKLSKNKILVSVAAGIKLNDLQEWSGQDRFIRVMPNTPAAVGEAASVMSLGTGATEEDGAIVAMLFGAVGKILKADEKMFDAVTGLSGSGPAYIFLAIEALADGGVAAGLPRELALSLASQTVLGAATMVSKTGKHPGVLKDDVTSPGGTTIAGVHELEKGSFRATLMNAVVAAAKRSRELSQS

SEQ ID NO: 56862 - DNA, 894 bp, Bacillus subtilis
  CDS (1)..(894): transl_table=11
atgcgaacaaaaaagcgaacaaaggagatgttaccgatctttgatcaaaagaaagtagcctttataggagcaggatctatggcggaaggaatgatatcaggtatcgttcgagccaacaaaatcccgaaacaaaacatctgcgttacaaaccgcagcaatacagagcgattaactgaacttgaacttcaatatggcattaaaggcgccttgccgaaccaactatgtattgaagacatggatgtgctcattttggcaatgaagccaaaagacgccgaaaacgctctgtcatcactaaaatcacgtattcaaccccatcaattaatattgtcggtccttgccggcataactacctcttttattgaacaatcattgcttaatgaacagccggttgtcagagtgatgcccaacacttccagtatgattggcgcttctgcaacagctattgcccttggcaaatatgtgtcggaagacctgaagaagctggccgaagcattgctcggatgcatgggcgaagtctatacaatccaagaaaatcaaatggatatattcaccggaattgcaggcagcggacccgcgtatttttattatttaatggaattcattgaaaagacaggcgaggaagcgggcctcgataaacagttatctcgaagcatcggcgcacagacacttttaggtgccgcaaaaatgctcatggaaacaggagaacatcctgagatcttaagagataatatcacgtcaccgaacggaacgacagcagcggggctgcaagccttgaaaaagagcggcggcggagaagcgatttctcaagcaataaagcatgcggctaagcgttcaaaggaaatcagcgaagatatcgaaaaaactgcagcgccgctatcaggagtgataaagtga

SEQ ID NO: 56863 - protein, 297 aa, Bacillus subtilis
MRTKKRTKEMLPIFDQKKVAFIGAGSMAEGMISGIVRANKIPKQNICVTNRSNTERLTELELQYGIKGALPNQLCIEDMDVLILAMKPKDAENALSSLKSRIQPHQLILSVLAGITTSFIEQSLLNEQPVVRVMPNTSSMIGASATAIALGKYVSEDLKKLAEALLGCMGEVYTIQENQMDIFTGIAGSGPAYFYYLMEFIEKTGEEAGLDKQLSRSIGAQTLLGAAKMLMETGEHPEILRDNITSPNGTTAAGLQALKKSGGGEAISQAIKHAAKRSKEISEDIEKTAAPLSGVIK

SEQ ID NO: 56864 - DNA, 837 bp, Bacillus subtilis
  CDS (1)..(837): transl_table=11
atgaaaaagataggatttgtcggcgccgggtcaatggcagaagcaatgatcaacggcattttgcaaagcggcatcacaaaaccagaacatatctatattacaaatcgctcaaatgacgagcgtctgattgaattaaaggaaacgtacagcgtgcgtccatgcagagataaaaatgagtttttcactcacaccgatatcattatcctcgctttcaaaccgaaagacgcggcggaaagcatcgacagcatccggccgtatatcaaggaccagcttgtcatttcagtacttgcaggccttaccatcgaaaccattcagcattattttggcagaaagctcgcggtcattcgcgtcatgcctaatacatcagcggcaatcagaaaatcagcaaccggattttccgtaagcacggaagcaagcaagaatgatattattgccgcaaaagctctattggaaacaatcggtgatgcaacactggttgaggagcggcatcttgacgctgtcactgcaatcgcaggcagcggcccggcctatgtgtatcgttatattgaggcgatggaaaaagcagcacaaaaagtaggattagataaagaaacggcaaaagcactcattttgcagacaatggcaggggcaacagatatgctcctccaaagcggcaaacagccggaaaagctgcgtaaagaaatcaccagtcctgggggcactacagaggcaggtcttcgcgctttacaggactcccgctttgaagaagcaattattcactgtattgaagaaacagctaaacggagcgcagaaatcaaagaacagtttgccggtgccgccttagagagacattcttag

SEQ ID NO: 56865 - protein, 278 aa, Bacillus subtilis
MKKIGFVGAGSMAEAMINGILQSGITKPEHIYITNRSNDERLIELKETYSVRPCRDKNEFFTHTDIIILAFKPKDAAESIDSIRPYIKDQLVISVLAGLTIETIQHYFGRKLAVIRVMPNTSAAIRKSATGFSVSTEASKNDIIAAKALLETIGDATLVEERHLDAVTAIAGSGPAYVYRYIEAMEKAAQKVGLDKETAKALILQTMAGATDMLLQSGKQPEKLRKEITSPGGTTEAGLRALQDSRFEEAIIHCIEETAKRSAEIKEQFAGAALERHS

SEQ ID NO: 56866 - DNA, 813 bp, Methanosarcina acetivorans
  CDS (1)..(813): transl_table=11
atggaaaatcaaaaaataggatttataggggcaggaaaaatgggctctgctctcatgcagggcaccataaaagcaggaatcgtaacacctgaaaatataggtgcaagtgatgtatacgagccctttttgaaagacctgcaggcaaaactgggaatccgggtgtcaaccgacaacgctgttatcgtccgagaatcggacattcttatccttgcagtaaagccccagaccctgagttcggtgctttcaaatctgaagaatgaaatcacttcggaaaaactcgtgatctcaattgctgcaggagtgcccctttccacatacgaggacgctctccttgaaggtaccagggttgtgcgtgtaatgccaaacatagcagccacagtttctgaagctgcttcagggattgctcccggaaagaatgcaactcctgaggacctgaaagctgccctcgagatcttttctgcagtcggcacagcagtccaggtgccggagtccctgatggatgccgttacagggctttcgggcagtggacctgcgtttattttcccggttattgaagcaatggctgacggggctgtccttgaagggatggataggaaaagcgccctcactcttgcagcccagactgtgctcggagccgcaaaaatggcgcttgaaacaggcatgcaccccggagaactcaaagatatggtcacatctcccgccggaactaccatccaggggattcactcccttgaagaagccggaatccgggctgcctttatgaatgcagtaataagagcaagtgaacgctcaaaggaactcggaaagaaataa

SEQ ID NO: 56867 - protein, 270 aa, Methanosarcina acetivorans
MENQKIGFIGAGKMGSALMQGTIKAGIVTPENIGASDVYEPFLKDLQAKLGIRVSTDNAVIVRESDILILAVKPQTLSSVLSNLKNEITSEKLVISIAAGVPLSTYEDALLEGTRVVRVMPNIAATVSEAASGIAPGKNATPEDLKAALEIFSAVGTAVQVPESLMDAVTGLSGSGPAFIFPVIEAMADGAVLEGMDRKSALTLAAQTVLGAAKMALETGMHPGELKDMVTSPAGTTIQGIHSLEEAGIRAAFMNAVIRASERSKELGKK

SEQ ID NO: 56868 - DNA, 828 bp, Pasteurella multocida
  CDS (1)..(828): transl_table=11
atgcaagcgaaatcaatttgctttatcggtggcgggaatatggcacaagccattatttttggtttactcaaacaaggctacccggctaatcaaatcactgtcagcgatccaaatgcggcaaaacgtcaatgtctcgctgaaaaaggggtaaatactgttgaagcaagtcagacagatacgcaagatgcggtggaaacatcagaggttttactgctcgccgtcaaaccacaaatgattgccgcagtttgccaaggattaagtgcggtcgattttagccaaaaattagtgatttcaattgcagcaggggtttcagtaacaaaattacaatcacgtttgcccaccgcaaagcaaattgtacgcgtgatgcctaatacgcctgcgttagtggcagaaggtatgtcaggcctattcgcacagaacagcttgaaacctgaatacaaacaattcacacaagatttgctcaatgcggtgggaaaaacctgttgggtaactcaagaagcagatatgcacaccattactgcaggctcaggcagtagtccggcgtattttttcttatttatggaggcaatgcaacaggcattgtgtcaaatgaatatggacgaagacaccgctcgcttattagtgcaacaatccgctttaggcgcagcaaaaatggtgatagaaaatcctgacttaccgattgcgacattgcgtgaaaatgtcacgtcaaaaggtggtacaacggcggcagcattgcaggtattgaatcaacaacagttacaacatatcgtccagcaggcgatgcaagcttgtgtcgaacgttctcaacaaatggaaaaattgttttaa

SEQ ID NO: 56869 - protein, 275 aa, Pasteurella multocida
MQAKSICFIGGGNMAQAIIFGLLKQGYPANQITVSDPNAAKRQCLAEKGVNTVEASQTDTQDAVETSEVLLLAVKPQMIAAVCQGLSAVDFSQKLVISIAAGVSVTKLQSRLPTAKQIVRVMPNTPALVAEGMSGLFAQNSLKPEYKQFTQDLLNAVGKTCWVTQEADMHTITAGSGSSPAYFFLFMEAMQQALCQMNMDEDTARLLVQQSALGAAKMVIENPDLPIATLRENVTSKGGTTAAALQVLNQQQLQHIVQQAMQACVERSQQMEKLF

SEQ ID NO: 56870 - DNA, 1250 bp, Pisum sativum
  CDS (38)..(859)
aaacaacaccagcatttcatctgtcacgtaactaaacatggaaatccttcccattctctccgattcctacactctaggtttcatcggcgccggaaaaatggccgaaagcattgccaaaggcgcctcccgctccggcgtgttaccctcttcccgcatcgtaaccgctcactctaacccctctcgtcgagccgccttcgagtccatcggcatcaccgtcctttcttccaacgacgatgtcgttcgtgccagcaacgtcgtcgttttctcggttaaacctcaattagtgaaggacgttgtgttgaaattgaagccgctcctaactaaggacaagcttttggtttctgttgctgctggaatcaagttgaaagatcttcaggaatgggctggccacgaaagatttataagggtaatgccaaatacacctgctgcagttggccaggcggcatcagttatgagcttgggaggagctgcaacagaagaagatgcaaatcttatatcccaattatttgggtcaattggcaaaatatggaaagctgatgataagttttttgatgcaataactggtctaagtggcagtggtcctgcttatatttatttagcaatagaggctctggctgatggaggagtagcagctggtctaccgcgtgatcttgcattaagtctagcttctcagactgtactaggagcagcatcaatggcaacccttagtgggaagcatccaggacagctcaaggatgatgtcacttctcctggcgggacaacaattgcaggcgttcatgagttggaaaaagggggtttccgtggaacactgatgaatgctgttgttgctgccgctaaacgcagccgagagctttcctaaacctataggtgaggatcctatagcagcagagagctttcctaaatgggcgaggatcctattatttctaagagaaaactttgatttcagtagagttttctgcttacatatagtatgtcaaagtagccttctttgagatgagtagtagttgcggaaatgtttagtcttagaaacttcttttataaatgctctactagtatagacgatttcagccaagtagctcagaataacagccagtcccgcttattgttgcttgccggggcttgacgtttctttactgaagacgatcattaagaacaatttggccactagacatggattcacatgtacatgcagttatgcattttgtctctaattatatcaagcttatttcgttttgcctttgaaaggttcc

SEQ ID NO: 56871 - protein, 273 aa, Pisum sativum
MEILPILSDSYTLGFIGAGKMAESIAKGASRSGVLPSSRIVTAHSNPSRRAAFESIGITVLSSNDDVVRASNVVVFSVKPQLVKDVVLKLKPLLTKDKLLVSVAAGIKLKDLQEWAGHERFIRVMPNTPAAVGQAASVMSLGGAATEEDANLISQLFGSIGKIWKADDKFFDAITGLSGSGPAYIYLAIEALADGGVAAGLPRDLALSLASQTVLGAASMATLSGKHPGQLKDDVTSPGGTTIAGVHELEKGGFRGTLMNAVVAAAKRSRELS

SEQ ID NO: 56872 - DNA, 849 bp, Schizosaccharomyces pombe
  CDS (1)..(849)
atgtcggggttttgtgttcttggttgtggtacaatgggaaaagcacttttgactggaatctttgattccattgctgaaaatggaaacgatgtttctgacgaaattatcattccgaataagttctatgcttgtgtcaaatttcctaaagaaaaagaggatgttcaaaagcttttcggagatcgtgttaaagttgtaatgggggccaaagagaatgccgagatggctgcgattagtaacgttttgttgttgagttgtaagcctcaggccgcagaggatgttttgaattccccaaagatgaaagaagcgctcaaaggaaaattaattttgtcaattttggctggcaagaccatctcttcattgcaaagtatgcttgatgaaagtactagggtgattcgcattatgcccaatactgctagtcgaatccgtgaaagtatgagcgtaatttgcccgggacccaacgcaactgaagaagacataaagtttgctgaatgggtattcaatggcattggacgttcaatgaaacttcccgaaaagcttattgatgctgctaccgctgtatgtggaagtggacctgcttttgttgctactatgattgaggctatgacagatggtggtgtaatgatgggtattccgttccctcaggctcaggaattggctgcccaaactatggttggtacaggtcgtatggttttacaaggtcaacatcctgctatgattcgtaatgatgtttcaactcctgccggatgtacaattagtggtttgttggcattggaagatggaaaaattcgaagcacaatcgcacgtggtatagaacaagcaaccaagactgcttctggcctgggtaaatga

SEQ ID NO: 56873 - protein, 282 aa, Schizosaccharomyces pombe
MSGFCVLGCGTMGKALLTGIFDSIAENGNDVSDEIIIPNKFYACVKFPKEKEDVQKLFGDRVKVVMGAKENAEMAAISNVLLLSCKPQAAEDVLNSPKMKEALKGKLILSILAGKTISSLQSMLDESTRVIRIMPNTASRIRESMSVICPGPNATEEDIKFAEWVFNGIGRSMKLPEKLIDAATAVCGSGPAFVATMIEAMTDGGVMMGIPFPQAQELAAQTMVGTGRMVLQGQHPAMIRNDVSTPAGCTISGLLALEDGKIRSTIARGIEQATKTASGLGK

SEQ ID NO: 56874 - DNA, 1109 bp, Glycine max
  CDS (52)..(876)
agcagcaacatttgcgcaaatcgaaattgattctctgccacttaacctaaaatggaaatctttccgattcccgccgaatcctacactctcggcttcatcggcgccggaaaaatggccgagtccattgcccgaggcgccgtccgctccggcgtcctgccgccttctcgcattcggaccgccgtccacttcaacctcgcccgccgtggcgccttcgagtccttcggcgtcaccgttctcccttcaaacgacgacgtcgttcgcgaaagcgacgtcgtcgttttgtcggtcaaacctcaattagtgaaagacgtggtgtcgaaattgacgccgcttttgacgaagcacaagcttttggtttcggtcgctgctggtaccaaattgaaagatcttcaggaatgggctgggaacgacagatttataagagtgatgcctaataccccagcagctgttggccaggcagcatctgtaatgagcttggggggatctgcaacggaagaagatggaaatattatagcccaattatttgggtcaattggcaaaatatggaaagctgaggaaaagtattttgatgcaataactggcctgagtggcagtggtcctgcttatgtttatttagcaatagaggctttggctgatggaggagtagcagctggtttaccacgtgatctttcattaagtctagcttctcaaactgtattaggggcagcatcaatggtctcccagactgggaagcacccgggacagctcaaagatgacgttacttctccaggtgggacaacaattacgggcattcatgagttagaaaatggtgggttccgtggaacactgatgaatgctgttgttgctgctgctaagcgcagccgagagctttcctgaatcaagagattaggattctactttttttttagacgaaaatctgatttcggtcgaattttcagtcactattatgagaacttggggctcttctttgagaggagtaaacaagaatgtttggccataacagtcttttcgagctagcatcatgaatgcatccgagtctatatgagaacttgaagtttccttgcaaaagaagagtactagcagtaaaaataaaataaaaccacttggcc

SEQ ID NO: 56875 - protein, 274 aa, Glycine max
MEIFPIPAESYTLGFIGAGKMAESIARGAVRSGVLPPSRIRTAVHFNLARRGAFESFGVTVLPSNDDVVRESDVVVLSVKPQLVKDVVSKLTPLLTKHKLLVSVAAGTKLKDLQEWAGNDRFIRVMPNTPAAVGQAASVMSLGGSATEEDGNIIAQLFGSIGKIWKAEEKYFDAITGLSGSGPAYVYLAIEALADGGVAAGLPRDLSLSLASQTVLGAASMVSQTGKHPGQLKDDVTSPGGTTITGIHELENGGFRGTLMNAVVAAAKRSRELS

SEQ ID NO: 56876 - DNA, 816 bp, Staphylococcus epidermidis
  CDS (1)..(816): transl_table=11
atgaaacttgtattttatggtgctggtaatatggcgcaggcaatttttactggaattattaattccaacaatttaaatgcaaatgatatttatttaactaataaatccaatgaacaagcattaaaaagctttgcagaaaaattaggggttaattatagttatgatgatgaagcattactcaaagatgccgattatgtatttttaggtacaaagccccatgattttgaaaatttagctaatcgtattagagaacacattactaatgataataggtttatttctataatggcaggtttatctattgattatattcgtcagcagcttaataccaataatccattagctcgtattatgccaaatacaaatgctcaagttggacattcggttactggaataagtttttcaaataattttgatcctaaatctaaaaatgaagtggatgaattaatcaatgcatttggatcagttatagaagtctccgaagaacatctacatcaagttactgcaattacaggaagtgggcctgcatttttatatcatgtatttgaacaatatgtaaaagcaggtacagaattaggtttagaacgaaatcaagtcgaagaatctatacgcaatttaattattggaacaagtaaaatgattgagcgttcagacttaagtatgtctcaattaaggaaaaatattacatctaaaggtggtactacacaagctggacttgatgcactatctcaatatgatattgtatcgatgtttgaagattgtttaggtgcagctgtgaatagaagtatggaattatcacataaagaagatgaataa

SEQ ID NO: 56877 - protein, 271 aa, Staphylococcus epidermidis
MKLVFYGAGNMAQAIFTGIINSNNLNANDIYLTNKSNEQALKSFAEKLGVNYSYDDEALLKDADYVFLGTKPHDFENLANRIREHITNDNRFISIMAGLSIDYIRQQLNTNNPLARIMPNTNAQVGHSVTGISFSNNFDPKSKNEVDELINAFGSVIEVSEEHLHQVTAITGSGPAFLYHVFEQYVKAGTELGLERNQVEESIRNLIIGTSKMIERSDLSMSQLRKNITSKGGTTQAGLDALSQYDIVSMFEDCLGAAVNRSMELSHKEDE

SEQ ID NO: 56878 - DNA, 786 bp, Thermus thermophilus
  CDS (1)..(786): transl_table=11
atgaggctggccttcgtgggtctcggcaagatgggccggagcatcctcaagggggctctggagcggggcttcttgcgcccggaggaggtgggggtcttggggcggacgcccgagcggagccgggagctcgccgagcccttcggcgtccgccccttgacgcgggcggacctgggcatggccgagcgcgtcctgatcgcggtccagccccgggactttcccgccctggccccggagatcgcccaccaccgcctgggctacatctccatcatggcggggatctccacctcggtcctcgcccgcaggctggacaaccgccgcgtggtccgggccatgcccaacctggcggtggtcatcggggagagctccaccgccctcaccgccctaaaggaggccagggaggcggaagacctcgccttcgcccgggcccttttcgccacggtgggggacgtgtacgagatccccgagcacctctttgacgccttcaccggcatgtccgcctccgcccccgcctacttggcggtggtggccgaggccttggcggacgcgggggtgaagatgggcatgccccgggccctggccctccgcctcgccgccgacgccctggcggccacgggggagcttctcaagggcaggcaccccgcccaggtcaaggacgaggtggcgagcccggggggaaccaccatccacggcctccacgccctcgaggcccgggcggtgcgggcggccttttacgaggcggtggaggcggccacccgtagggggcacgagctcggcgagtcggagtga

SEQ ID NO: 56879 - protein, 261 aa, Thermus thermophilus
MRLAFVGLGKMGRSILKGALERGFLRPEEVGVLGRTPERSRELAEPFGVRPLTRADLGMAERVLIAVQPRDFPALAPEIAHHRLGYISIMAGISTSVLARRLDNRRVVRAMPNLAVVIGESSTALTALKEAREAEDLAFARALFATVGDVYEIPEHLFDAFTGMSASAPAYLAVVAEALADAGVKMGMPRALALRLAADALAATGELLKGRHPAQVKDEVASPGGTTIHGLHALEARAVRAAFYEAVEAATRRGHELGESE

SEQ ID NO: 56880 - DNA, 792 bp, Treponema pallidum
  CDS (1)..(792): transl_table=11
atgaacgtgggatttttgggttttggagcaatgggacgggcgctggcagaagggttggtgcacgcaggagcgctgcaagcggctcaagtgtacgcctgtgcgttaaatcaggaaaagttgcgtgcgcagtgtacatctttgggcataggtgcctgcgcgtcagttcaggaactggtacagaaaagtgaatggatttttcttgcagtcaaaccatctcaaatcagcacggtactgcgcgatcgccaatcctttcagggaaaagtgcttatttcccttgcggcgggtatgtcttgcgctgcatacgaggcattgtttgccgcggaccctcatcagggtatccgtcacctgtcacttttgccgaacttaccttgtcaggtggcgcggggggtgatcattgcagaagcgcgccacaccctgcaccacgatgagcacgctgcgcttttagcagtgctgcgcacagttgcacaggtagaggtggtggacaccgcgtactttgcgatcgcaggggtgattgcaggctgtgctccggcgtttgccgcgcagtttatagaagcgctcgctgacgcaggggtgcgctatggcctggcgcgcgatcaagcgtaccggcttgcggcacacatgcttgaagggactgcagcgctcatacagcacagtggtgtacatcctgcacaacttaaagatcgcgtgtgctctcctgcagggagtactattcgcggggtgcttgcgttagaggagcagggattgcgccgtgcagttatacacgcggtgcgcgctgcgctcagttcttcctaa

SEQ ID NO: 56881 - protein, 263 aa, Treponema pallidum
MNVGFLGFGAMGRALAEGLVHAGALQAAQVYACALNQEKLRAQCTSLGIGACASVQELVQKSEWIFLAVKPSQISTVLRDRQSFQGKVLISLAAGMSCAAYEALFAADPHQGIRHLSLLPNLPCQVARGVIIAEARHTLHHDEHAALLAVLRTVAQVEVVDTAYFAIAGVIAGCAPAFAAQFIEALADAGVRYGLARDQAYRLAAHMLEGTAALIQHSGVHPAQLKDRVCSPAGSTIRGVLALEEQGLRRAVIHAVRAALSSS

SEQ ID NO: 56882 - DNA, 1272 bp, Saccharomyces cerevisiae
  CDS (317)..(1177)
cagctggtacggaagccaacgcagtgtcctttgacacaacattttctgattttaaagaagtagaggacttcctacattttattgtcgctgagtacatccagcaaaagaaggtgtaatatcctgagtcactccttaaacctacatacattgccatagaatgccatttattactatataaagtcgcatacgtacaaaaggacaagatcttatcttcgaaaacaagaatatgaaggatttaataacattgccaggttaagaacggtgtaacaacaatagaagtaacacaacaccaatagcaaacaaaccaactacagatatgacttacacattggcaattttaggctgcggtgttatgggccaagcacttctttccgccatttataatgctccaaaggcggctgatgaaactgctgctgcattttacccttccaaaattatcacatgtaaccatgatgaacctagtgcacaacaagttaccgatctagttgagacattcgacgaatctcctaacggtattaaagtcgaaagcacttacggtcacaacgtgagcgctgtcgaagaagcttctgtagttcttcttggtaccaagccatttttggccgaagaagtgttgaatggtgtgaagagcgtcattgggggaaagctacttatttccctggctgctggctggacaattgaccaattgagtcaatacactagcactgtttgccgtgttatgacgaacacacctgccaagtacggatatggttgtgcggtggtgtcctactcagctgatgtttccaaagagcaaaagccactggtcaacgaattgattagccaagttggtaaatacgttgagcttccagaaaagaacatggatgctgctacggctttagtcggttcaggccccgcttttgttctcttgatgttagaatccttgatggagagtgggttgaaattgggaatcccattacaagagagtaaggagtgtgccatgaaagttctagaaggaacagtgaagatggttgagaaaagcggtgctcatccatccgttttaaagcatcaagtttgcacaccaggtggtacaactattgccgggttgtgcgtaatggaagaaaagggcgtcaagagcggtattatcaatggtgttgaagaggcagcccgtgttgcgtcacaattaggccaaaagaagaaatagattgctttgcgtgaaatgtatgtatgttcgctttgtagccgtatattatttttttattactgaccttgcattttttcgtcattttccgtcggtcc

SEQ ID NO: 56883 - protein, 286 aa, Saccharomyces cerevisiae
MTYTLAILGCGVMGQALLSAIYNAPKAADETAAAFYPSKIITCNHDEPSAQQVTDLVETFDESPNGIKVESTYGHNVSAVEEASVVLLGTKPFLAEEVLNGVKSVIGGKLLISLAAGWTIDQLSQYTSTVCRVMTNTPAKYGYGCAVVSYSADVSKEQKPLVNELISQVGKYVELPEKNMDAATALVGSGPAFVLLMLESLMESGLKLGIPLQESKECAMKVLEGTVKMVEKSGAHPSVLKHQVCTPGGTTIAGLCVMEEKGVKSGIINGVEEAARVASQLGQKKK

SEQ ID NO: 56884 - DNA, 1073 bp, Zalerion arboricola
  CDS (47)..(1009)
tcgaataattgaagttcttgatcatttaggagtctgaaaagtcaagatggcatccacagcaaaggaggggtcagaattgactttggcggtgataggttgtggtacaatgggcatagcaatcctctccggtatcctagcatctctcgacgaaatccacgcaccaaactcgcagtcctcagagacagacgaaacaccctcaaagctccccaccaaattcatagcctgtgtccgctcacccaaaggcgcagaaaagatcaaaaaagcactctcaccctacaaaacccccgtcaaaatcatccaaagcgacaatgtcaccgcctgtagagaggcagatgtagtattactaggctgtaaaccatatatggccgaaggcatattaggcgaagaggggatggtcgacgcgttaaaggggaaattgttgattagcatcctagctggcgttcccgcagagcagatatacgggtacatgtacggcaaaacaccagtgaacccagagaaagagggattatgtcaagtcgtgcgagcaatgccaaatacagcgtctgggatccgggaatccatgactgtgatcgcgacgtcgagtcccccattatcagctacaacttcgagtctgataacctggatcttcaaacgcattggcgatgtcgtccagctccccgctgctacaatggatgccagcaccgcgctgtgtggcagtggcccagccttttttgcgctcatactggaggctgcgattgatggggctgtggcgatggggttgccaagagcagaggctcagagaatggcggcgcagactatgaaaggggctgctggattggtattgtctggagagcatccggcgttgctgaaagataaagtgactacgccgggtgggtgcacgataggtgggctgatggtgctggaagaaggaggggtgagagggaccgtggctagagcagttagggaagctactgtggttgccagtcagcttggtaaaggggttcagggagtcaacggtacacgattttgaaacagccatactgcgtagacacatgtccaaggagttctggggtataaaaagttgttcatttatg

SEQ ID NO: 56885 - protein, 320 aa, Zalerion arboricola
MASTAKEGSELTLAVIGCGTMGIAILSGILASLDEIHAPNSQSSETDETPSKLPTKFIACVRSPKGAEKIKKALSPYKTPVKIIQSDNVTACREADVVLLGCKPYMAEGILGEEGMVDALKGKLLISILAGVPAEQIYGYMYGKTPVNPEKEGLCQVVRAMPNTASGIRESMTVIATSSPPLSATTSSLITWIFKRIGDVVQLPAATMDASTALCGSGPAFFALILEAAIDGAVAMGLPRAEAQRMAAQTMKGAAGLVLSGEHPALLKDKVTTPGGCTIGGLMVLEEGGVRGTVARAVREATVVASQLGKGVQGVNGTRF

SEQ ID NO: 56886 - DNA, 831 bp, Brassica napus
  CDS (1)..(831)
atggagaaacatcagataccgatggagtacttgacggttgggttcatcggagctggaaagatggcggagagcatagccagaggtatcgtcgcctctggtgtgcttcctccgcatcatatctcaaccgccgttcactcgaatcccgatcgccatgaagtcttccaatcctttggcgtcaatgtcttctccagtaatgaagaagtcgttgaagaaagcgatgttgtgattttctctgtgaaacctcaagttgttaagaaggccatcacggagttaaggtctaagctcacgaaggataagcttctggtttcagttgcagctggaattacgctgaaagatctacaggaatggtctggccaagatcggttcataagggtgatgcctaacacaccagcagcagttggtgagggagcttcagtaatgagcctcggaacagcggcaagtgaagaagatggagcacttgttgctaagttgtttggctcggtggggaagatgtttaaagccgatgagaaaatgtttgatgctgttactggtctcagtggaagtggaccagcatacatattcttagccattgaagctttagctgatgggggagtagctgctggtttaccccgagaactcgcacttggcttagcttcacaaacggttcttggagctgcaaccatggtgagcaagacagggaagcatccaggtgtgttgaaagatgatgttacttcaccaggcggaactactatagccggagttcatgaactagagaagggttctttccgtgcaacacttatgaatgctgttgttgctgcagctaatcgaagccgcgagctctcgcagagctga

SEQ ID NO: 56887 - protein, 276 aa, Brassica napus
MEKHQIPMEYLTVGFIGAGKMAESIARGIVASGVLPPHHISTAVHSNPDRHEVFQSFGVNVFSSNEEVVEESDVVIFSVKPQVVKKAITELRSKLTKDKLLVSVAAGITLKDLQEWSGQDRFIRVMPNTPAAVGEGASVMSLGTAASEEDGALVAKLFGSVGKMFKADEKMFDAVTGLSGSGPAYIFLAIEALADGGVAAGLPRELALGLASQTVLGAATMVSKTGKHPGVLKDDVTSPGGTTIAGVHELEKGSFRATLMNAVVAAANRSRELSQS

SEQ ID NO: 56888 - DNA, 831 bp, Brassica napus
  CDS (1)..(831)
atggagacgcttccaatttccgcggagagcttcaaggtagggttcatcggagctggaaagatggcggagagtatagccagaggcgtcgttgcctccgggatgcttcctccgaaccgcatctccaccgccgttcactcgaatctgaatcgccgtcaagtcttcgagtcctttggcgtcaatgtcttctccagtagcgaagaagttgttagagaaagcgatgttgtgatcttctctgtgaaacctcaagttgttaagaaggccatcacggaagtaaggtcaacgctctctaaggataaggttcttgtttccgttgctgcggggatcaagttgaaagatcttcaggaatggtctggtcaagatcgattcataagggtgatgcctaatacaccagctgcagttggtgaggcagcttcagtaatgagccttggaacagcggcaacggaagaagacggagcacttgtgactaagttgtttggctctgtggggaagatgttcaaagctgatgagaaaatgtttgatgctgtcactggtctcagtggaagtggaccagcgtacatattcttagccattgaagctttagctgatggaggagtagctgctggtttaccccgagaacttgctttgggtttagcttcacagacggtgcttggagctgcaacaatggtgagcaaaaccgggaagcatccgggtgtgttgaaagatgatgttacttcaccaggcgggactacaatagccggagttcatgaactggagaaaggttctttccgtgcaacacttatgaatgctgttgttgctgcagctaatcgaagccgtgaactctcacagagctaa

SEQ ID NO: 56889 - protein, 276 aa, Brassica napus
METLPISAESFKVGFIGAGKMAESIARGVVASGMLPPNRISTAVHSNLNRRQVFESFGVNVFSSSEEVVRESDVVIFSVKPQVVKKAITEVRSTLSKDKVLVSVAAGIKLKDLQEWSGQDRFIRVMPNTPAAVGEAASVMSLGTAATEEDGALVTKLFGSVGKMFKADEKMFDAVTGLSGSGPAYIFLAIEALADGGVAAGLPRELALGLASQTVLGAATMVSKTGKHPGVLKDDVTSPGGTTIAGVHELEKGSFRATLMNAVVAAANRSRELSQS

SEQ ID NO: 56890 - DNA, 21 bp, Artificial sequence
  primer
atgtccattcaactcggtatc

SEQ ID NO: 56891 - DNA, 21 bp, Artificial sequence
  primer
ttattttttgcccaattcctg

SEQ ID NO: 56892 - protein, 307 aa, Artificial sequence
  consensus sequence
  Variant (2)..(2): Xaa in position 2 is any amino acid
  Variant (4)..(4): Xaa in position 4 is any amino acid
  Variant (6)..(54): Xaa in position 6 to 54 is any amino acid
  Variant (55)..(95): Xaa in position 55 to 95 is any or no amino acid
  Variant (98)..(112): Xaa in position 98 to 112 is any amino acid
  Variant (113)..(123): Xaa in position 113 to 123 is any or no amino acid
  Variant (125)..(126): Xaa in position 125 to 126 is any amino acid
  Variant (129)..(142): Xaa in position 129 to 142 is any amino acid
  Variant (143)..(155): Xaa in position 143 to 155 is any or no amino acid
  Variant (157)..(157): Xaa in position 157 is any amino acid
  Variant (162)..(184): Xaa in position 162 to 184 is any amino acid
  Variant (185)..(197): Xaa in position 185 to 197 is any or no amino acid
  Variant (199)..(204): Xaa in position 199 to 204 is any amino acid
  Variant (205)..(206): Xaa in position 205 to 206 is any or no amino acid
  Variant (208)..(217): Xaa in position 208 to 217 is any amino acid
  Variant (223)..(228): Xaa in position 223 to 228 is any amino acid
  Variant (230)..(238): Xaa in position 230 to 238 is any amino acid
  Variant (240)..(244): Xaa in position 240 to 244 is any amino acid
  Variant (246)..(254): Xaa in position 246 to 254 is any amino acid
  Variant (256)..(267): Xaa in position 256 to 267 is any amino acid
  Variant (268)..(274): Xaa in position 268 to 274 is any or no amino acid
  Variant (276)..(278): Xaa in position 276 to 278 is any amino acid
  Variant (280)..(280): Xaa in position 280 is any amino acid
  Variant (283)..(283): Xaa in position 283 is any amino acid
  Variant (287)..(300): Xaa in position 287 to 300 is any amino acid
  Variant (301)..(306): Xaa in position 301 to 306 is any or no amino acid
GXGXMXXXXXXXXXXXXXXXXXXXXXXXXXXXXXXXXXXXXXXXXXXXXXXXXXXXXXXXXXXXXXXXXXXXXXXXXXXXXXXXXXXXXXXXXXXKPXXXXXXXXXXXXXXXXXXXXXXXXXXSXXAGXXXXXXXXXXXXXXXXXXXXXXXXXXXRXMPNTXXXXXXXXXXXXXXXXXXXXXXXXXXXXXXXXXXXXGXXXXXXXXEXXXXXXXXXXGSGPAXXXXXXEXXXXXXXXXGXXXXXAXXXXXXXXXGXXXXXXXXXXXXXXXXXXXLXXXVXSPXGTTXXXXXXXXXXXXXXXXXXXXA

SEQ ID NO: 56893 - protein, 40 aa, Artificial sequence
  protein pattern
  Variant (3)..(4): Xaa in position 3 to 4 is any or no amino acid
  Variant (6)..(6): Xaa in position 6 is Ala or Gly
  Variant (7)..(7): Xaa in position 7 is Phe or Tyr
  Variant (8)..(12): Xaa in position 8 to 12 is any amino acid
  Variant (13)..(13): Xaa in position 13 is Ala, Asp, Glu or Gln
  Variant (14)..(17): Xaa in position 14 to 17 is any amino acid
  Variant (18)..(18): Xaa in position 18 is Ala, Gly, Ser, Thr or Val
  Variant (19)..(19): Xaa in position 19 is Ala, Gly or Leu
  Variant (20)..(22): Xaa in position 20 to 22 is any amino acid
  Variant (24)..(24): Xaa in position 24 is Phe, Ile, Leu, Met or Val
  Variant (25)..(28): Xaa in position 25 to 28 is any amino acid
  Variant (29)..(29): Xaa in position 29 is Ala, Gly, Ser, Thr or Val
  Variant (30)..(38): Xaa in position 30 to 38 is any amino acid
  Variant (40)..(40): Xaa in position 40 is Ala, Gly, Ser or Thr
SGXXPXXXXXXXXXXXXXXXXXGXXXXXXXXXXXXXXXGX

SEQ ID NO: 56894 - DNA, 1287 bp, Synechocystis sp.
  CDS (1)..(1287): transl_table=11
atggctggatcactgtttgccgatgccagtaaaagattagaaaaagccctgaaatatgtggccatttccgacgatgccggggaaaggctgaaatatcccaaaaccagtctcagtgtttccattccggtgcggatggacgatggctctttaaaaatctttcccggttaccgagtgcgctacgacgacaccagggggccaggcaaagggggcgtgcgctaccatcccaacgtcaccatggatgaggtgcaatccttagccttttggatgacctttaaatgtgccctgttaaatttgcccttcggaggagctaaggggggcatcaccctcaatcccaaagaactcagccgagcagaattggagcgtttaagtcggggttacatcgaggcgatcgccgattttattggcccggacatcgacattttagccccggatgtttacaccaatgaaatgatgatgggctggatgatggaccaatacagcatcattcgccgcaaaattagtcccgctgtggtcaccggcaaacccgtcaccatggggggcagtcaaggtcgcaacacggccaccggcactggagctttttacatcatgcagggcatgctacccaagtttgaccaatatcccgaaaataccaccgttgctgtccagggtttcggtaatgcgggtatggtggtagccgaatgtttataccaagatggctacaaagtggtggccatcagtgattcccaggggggcatttataacgaacaaggcatcgatattcccgctgtgattgattacaaacaacggcatcgcactttagcgggtatgtactgtgaccaagccatctgcgatttaggggaaaatcaacaaatcagtaatgccgagttactagctctggacgtggacgtgctcattcccgccgccttggaaaatcaaattacccgcgacaatgcagaccaagtcagagctcgctacatttttgaagttgctaatgggcccaccaccaccgccgccgatgatattttggctagcaaaggtatctatgttttccccgatattttggtcaatgctgggggggtgacggtgagctactttgaatgggtacagaaccgcagtggactttattggagcgccaaggaagttaacgatcgcctgaaggaaaaaatggtggaggaagcggaacatgtgtggaacattacccaggaattggatgtgaatgtgcgcactgcagcctatatccacgcccttaaccgcctgagcgaagctatggatgctaaggggactagggattattaccaggacagctaa

SEQ ID NO: 56895 - protein, 428 aa, Synechocystis sp.
MAGSLFADASKRLEKALKYVAISDDAGERLKYPKTSLSVSIPVRMDDGSLKIFPGYRVRYDDTRGPGKGGVRYHPNVTMDEVQSLAFWMTFKCALLNLPFGGAKGGITLNPKELSRAELERLSRGYIEAIADFIGPDIDILAPDVYTNEMMMGWMMDQYSIIRRKISPAVVTGKPVTMGGSQGRNTATGTGAFYIMQGMLPKFDQYPENTTVAVQGFGNAGMVVAECLYQDGYKVVAISDSQGGIYNEQGIDIPAVIDYKQRHRTLAGMYCDQAICDLGENQQISNAELLALDVDVLIPAALENQITRDNADQVRARYIFEVANGPTTTAADDILASKGIYVFPDILVNAGGVTVSYFEWVQNRSGLYWSAKEVNDRLKEKMVEEAEHVWNITQELDVNVRTAAYIHALNRLSEAMDAKGTRDYYQDS

SEQ ID NO: 56896 - DNA, 1664 bp, Glycine max
  CDS (79)..(1389)
tttgactcatcgacgcattactattactctctctgagacaacactcactcggctcgagctctcttctctgtttcatgtatgcttcttgacactctcacattatttctaggatccctttttttcatttcacttcacttcatccatctttcagctatgaacgctctagcagccaccaaccgtaacttccgacgtgcagctcacattctcggtttggacactaagcttgagaatagccttctcattcccttcagggaaatcaaagttgaatgcacgatcccaaaagatgacggaacactagtatcatatgtaggattcagaattcaacatgacaatgctcgtggaccgatgaaaggagggattcgttatcacccggaggttgaccctgatgaagtgaatgctctagctcagctaatgacatggaagacagccgtagcagacattccttatggaggagcaaagggtggaattggctgcaacccgagggacctcagcgtcagcgagttagaacgtctaactcgcgttttcacccaaaagattcatgatctcattggtattcagagagatgttcctgcccctgacatgggaactaattcacagacaatggcttggattcttgatgagtattctaagtttcatggacattcaccagcagttgtgactgggaaacctatagatcttggaggttcattgggaagagaggctgccacaggattgggagtgatttttgcaacagaggctttatttgctgaatacgggaaatcaatttctgatatgacatttgtaatccagggatttggaaacgtgggcacttgggctgctaagtcaatttatgagagagggggtaaggtgatagctgtgagtgacatcagtggtgctattagaaacccaaatggaatcgatatacctgctctgctgaaacacaaggaaggcaatggaaatttgaaggaattctcaggagcagatatcatggatcctgatgaattgcttgttcatgaatgtgatgttctcatcccttgtgccttgggaggagttctcaacaaggaaaatgctgctgatgtgaaagcgaaatttataatagaagctgcaaatcatccaactgaccctgatgctgatgagatattgtctaagaaaggagtcatcatattacccgacatatatgctaatgccggtggagtgactgtgagctactttgagtgggttcagaatattcagggatttatgtgggatgaagagaaagtgaaccgtgagctgaaaaagtatatgactaaagccttccgcaacataaaggcaatgtgtcaaattcataactgtgacttgcgaatgggagccttcagtctcggagtgaaccgtgttgctcgagctacacttctcaggggttgggaagcttaatagaacacatgcatcaccgcttgctaaacaagttttctagcttagtattatgttgttgccctttctccagtatgctcctttttttccgtttgttatttgatcggtttagtttaatttagtttagtaattgagtatcattgttgcctaagaaccacatgtgaagttacaggtggatgtgtttctttatccaagaacccaaattttctgcaaaaaaaaaaaaaaaacaagggcggccgagtagcagtgaccaccgcgggaattattctggaccggta

SEQ ID NO: 56897 - protein, 436 aa, Glycine max
MLLDTLTLFLGSLFFISLHFIHLSAMNALAATNRNFRRAAHILGLDTKLENSLLIPFREIKVECTIPKDDGTLVSYVGFRIQHDNARGPMKGGIRYHPEVDPDEVNALAQLMTWKTAVADIPYGGAKGGIGCNPRDLSVSELERLTRVFTQKIHDLIGIQRDVPAPDMGTNSQTMAWILDEYSKFHGHSPAVVTGKPIDLGGSLGREAATGLGVIFATEALFAEYGKSISDMTFVIQGFGNVGTWAAKSIYERGGKVIAVSDISGAIRNPNGIDIPALLKHKEGNGNLKEFSGADIMDPDELLVHECDVLIPCALGGVLNKENAADVKAKFIIEAANHPTDPDADEILSKKGVIILPDIYANAGGVTVSYFEWVQNIQGFMWDEEKVNRELKKYMTKAFRNIKAMCQIHNCDLRMGAFSLGVNRVARATLLRGWEA

SEQ ID NO: 56898 - DNA, 1766 bp, Sorghum bicolor
  CDS (203)..(1438)
gcatgatgcgtcgcaggaggagcgggtttcccctataaaaccccgcgtaaccccccgcgcggatggcacgggcgcgcggggacgtcctctcctcagtaactatattttgtcgttccttgggaagatagaaaaatatactcttggttttcttgaacagattccatttcaggtctgtttctgaagggagatttcgtcgaacaggatgaatgcattggcagcaaccagcaggaacttcaagcaggcagctaagctgctgggcctcgactccaagctggagaagagcttgctcattccattcagggagatcaaggttgaatgcacaatcccaaaagatgatgggactttggcatcctatgttggatttagggttcaacatgacaacgctaggggacctatgaagggtggaatcagataccaccatgaggttgaccctgatgaagtcaatgccttggcacaactgatgacatggaaaacagcagtggctaacataccatatggaggagctaaaggtggaataggatgtagccctggagacctgagcatctccgagcttgagaggcttacccgagtttttactcagaaaatccatgacttaattggcatccataccgacgttccagctccagatatgggcaccaactcacagacaatggcatggatacttgatgaatactcaaagttccatggttactcacctgctgttgtgacaggaaagcctgttgaccttggaggatcattgggaagagatgcagctactggaaggggggttctgtttgctactgaagctttgcttgcagagcatggcaaaggcatttcaggccagcgtttcgtcatacagggattcggtaacgttggttcctgggcagctcagctgatcaatgaagccggtggcaaggtgattgctatcagtgatgtcggaattcctcgcccgcgccgcttcctccgccggcctccgctgctagtgaagcactcggcggagaacagagggatcaagggcttcaacgggggagatgccatcgatccaaactcattgctcactgaagagtgcgacgtcctcatcccagcagcgcttgggggagtcataaataaggataatgctaacgacataaaagcaaagtacatcatcgaggctgccaatcacccctcagacccagaggcagacgagatcctgtcaaagaaaggcgtcatcatcctccccgacatcctcgccaactctggcggtgtcacagtgagctacttcgagtgggttcagaacatccaggggttcatgtgggacgaggagaaggtgaacgcggagctccggacgtacatgacgcgcgccttcggggacgtgaaggagatgtgccggagccacaactgcgacctccgcatgggcgccttcacgctgggcgtcaaccgcgtcgcgcgcgccaccgtcctcaggggatgggaagcctgatgatgataccgtctcgtgtccgtgccccactgcgtttgctgcgcgtcgtgtcctcttgagccttgtttttctttggttattatatgtcgatcgatcgatcaacggaggtccgggaaaaacaagttcggttaataattccaggaagtgcgtcttcttggagaccaatagcggaagaagggtaataagtctgtagcccatagctgcctgagatgatgcttgttggtggtctgcaagcagcaatgccaatgccatttggttttcttgcacgactttgggtcatccagccacgttatggaatatggtatatgcaaatccatttgttagcctt

SEQ ID NO: 56899 - protein, 411 aa, Sorghum bicolor
MNALAATSRNFKQAAKLLGLDSKLEKSLLIPFREIKVECTIPKDDGTLASYVGFRVQHDNARGPMKGGIRYHHEVDPDEVNALAQLMTWKTAVANIPYGGAKGGIGCSPGDLSISELERLTRVFTQKIHDLIGIHTDVPAPDMGTNSQTMAWILDEYSKFHGYSPAVVTGKPVDLGGSLGRDAATGRGVLFATEALLAEHGKGISGQRFVIQGFGNVGSWAAQLINEAGGKVIAISDVGIPRPRRFLRRPPLLVKHSAENRGIKGFNGGDAIDPNSLLTEECDVLIPAALGGVINKDNANDIKAKYIIEAANHPSDPEADEILSKKGVIILPDILANSGGVTVSYFEWVQNIQGFMWDEEKVNAELRTYMTRAFGDVKEMCRSHNCDLRMGAFTLGVNRVARATVLRGWEA

SEQ ID NO: 56900 - DNA, 1611 bp, Zea mays
  CDS (114)..(1349)
ctcagtaactatagtttttttgttccttgggaggatagaaaaaatatatccttggttttcttgaacagataacatttcaggtgtgcttctgaagggagatttcgttgaacaggatgaatgcattggcagcaaccagcaggaacttcaagcaggcagctaagctgctgggcctcgactccaagctggagaagagcttgctcattccattcagggagatcaaggttgaatgcacaatcccaaaagatgatggaactttggcatcctatgttggatttagggttcaacatgataatgctaggggacctatgaagggtggaatcagataccaccatgaggttgatcctgatgaagttaatgccttggcacaattgatgacttggaaaacagcagtagctaacataccatatggaggagccaaaggtggaattggatgtagccctggagacctgagcatctctgagcttgagaggcttacccgagtttttactcagaaaatccatgacttgattggcatccatactgacgttccagctccagatatgggcaccaactcacagacaatggcatggatacttgacgaatactcaaagttccatggttactcacctgctgttgtgacaggaaagcctgtggacctcggaggatcattgggaagagacgccgctactggaaggggagttctgtttgctactgaagctttgcttgcagagcatggcaaaggcattgcaggccagcgtttcgtcatacagggattcggtaacgttggttcctgggcagctcagctgataagtgaagccggtggcaaggtgattgctatcagtgacgtcacaggcgccgtcaaaaacgtcgatggcctcgacatcgcgcagctagtgaagcactcggcggagaacaaggggatcaagggcttcaaggggggagacgccatcgctccagactcgttgctcactgaagagtgcgacgtcctcatcccagcagcgcttgggggagtcataaacaaggataatgctaacgacataaaggcaaagtacatcatcgaggctgccaatcaccccacagatccagaggcagacgagatcctgtcaaagaaaggcgtcctcatcctccccgacatactggccaactctggtggcgtcacagtgagctacttcgagtgggtacaaaacatccaggggttcatgtgggacgaggagaaggtgaacgcggaactgcggacgtacatgacgcgcgccttcggggacgtgaagcagatgtgccggagccacagctgcgacctccgcatgggcgccttcacgctgggcgtcaaccgcgtcgcgcgcgccaccgtcctcaggggatgggaagcatgacctccccctccgtgtcgtccgtgtgcccctccctgttgtatcctcttggtcttggtcttgggcccttgtttttctttggttaattattatcgatcaacggagatccgagaaaaaacgggctcagttaataattccaagaagtgcgtcttcttggagataaatagcggaaggagagttataataagtctgtaactgtaacccatagctgagatgctgtctgcaagcagcaatgccaatgccaatgccatctggttttcgtgcc

SEQ ID NO: 56901 - protein, 411 aa, Zea mays
MNALAATSRNFKQAAKLLGLDSKLEKSLLIPFREIKVECTIPKDDGTLASYVGFRVQHDNARGPMKGGIRYHHEVDPDEVNALAQLMTWKTAVANIPYGGAKGGIGCSPGDLSISELERLTRVFTQKIHDLIGIHTDVPAPDMGTNSQTMAWILDEYSKFHGYSPAVVTGKPVDLGGSLGRDAATGRGVLFATEALLAEHGKGIAGQRFVIQGFGNVGSWAAQLISEAGGKVIAISDVTGAVKNVDGLDIAQLVKHSAENKGIKGFKGGDAIAPDSLLTEECDVLIPAALGGVINKDNANDIKAKYIIEAANHPTDPEADEILSKKGVLILPDILANSGGVTVSYFEWVQNIQGFMWDEEKVNAELRTYMTRAFGDVKQMCRSHSCDLRMGAFTLGVNRVARATVLRGWEA

SEQ ID NO: 56902 - DNA, 1380 bp, Pyrococcus furiosus; strain KOD1
  CDS (105)..(1370)
ttgttcaaaacagactgttttccagcctgtttatcgaaaggtttatatatgcaaacgcctaaggaaacagctatgaccatgattaccgaaatgagctggtatgaatggtcgagattgacccgtttgagatggccgtccagcagcttgagagggctgcccagttcatggacataagcgaagaggcccttgagtggctcaagaggcccatgaggattgttgaggttagcgttcccgtcgagatggacgacggttctgtcaaggttttcaccggtttccgtgtccagcacaactgggcccgcggtccgaccaagggtggtataaggtggcacccggccgagaccctcagcaccgttaaggcccttgccacctggatgacctggaaggttgccgtcgttgacctcccctacggtggaggtaagggtggcatcatcgttgacccgaagaagctctccgagagggagcaggagaggctcgctaggagctacataagggccgtctacgacgtcatcggcccgtgcacagatattccggcccctgacgtttacaccaacccgaagatcatggcctggatgatggacgagtacgagaccataatgaggagaaaggggccggccttcggtgtcatcaccggaaagccgccgggagttggcggtatcgtcgccagaatggacgccaccgctcgcggtgctgccttcactatcagggaagccgctaaggccctcggctgggacgacctcaagggcaagaccatagccatccagggctacggtaacgccggctactacctccacaagataatgagtgaggagttcggtatgaaggtcgttgccgtcagcgacagcaagggcggcatctacaacccggacgggctcccgccggctgacgaggtactcaagtggaagaaggagcacggctcagtcaaggacatgcccggaacccagaacatcaccaacgaggagctcctcgagcttgaagtcgacatccttgccccgagcgccatcgagggcgtcataaccaaagagaacgccgacaacgtcaaggccaagatcgtcgccgaggtagccaacggtccggtcaccccggaggccgacgagatactccacgagaagggcatcctccagatcccggacttcctctgtaacaccggtggtgtcaccgtcagctacttcgagtgggtccagaacataaacggcttctactggacggtcgaggagaccaggaagaggctcgacgacaagatgaccaaggcattctgggacgtcttcaacacccacaaggagaagaacatccacatgagggacgctgcctacgtcgttgccgtcagcagggtctacgaggcaatgaagcaccgcggatgggtgaagaagtgatttcttctcc

SEQ ID NO: 56903 - protein, 421 aa, Pyrococcus furiosus; strain KOD1
MVEIDPFEMAVQQLERAAQFMDISEEALEWLKRPMRIVEVSVPVEMDDGSVKVFTGFRVQHNWARGPTKGGIRWHPAETLSTVKALATWMTWKVAVVDLPYGGGKGGIIVDPKKLSEREQERLARSYIRAVYDVIGPCTDIPAPDVYTNPKIMAWMMDEYETIMRRKGPAFGVITGKPPGVGGIVARMDATARGAAFTIREAAKALGWDDLKGKTIAIQGYGNAGYYLHKIMSEEFGMKVVAVSDSKGGIYNPDGLPPADEVLKWKKEHGSVKDMPGTQNITNEELLELEVDILAPSAIEGVITKENADNVKAKIVAEVANGPVTPEADEILHEKGILQIPDFLCNTGGVTVSYFEWVQNINGFYWTVEETRKRLDDKMTKAFWDVFNTHKEKNIHMRDAAYVVAVSRVYEAMKHRGWVKK

SEQ ID NO: 56904 - DNA, 1299 bp, Legionella pneumophila
  CDS (1)..(1299): transl_table=11
ttggaggaatgtatgtacttagatgctctttcacggcttgataaggccgcttcattttgtcgtattgactcagaagctttagaaaaactgaaacaccctaaatcctgtctggaagtatctctcccggttcggatggataatggtgaattaaaaatttttccagcttatcgagtccatcataatgacagccgcggtccgatgaaaggcggcatacgttatcatccaaaattggatttagacgagataaaaactcttgcattatggatgacaataaaatgcgctgtcgccgacatcccctttggtggtgcaaaaggtggggtaattgttgatccaaaacaattatcccgcatggagttggagcgattaagccgaagctacattgagttaatagcggattttattgggccagacaaagacatccctgctcctgatatgtataccaatgagatgatcatgggttggatgatggatgagtatgccaccattgttcggaaaaatagtccagcggtcatcacaggcaagcctatttctttgggagggtgcttggggcgtgagggtgcgactggtctaggtgcttactattgcattaaaattcttgaaaaaaagaaaaaatggcagtcttctgagctacgagttgctgttcaaggatttggtaatgctggccaaagtattgctaagctgctttacgacaatggctataaaattgttgcgataagtgattcgaaaggaggaatttataataccaaaggcatcgatatacctcgcatgattgaaataaaaaacagctctaaagatgtgcagtccatatattgcaaagagtctgtttgtaaacttgcgaaggaagctaccattacgaatgaagaattattggaactcgatgtcgacttacttatcccagctgccgcacaaaatcaaattacccaagaaaatgcagccagaattaaggctcctataatcattgaaattgcaaatggtcctataaccttagaggccgacgcactattgcagaaaaagggactattaattgtacccgatatattagccaatacaggtggggtaatcgtaagctattttgaatgggtgcaaaataaatcaggttattattggagtttggaaaaagttcaagaagaattacagactatcatatcccgtgaatttgggaatatttggcaactgatggaacagtatcaaacagatatgcggcaagcggcttacgttcatgccctgaatcgatacgacaaagcagttacggcccaaggaactcgtggatatttttcaaatttaagcctaagcctataa

SEQ ID NO: 56905 - protein, 432 aa, Legionella pneumophila
LEECMYLDALSRLDKAASFCRIDSEALEKLKHPKSCLEVSLPVRMDNGELKIFPAYRVHHNDSRGPMKGGIRYHPKLDLDEIKTLALWMTIKCAVADIPFGGAKGGVIVDPKQLSRMELERLSRSYIELIADFIGPDKDIPAPDMYTNEMIMGWMMDEYATIVRKNSPAVITGKPISLGGCLGREGATGLGAYYCIKILEKKKKWQSSELRVAVQGFGNAGQSIAKLLYDNGYKIVAISDSKGGIYNTKGIDIPRMIEIKNSSKDVQSIYCKESVCKLAKEATITNEELLELDVDLLIPAAAQNQITQENAARIKAPIIIEIANGPITLEADALLQKKGLLIVPDILANTGGVIVSYFEWVQNKSGYYWSLEKVQEELQTIISREFGNIWQLMEQYQTDMRQAAYVHALNRYDKAVTAQGTRGYFSNLSLSL

SEQ ID NO: 56906 - DNA, 1659 bp, Aedes aegypti
  CDS (1)..(1659)
atgttccacctgaagacgatcgccaagagcgccgccctcaagcaggaagtgtccaccctggtcaaggcggccaccactgccggagcccagcaggtgtcgcagcaacagcgcccctattcctcccagcaccagatcccggaacggctaaaggatgtcggcagcgccgccagcccccgcttcttcgacatggtcgagtacttcttccaccgggcctgccagatctgcgaggaaaagatggtcgaggacatgaagggacgcatctcgctagaggagaagcgcaagcgggtcaagggcatcctgatgctgatgcagccttgcgaccacatcatcgagatcgctttcccgctgcgcagagattccggcgactacgagatgatcaccggttaccgtgcccagcactgcactcaccgtaccccgaccaagggaggtatccgtttctcgctcgatgtgtcgcgtgatgaggtgaaagccttgtcggctctgatgaccttcaagtgtgcctgcgtagatgtgccattcggtggtgccaaggccggtgtgaagatcgaccccaagcagtattcggagcatgagctggagaaaatcacccgccgcttcgccctggaactgtccaaaaagggcttcatcggaccgggcattgatgtgccagctcccgatatgggaaccggcgaacgtgaaatgtcctggatcgccgatacctacgccaagaccatcggccatttggacatcaatgcccacgcttgcgttaccggtaagccaatcaaccagggtggtattcacggacgtgtctcggccaccggtcgcggtgtcttccacggattggacaacttcatcaaggaggctaactacatggccatgattggaaccacccccggctggggcggcaagaccttcatcgtgcaaggtttcggtaatgtcggtctgcactcgtgccgttatctgtgccgtgccggtgccacctgtatcggtatcattgaacacgatggatccatcttcaacccacagggtattgaccccaaggctctggaagactacagaaatgaacatggaaccattgttggattccctggtgctatgccgtacgaaggcgagaacctgatgtacgaaccatgcgatatcttcattccagccgccatcgagcaggtcatcactagtgaaaacgccaacaagatcaacgccaagatcatcgccgaagctgccaacggtccgaccaccccagctgctgacaagatcctcatcgatcgcaacatcctggtcattccggatctgtacatcaacgccggtggtgtgaccgtttcgttcttcgagtggctcaagaatctgaatcacgtctcgtacggtcgtctgacgttcaagtacgagcgcgagtccaactaccacctgctcgaatctgtgcaagcctcgctggagagacgcttcggcaatgtgggcggcaagatccctgtcaccccgtcggaagccttccagaagcgcatttctggtgcctcggagaaggacattgtccactccggtctggattacaccatggagcgttccgctcgtgccatcatgaagaccgccatgaagtacaacctcggtctggatctgcgttccgctgcctacgtcaactcgattgaaaagatcttccaaacctacagagacgccggccttgccttttaa

SEQ ID NO: 56907 - protein, 552 aa, Aedes aegypti
MFHLKTIAKSAALKQEVSTLVKAATTAGAQQVSQQQRPYSSQHQIPERLKDVGSAASPRFFDMVEYFFHRACQICEEKMVEDMKGRISLEEKRKRVKGILMLMQPCDHIIEIAFPLRRDSGDYEMITGYRAQHCTHRTPTKGGIRFSLDVSRDEVKALSALMTFKCACVDVPFGGAKAGVKIDPKQYSEHELEKITRRFALELSKKGFIGPGIDVPAPDMGTGEREMSWIADTYAKTIGHLDINAHACVTGKPINQGGIHGRVSATGRGVFHGLDNFIKEANYMAMIGTTPGWGGKTFIVQGFGNVGLHSCRYLCRAGATCIGIIEHDGSIFNPQGIDPKALEDYRNEHGTIVGFPGAMPYEGENLMYEPCDIFIPAAIEQVITSENANKINAKIIAEAANGPTTPAADKILIDRNILVIPDLYINAGGVTVSFFEWLKNLNHVSYGRLTFKYERESNYHLLESVQASLERRFGNVGGKIPVTPSEAFQKRISGASEKDIVHSGLDYTMERSARAIMKTAMKYNLGLDLRSAAYVNSIEKIFQTYRDAGLAF

SEQ ID NO: 56908 - DNA, 1275 bp, Klebsiella pneumoniae subsp. pneumoniae MGH 78578
  CDS (1)..(1275): transl_table=11
atggaaaagttatcttacgcatctgaaagtagtacatctccatggaccacctacctgcgccagatcgaccgcgtcgcgccttatctcggcgatcttgcctactgggtggaaaccctgcgccatccgaagcgcgcgctgatcgtcgacattcctgtgcaaatggacgacggcaccatccgccacttcgagggctatcgcgttcagcacaatctgtcgcgcggaccgggtaaaggtggtgttcgctaccatccggatgtcgatcttaacgaagtcatggcactttctgcctggatgaccattaagtgcgccgcggtcaatattccttacggcggggccaaaggcggcatccgcgtcgaccccttctccttgtcggaaggtgaactggagcgtctgacccgccgttacaccagcgaaatcggcattattatcgggccgcagaaagatattccggcgccggacgtcggcaccaatggcaaagtgatggcatggatgatggacacttactccatgaaccatggcaccaccatcaccggcgtggtcaccggcaaaccgatccacctcggcggctccctcggtcgtgaaaaagccaccggacgcggcgtgtttgtcaccggccgggaagttgcccgtcgcgccggtatcgaaattgaaggcgccaaagtggcgctgcagggctttggtaacgtcggtagcgaagcggcccgcctgttcgccggcgtcggcgctcgtatcgtggttattcaggatcataccgcgaccctgtataacgaaggcggaatcgatatggccgccctcaccgcctggcaggcggagaaaaagcagattgccggtttcccgggcgcccaggagatcgataaagacgccttctggaccactccgatggacatcctgatcccggcggcgctggaagggcaaatcacccgcgagcgcgctgagaagctgacctgcaaactggtgctggaaggggccaacggcccaacctatccggaagcggacgacgtgctggccgagcgcggcgtgatcgtggtgccggacgttatctgcaacgccggcggggtgaccgtcagctactttgagtgggtacaggacatggccagcttcttctggagcgaagaggagatcaacgccaagatggaccgcattatgaccgacgctatcgtgcacgtctgggataaagccgccgagaaagagtgtacgctgcgcaccgccgcctatatcgtggcctgcgagcgcatcctgatggcgcgtaaagaccgcggcatctacccgggctga

SEQ ID NO: 56909 - protein, 424 aa, Klebsiella pneumoniae subsp. pneumoniae MGH 78578
MEKLSYASESSTSPWTTYLRQIDRVAPYLGDLAYWVETLRHPKRALIVDIPVQMDDGTIRHFEGYRVQHNLSRGPGKGGVRYHPDVDLNEVMALSAWMTIKCAAVNIPYGGAKGGIRVDPFSLSEGELERLTRRYTSEIGIIIGPQKDIPAPDVGTNGKVMAWMMDTYSMNHGTTITGVVTGKPIHLGGSLGREKATGRGVFVTGREVARRAGIEIEGAKVALQGFGNVGSEAARLFAGVGARIVVIQDHTATLYNEGGIDMAALTAWQAEKKQIAGFPGAQEIDKDAFWTTPMDILIPAALEGQITRERAEKLTCKLVLEGANGPTYPEADDVLAERGVIVVPDVICNAGGVTVSYFEWVQDMASFFWSEEEINAKMDRIMTDAIVHVWDKAAEKECTLRTAAYIVACERILMARKDRGIYPG

SEQ ID NO: 56910 - DNA, 1665 bp, Bombyx mori
  CDS (1)..(1665)
atgctgcatctcaagaatatcgccaagtcagtggttccgccgctcaagaattctgttcaaaatgaagccctcaatacaatgttccgaatcataccagctggagtgaatgtctgctgccgcacatacgctagtcatgagattccagataagctcaaagatattcctacaagtgcgaatccgaagttcttccacatggtagaatattttttccaccgagcctgtcaagttgtcgaagacaagcttgttgaagatttgaagtcaaggacacccattgaagagaagaaaaagaaagtagccggtattctaaaacttatggaaccatgcgatcacattcttgagattcaatttcctctgaggcgcgattctggcgattacgaaatgatattaggctatcgcgcacaacattccacacacaggactccaaccaaaggaggtattcgattctcaacggacgtaaccagagatgaagttaaggcgttatcagctttgatgaccttcaagtgcgcgtgcgtggacgtgcctttcggcggtgctaaggccggtatcaagatcaatcccaaagaatactccgagcatgaactggaaaagatcactcgtcgtttcacccttgaacttgccaaaaaaggattcattgggcctggcgtggatgtccccgctcctgacatgggtaccggcgaacgagaaatgtcttggatcgccgatacttatgcgaagaccgtcggttttcaagacatcaacgctcacgcctgcgtcactggcaaacctattaaccagggtggcatccacggcagagtttcagccacgggcaggggcgtattccacggcttggagaacttcatcaacgaagccaactacatgagcatgatcggtacaacccccggttggggtggcaagacgttcatcgtccaaggtttcggtaacgtgggactccacacttgccgctacctcgtccgcgccggcgccacttgcatcggagttatcgagcacgacggctccatttacaaccctgatggcatcaaccctaaggccttggaggactacagaatcgagaacggtacggtagtcggtttccccggcgctaaggcctacgaaggcgagaacatgctttacgagaagtgcgacattcttgtacccgccgccatcgaacaggtcataaacaaggacaacgctcacaggatccaagctaagatcattgcggaggccgccaacggtcccaccacacctgctgcagacaagatcctcatcgatcgcaacattctcgtgatccccgacctctacatcaacgctggtggtgtcaccgtctcattcttcgagtggctcaagaacctcaatcacgtgtcttacggacgtctgacattcaaatacgagagggaatctaactaccatctgctggaatcggtccaagagtctctcgagcggcggttcggtcgcgtgggaggccgcatccccgtcactccctcagagtccttccagaagagaatctccggcgcctccgagaaggacatcgtgcactccggactcgactacaccatggagagatccgctagggccatcatgaagacagccatgaggttcaacctcggtttagatctgaggacagccgcgtatgcgaactccatcgaaaagatattcaccacgtatgccgatgccggtctagctttctaa

SEQ ID NO: 56911 - protein, 554 aa, Bombyx mori
MLHLKNIAKSVVPPLKNSVQNEALNTMFRIIPAGVNVCCRTYASHEIPDKLKDIPTSANPKFFHMVEYFFHRACQVVEDKLVEDLKSRTPIEEKKKKVAGILKLMEPCDHILEIQFPLRRDSGDYEMILGYRAQHSTHRTPTKGGIRFSTDVTRDEVKALSALMTFKCACVDVPFGGAKAGIKINPKEYSEHELEKITRRFTLELAKKGFIGPGVDVPAPDMGTGEREMSWIADTYAKTVGFQDINAHACVTGKPINQGGIHGRVSATGRGVFHGLENFINEANYMSMIGTTPGWGGKTFIVQGFGNVGLHTCRYLVRAGATCIGVIEHDGSIYNPDGINPKALEDYRIENGTVVGFPGAKAYEGENMLYEKCDILVPAAIEQVINKDNAHRIQAKIIAEAANGPTTPAADKILIDRNILVIPDLYINAGGVTVSFFEWLKNLNHVSYGRLTFKYERESNYHLLESVQESLERRFGRVGGRIPVTPSESFQKRISGASEKDIVHSGLDYTMERSARAIMKTAMRFNLGLDLRTAAYANSIEKIFTTYADAGLAF

SEQ ID NO: 56912 - DNA, 1236 bp, Oryza sativa (japonica cultivar-group)
  CDS (1)..(1236)
atgaacgcgctcgccgccaccagccgtaacttccggcaggccgccaggctgctcggcctcgactccaagctcgagaagagcctcctgatcccgttccgcgagatcaaggtggaatgcaccatccccaaagacgatggaaccttggcgtccttcattgggttccgcgtgcagcacgacaatgcccgcgggccaatgaaaggtggcattcgctatcaccctgaggttgatccagatgaagtaaatgcacttgctcaactaatgacatggaagactgctgttgcagcaattccatatggtggagcaaagggtgggattggatgcgctcctggtgaattaagcacgagtgagctggagcgtttgacacgtgtatttacacagaaaattcatgatcttattggagctcatactgacgtgccagctcctgacatgggaactaattcacagaccatggcttggattttggatgagtactcgaaattccatggtcattcaccggcagttgtcactgggaagccaatagatcttggtggatcattaggtagagatgctgctacaggaagaggtgtgatgtacgctactgaggctcttttggctgaacatggaaagtccatttctggatcaacctttgttatccagggttttggtaatgttggttcatgggctgcacgaatcatccatgagaagggtggcaaggtgattgcacttggagatgtgacaggctcaatcagaaacaagaatgggttagacatacctgctctgatgaagcacagaaatgagggtggtgctttgaaagattttcatgatgcggaagtcatggattcttcagagctactagtgcatgaatgcgatgttctcatcccatgcgctttaggtggagtgctcaacagggaaaatgcacctgatgtgaaggccaaatttataattgaagctgctaatcatccaactgatccagaagctgacgagattcttgccaagaagggagtgaccatattacctgacatttacgccaactccggtggtgtgatcgttagctattttgagtgggttcagaacattcaagggttcatgtgggatgaggagaaggtgaacatggagctccacaagtacatgaacaattctttccagcacatcaaggccatgtgtaaatctcatgattgcaacctgaggatgggggcgttcaccctgggagtcaaccgggttgcacgtgccaccctcttgaggggatgggaggcatga

SEQ ID NO: 56913 - protein, 411 aa, Oryza sativa (japonica cultivar-group)
MNALAATSRNFRQAARLLGLDSKLEKSLLIPFREIKVECTIPKDDGTLASFIGFRVQHDNARGPMKGGIRYHPEVDPDEVNALAQLMTWKTAVAAIPYGGAKGGIGCAPGELSTSELERLTRVFTQKIHDLIGAHTDVPAPDMGTNSQTMAWILDEYSKFHGHSPAVVTGKPIDLGGSLGRDAATGRGVMYATEALLAEHGKSISGSTFVIQGFGNVGSWAARIIHEKGGKVIALGDVTGSIRNKNGLDIPALMKHRNEGGALKDFHDAEVMDSSELLVHECDVLIPCALGGVLNRENAPDVKAKFIIEAANHPTDPEADEILAKKGVTILPDIYANSGGVIVSYFEWVQNIQGFMWDEEKVNMELHKYMNNSFQHIKAMCKSHDCNLRMGAFTLGVNRVARATLLRGWEA

SEQ ID NO: 56914 - DNA, 1308 bp, Thermoplasma volcanium GSS1
  CDS (1)..(1308): transl_table=11
atgtctggaaaagcagatccacttgagatcgccaaggaacaagtggctccagtaaaggaggaaattgaagaagatccttttgagatagccctaaagcagttaaacaaagccgcaaaagttttgaacctagacgagcaggctctagagatattaagttcacctcagaaaattttgcaggtgagcataccagtgaaaatggatgatgggaaggttagggttttcactgggtttagagtaaggcacaacatcgctaggggtccggctaagggagggattaggtaccatccccaggagactctatctacggttaaggcgctttccatgtggatgacctggaagtgcgccatagctgacataccgtatggcggcgcgaaggggggcataatatgcgacccatcaacgctcagccagggagaacttgagaggttaagcagaggttacatcagggcaatagcagatttcataggccctgaagtagatgtaccggctccagacgtcaacacaaatccacaaattatggcatggatgatggatgagtatgaaaacatcgtacgacattctgctgctaatgtaataactggtaagcctttagaagtcggtggttcgttaggtaggtttgattccactggtaagggcgggatgttcgtccttagggaaggcgctaagaagatcggcctcgatctctccaaggcacgcgtagccgttcagggtttcggaaatgtaggtcagttcgctgtaaagttcgtacaggaaatgttcggtgcaaaggtggttgcggtctcagatataaagggaggtatttacagtgaaaatggattcaagttcgatgatctgttggcttggagcaagaaaatagggagtgttgttggcttccctggatcgaaacctattacaaatgaagaactacttgaatctgatgtggatgtactaatacctgcagccattgaagaacagataactgaaaagaatgctgacaagataaaagcaaagataatactcgaacttgcaaacggacctacaacgccagaggcagatgagattctatacaagaaaggaaaactagtactaccagatgttctctctaactcaggaggtgtcatagtttcatacttcgagtgggtacagaacaactacggagaatactggactacagaggaggtttacgacaaattagatcagaaaataactaaagctgcaaggcaagtccttgatactatggacaaataccatgtagatcctaggactgcagcgtacgtgattgcagtaaagaaagtcgctgatgcgatgaaagtaaggggctggtattaa

SEQ ID NO: 56915 - protein, 435 aa, Thermoplasma volcanium GSS1
MSGKADPLEIAKEQVAPVKEEIEEDPFEIALKQLNKAAKVLNLDEQALEILSSPQKILQVSIPVKMDDGKVRVFTGFRVRHNIARGPAKGGIRYHPQETLSTVKALSMWMTWKCAIADIPYGGAKGGIICDPSTLSQGELERLSRGYIRAIADFIGPEVDVPAPDVNTNPQIMAWMMDEYENIVRHSAANVITGKPLEVGGSLGRFDSTGKGGMFVLREGAKKIGLDLSKARVAVQGFGNVGQFAVKFVQEMFGAKVVAVSDIKGGIYSENGFKFDDLLAWSKKIGSVVGFPGSKPITNEELLESDVDVLIPAAIEEQITEKNADKIKAKIILELANGPTTPEADEILYKKGKLVLPDVLSNSGGVIVSYFEWVQNNYGEYWTTEEVYDKLDQKITKAARQVLDTMDKYHVDPRTAAYVIAVKKVADAMKVRGWY

SEQ ID NO: 56916 - DNA, 1251 bp, Thermoplasma volcanium GSS1
  CDS (1)..(1251): transl_table=11
atgccagaaagtatagatccatttgagatggcactgcagcaactggataaggctgcaagggtgttgaacctagatgaacaagctcttgaaatactaagacaaccggagaagatcttgcaggttagcattccagtgagaatggataacggaaaaataaaagtgtttaccggcttcagagtaaggtataatacagcaagaggccctggaaaaggtgggataagataccatcctgacgaaactctttccactgtaaaagccttagcttcatggatgacctggaagtgcgccatagctgacataccgtatggcggcgcgaaggggggcataatatgcgaccctaagtcaatgagccagggagaacttgagaggttaagcagaggttacatcagggcaatagcagatttcataggccctgaagtagatgtaccggcgccggatgtatacacaaatccacaaattatggcatggatgatggatgagtatgaaaacatcgtacgacattctgcaccgaacgtaataaccggtaagcccttagagattggaggttccgaaggaagaggcgatgcgacagcgaaggggggcatgtacgttttgagggaaggagcaaagagagtaggtctcgatctttcaaaagctactgtagccgttcagggtttcggaaatgcaggtcagttcgctgtaaagttcgtacaggaaatgttcggtgcaaaggtggttgcggtctcagacactaaaggaggcatatttaaatcagatggaataaactacgaagcactcctcgatcacaagaggaaaacaggcagtgttgttggcttccctggatcgaaacctattacaaatgaagaactacttgaatctgatgtggatgtactaatacctgcagccattgaagaacagataactgaaaagaatgctgacaagataaaagcaaagataatactcgaacttgcaaacggacctacaacgccagaggcagatgagattctatacaagaaaggaagacttgaccttccagactttctttcaaattcagggggcgtaacggtttcatacttcgagtgggtacagaacaactacggagaatattggactgcagaagaggtttacgaaaaactagacaagaagatgaccaaagctgcacacgaggtctttgatgccatggataagtataaaataaatccaagaacagctgcatacgtaatctcggtaaaaaaggtcgcagacgccatgaaggcaagagggatgtattag

SEQ ID NO: 56917 - protein, 416 aa, Thermoplasma volcanium GSS1
MPESIDPFEMALQQLDKAARVLNLDEQALEILRQPEKILQVSIPVRMDNGKIKVFTGFRVRYNTARGPGKGGIRYHPDETLSTVKALASWMTWKCAIADIPYGGAKGGIICDPKSMSQGELERLSRGYIRAIADFIGPEVDVPAPDVYTNPQIMAWMMDEYENIVRHSAPNVITGKPLEIGGSEGRGDATAKGGMYVLREGAKRVGLDLSKATVAVQGFGNAGQFAVKFVQEMFGAKVVAVSDTKGGIFKSDGINYEALLDHKRKTGSVVGFPGSKPITNEELLESDVDVLIPAAIEEQITEKNADKIKAKIILELANGPTTPEADEILYKKGRLDLPDFLSNSGGVTVSYFEWVQNNYGEYWTAEEVYEKLDKKMTKAAHEVFDAMDKYKINPRTAAYVISVKKVADAMKARGMY

SEQ ID NO: 56918 - DNA, 1269 bp, Pyrococcus horikoshii OT3
  CDS (1)..(1269): transl_table=11
gtggatatggttgagcaggatccctttgaaattgcagttaagcagcttgagagagctgcccaacacatgaagataagtgaagaagctctcgagttcttgaagaggcctcagaggattgttgaggtcacaatccccgttgaaatggatgatggctctgtaaaagttttcacaggatttagagtccaatacaactgggctaggggtccaactaaaggtggaattaggtggcatcccgaagagactctaagtactgttaaggcccttgcagcttggatgacctggaagactgctgtaatggatctcccatacggtggaggtaagggtggaattatagttgatccaaagaagctctccgatagagagaaggagagacttgcaaggggctacattagggccgtttacgatataataagcccatacgaggacatacctgctcccgatgtttacaccaacccacagataatggcttggatgatggatgaatacgagacgattgccaggaggaagacaccagcctttggtataataaccgggaagcccctcagcatcggtggatcccttggaaggaatgaggctaccgcaagaggagcaagctacacaattagggaagcagctaaggttcttggatgggacggactcaagggtaagacaatcgcaattcagggttatggtaacgcaggttactacctagcaaagataatgagcgaagattacggaatgaaagtcgtagccgtaagcgacagcaagggtggaatttacaacccagatggccttaacgctgatgaggttctcaagtggaagagggagcatggaagcgttaaggacttcccaggagctacgaacataagcaatgaagaactacttgagcttgacgttgatgtcctagctccggcggctatagaagaagtcataaccaagaagaacgcagacaacattaaggctaagattgttgcagaggtagccaacggtccggttaccccagaggccgatgagatactattcgagaaaggaatccttcagattccggacttcctatgtaacgctggtggagttacggtcagctacttcgagtgggtgcagaacataaccggttactactggacacttgaagaggttagagagagacttgacaagaagatgacgaaagcattctatgacgtctacaacaccgcaaaggagaagaacatacacatgagagatgcagcttatgtagttgcagtccagagggtctaccaggcaatgctcgatcgcggatgggttaagcactga

SEQ ID NO: 56919 - protein, 422 aa, Pyrococcus horikoshii OT3
MDMVEQDPFEIAVKQLERAAQHMKISEEALEFLKRPQRIVEVTIPVEMDDGSVKVFTGFRVQYNWARGPTKGGIRWHPEETLSTVKALAAWMTWKTAVMDLPYGGGKGGIIVDPKKLSDREKERLARGYIRAVYDIISPYEDIPAPDVYTNPQIMAWMMDEYETIARRKTPAFGIITGKPLSIGGSLGRNEATARGASYTIREAAKVLGWDGLKGKTIAIQGYGNAGYYLAKIMSEDYGMKVVAVSDSKGGIYNPDGLNADEVLKWKREHGSVKDFPGATNISNEELLELDVDVLAPAAIEEVITKKNADNIKAKIVAEVANGPVTPEADEILFEKGILQIPDFLCNAGGVTVSYFEWVQNITGYYWTLEEVRERLDKKMTKAFYDVYNTAKEKNIHMRDAAYVVAVQRVYQAMLDRGWVKH

SEQ ID NO: 56920 - DNA, 1263 bp, Bacillus halodurans C-125
  CDS (1)..(1263): transl_table=11
atgggggccattgcagaaaaaggaaaagagtctagcattctatcgtcaacgcaagatgtgattcaacaagcgttagggaagctaggctatgaagagggaatgttcgagttgctcaaggagccggtgcgaatgctaacggttcgaatccctgtgcggatggacgacgggaccgtcaaagtgtttactggctatcgcgcgcaacacaatgatgcggttgggccgacaaaagggggcgttcgcttccatccggaagtgacagccgatgaagtgaaggcgctctcgttatggatgacgttaaaatgcggaatcgttaacattccgtacggtggtgggaaaggcgggatcgtatgtgatccgcgaacgatgtcatttcccgaaatcgagcggttaagcagagggtacgtaagagcgatcagtcaaatcgtcgggccatctaaggacattccggcacctgacgtatttacgaactcgcaaattatggcgtggatggtggatgagtatagccggattcgagagtttgattcacctgggttcattacaggtaaaccgatcgtgctcggcggctcccacggacgggaaacagcaacagccatgggggtcacaatttgcattgaagaggcagccaagctgaaacagctggatttacgggaggccaccgttattatccaaggctttggtaatgcaggaggctacttagccaaaatcttgagcgatcgcggggcgaaaatcattggtatttccgatgcgtatggggcgctctatgatgaaacaggcttagatattgagtatttgcttgatcgccgcgattcatttggcaccgtgacgacgttatttaaaaacaccataacaaacgaagagctattagaaaaaaagtgcgacattctcgttccagcagcgattgctaaccaaattacagaggcaaatgctcgcgaaatcaaagcttcgatcattgtagaggcggcgaatggcccaacaacgactgaagcaacaaatattttaaccgagcgcggtgtcttaattgtgcctgacgtgcttgcaagctctggtggtgtcaccgtttcgtattttgaatgggtacagaacaatttaggttattattggtcggaagaagaagtgtccgagaaacttagaagtaaaatcgttgaggcgtttcatcaagtggtggaaacagcgacgcgttacaacgttgaccctcgtttggcggcctatatggttggcgtacgaaaaacagcagaagcttcaagattccggggctggatttag

SEQ ID NO: 56921 - protein, 420 aa, Bacillus halodurans C-125
MGAIAEKGKESSILSSTQDVIQQALGKLGYEEGMFELLKEPVRMLTVRIPVRMDDGTVKVFTGYRAQHNDAVGPTKGGVRFHPEVTADEVKALSLWMTLKCGIVNIPYGGGKGGIVCDPRTMSFPEIERLSRGYVRAISQIVGPSKDIPAPDVFTNSQIMAWMVDEYSRIREFDSPGFITGKPIVLGGSHGRETATAMGVTICIEEAAKLKQLDLREATVIIQGFGNAGGYLAKILSDRGAKIIGISDAYGALYDETGLDIEYLLDRRDSFGTVTTLFKNTITNEELLEKKCDILVPAAIANQITEANAREIKASIIVEAANGPTTTEATNILTERGVLIVPDVLASSGGVTVSYFEWVQNNLGYYWSEEEVSEKLRSKIVEAFHQVVETATRYNVDPRLAAYMVGVRKTAEASRFRGWI

SEQ ID NO: 56922 - DNA, 1266 bp, Neisseria meningitidis MC58
  CDS (1)..(1266): transl_table=11
atgtctgaagcccttgcaaaagaaaccctcaatccgtttgaaatcgcgcgcaaacaggtgaaaaccgcctgtgaccggctgaaaaccgatccggccgtttatgaaatcctgaagagtccgacccgcgtgttggaagtcaattttcccgtcaaactcgacgacgacacggtcaaaaccttcacgggctaccgttcgcaacacaacaacgccgtcggcccctataaaggcggcgtgcgcttccatcccagtgtgaatttggacgaagtcaaagccctgtcaatttggatgaccatcaaatgctgcgttgcgggtattccttacggcggcggcaaaggcggcattaccttggatccgcgcgattattccgaggcggaactggaacgcatcgcccgcgcttatgctgaagcgattgccccgctgattggcgagaaaatcgatattcccgcccccgatgtgaataccaacggcaaaattatgtcgtggatggtggatgcttatgaaaacgtggtgaaacattccgcgccgggcgtatttaccggaaaaccggttgagttcggcggctctttggcgcgtaccgaggctaccggttacggcgtgaacctcgccgccgtccaagctttggaaaaactgggcaaggacgtgaagggtgccacttacgccattcaaggtttcggtaatgtgggttaccacacaggttattacgcgcatcaatccggcgcgaaagttgttgcggtttctactgttgacgttgccatttacaacgaaaacggtttggatatggaagctttgtttaaagagttccaagaaaaaggcttcatcaccaacgaagccggttacggcaaagaaattaccaacgccgaacttttggctttggatgtggacgtactcgccccttgcgcgctggaaaaccaactgacttccgaaaacgccggtaaagtccgcgcgaaaatcgtagtcgaaggcgcgaacggcccgactacgcccgaagccgacgtgatcctgcgtcaaaacggcgtattggtcgtgcctgatattctggcgaactgcggcggcgtggtcgtttcctatttcgagtgggtgcaaaacctgcaaggctattattgggagtttgacgaagttcaagagaaagaaaccgtcgtcctgcgacgcgcgttccgcgatatatggaacttggcgcaagagtatgatgtcgatttgcgaaccgcgtcttacatgatgagtatccgccgtgttgaaaaagcgatgaaactgcgcggttggtattga

SEQ ID NO: 56923 - protein, 421 aa, Neisseria meningitidis MC58
MSEALAKETLNPFEIARKQVKTACDRLKTDPAVYEILKSPTRVLEVNFPVKLDDDTVKTFTGYRSQHNNAVGPYKGGVRFHPSVNLDEVKALSIWMTIKCCVAGIPYGGGKGGITLDPRDYSEAELERIARAYAEAIAPLIGEKIDIPAPDVNTNGKIMSWMVDAYENVVKHSAPGVFTGKPVEFGGSLARTEATGYGVNLAAVQALEKLGKDVKGATYAIQGFGNVGYHTGYYAHQSGAKVVAVSTVDVAIYNENGLDMEALFKEFQEKGFITNEAGYGKEITNAELLALDVDVLAPCALENQLTSENAGKVRAKIVVEGANGPTTPEADVILRQNGVLVVPDILANCGGVVVSYFEWVQNLQGYYWEFDEVQEKETVVLRRAFRDIWNLAQEYDVDLRTASYMMSIRRVEKAMKLRGWY

SEQ ID NO: 56924 - DNA, 1251 bp, Halobacterium sp. NRC-1
  CDS (1)..(1251): transl_table=11
atgaccgagagtggtccgctggagaatatgctcgcgcagatggagcaggcgcgcgagtacgttgacatcgacgacggcatctacgagcgactgaagtcccccgagcgaacgctgtccgtcagtctcccggtgcgcatggacgacggcagcgtggaagtgttcgacgcctaccgctgccagttcgacagcgcacgcggcccctacaagggcggcatccgctaccacccgaccgtctccgaggaagaggtgtccgcgctggccggctggatgacctggaagaccgcgctcgtcgacctgccgttcggcggcgcgaaggggggcatcgtctgcaaccccaaggagctctcggacaacgagatcgagcagctcacccgccgctacaccgagggcatccgccggatgatcggcccggagacggacatccccgcgcccgacatgaacaccgacccccgcacgatggcgtgggtcatggacacctactccgtctaccaggggtacgcggttccggaagtcgtcaccggcaaacccccggagatcggcggcaccgacggccgcgtggaggccaccggccgcggcgtctccatcatcaccgaggagaccttcgaatacttcgacaccgacatccaggacgccgacgtggcgatccagggcttcggaaacgtcggcagcgtcacggccgatctgctctccgagcgcggcgcgaacatcgtcgccgtctcggacgtgaccggcgcgatccacgacccaaccgggctcgatatcgccgacgtgcaggcgtacgctgacgccaacggcggccgcctggaggggtacgacgccgaacccatctccaacgacgacctcctcacgctggacgtcgacgccctgatccccgccgcgatcgaggacgtcatcaccgtcgacgtggccgaacgcctcgcggccgacgtgatcgtggaagccgccaacggcccgacgaccttcgacgccgcccaagtcctcagcgaccgcggcgtccccgtcgtcccggacatcctcgcgaacgccggcggcgtcatcgtctcgtacctcgaatgggtgcagaacagccagcagtactcctgggacgtcgaggaggtcaaccgcgacctccgacagcggctcacgggtgccttcgacgagatgctggtggcctacgaggaccgcaacatcccgacactgcgcaccgccgcctacaccatcgccttggagcgcagcgcggacgcccacgagttccgcgggctgttcccgtaa

SEQ ID NO: 56925 - protein, 416 aa, Halobacterium sp. NRC-1
MTESGPLENMLAQMEQAREYVDIDDGIYERLKSPERTLSVSLPVRMDDGSVEVFDAYRCQFDSARGPYKGGIRYHPTVSEEEVSALAGWMTWKTALVDLPFGGAKGGIVCNPKELSDNEIEQLTRRYTEGIRRMIGPETDIPAPDMNTDPRTMAWVMDTYSVYQGYAVPEVVTGKPPEIGGTDGRVEATGRGVSIITEETFEYFDTDIQDADVAIQGFGNVGSVTADLLSERGANIVAVSDVTGAIHDPTGLDIADVQAYADANGGRLEGYDAEPISNDDLLTLDVDALIPAAIEDVITVDVAERLAADVIVEAANGPTTFDAAQVLSDRGVPVVPDILANAGGVIVSYLEWVQNSQQYSWDVEEVNRDLRQRLTGAFDEMLVAYEDRNIPTLRTAAYTIALERSADAHEFRGLFP

SEQ ID NO: 56926 - DNA, 1344 bp, Escherichia coli O157:H7 EDL933
  CDS (1)..(1344): transl_table=11
atggatcagacatattctctggagtcattcctcaaccatgtccaaaagcgcgacccgaatcaaaccgagttcgcgcaagccgttcgtgaagtaatgaccacactctggccttttcttgaacaaaatccaaaatatcgccagatgtcattactggagcgtctggttgaaccggagcgcgtgatccagtttcgcgtggtatgggttgatgatcgcaatcaggtacaggtcaaccgtgcatggcgtgtgcagttcagctctgccatcggcccgtacaaaggcggtatgcgcttccatccgtcagttaacctttccattcttaaattcctcggcttcgaacaaaccttcaaaaatgccctgactactctgccgatgggcggtggtaaaggcggcagcgatttcgacccgaaagggaaaagcgaaggcgaagtgatgcgtttctgccaggcgctgatgactgaactgtatcgccacctgggcgcggataccgacgttccggcaggtgatatcggggttggtggtcgtgaagtcggctttatggcggggatgatgaaaaagctctccaacaataccgcctgcgtcttcaccggtaagggcctttcatttggcggcagtcttattcgcccggaagctaccggctacggtctggtttatttcacagaagcaatgctaaaacgccacggtatgggttttgaaggcatgcgcgtttccgtttctggctccggcaacgtcgcccagtacgctatcgaaaaagcgatggaatttggtgctcgtgtgatcactgcgtcagactccagcggcactgtagttgatgaaagcggattcacgaaagagaaactggcacgtcttatcgaaatcaaatccagccgcgatggtcgagtggcagattacgccaaagaatttggtctggtctatctcgaaggccaacagccgtggtctgtaccggttgatatcgccctgccttgcgctacccagaacgaactggatgttgacgccgcgcatcagcttatcgctaatggcgttaaagccgtcgccgaaggggcaaatatgccgaccaccatcgaagcgactgaactgttccagcaggcaggcgtactatttgcaccgggtaaagcggctaatgctggtggcgtcgctacatcgggcctggaaatggcacaaaacgctgcgcgcctgggctggaaagccgagaaagttgacgcacgtttgcatcacatcatgctggatatccaccatgcctgtgttgagcatggtggtgaaggtgagcaaaccaactacgtgcagggcgcgaacattgccggttttgtgaaggttgccgatgcgatgctggcgcagggtgtgatttaa

SEQ ID NO: 56927 - protein, 447 aa, Escherichia coli O157:H7 EDL933
MDQTYSLESFLNHVQKRDPNQTEFAQAVREVMTTLWPFLEQNPKYRQMSLLERLVEPERVIQFRVVWVDDRNQVQVNRAWRVQFSSAIGPYKGGMRFHPSVNLSILKFLGFEQTFKNALTTLPMGGGKGGSDFDPKGKSEGEVMRFCQALMTELYRHLGADTDVPAGDIGVGGREVGFMAGMMKKLSNNTACVFTGKGLSFGGSLIRPEATGYGLVYFTEAMLKRHGMGFEGMRVSVSGSGNVAQYAIEKAMEFGARVITASDSSGTVVDESGFTKEKLARLIEIKSSRDGRVADYAKEFGLVYLEGQQPWSVPVDIALPCATQNELDVDAAHQLIANGVKAVAEGANMPTTIEATELFQQAGVLFAPGKAANAGGVATSGLEMAQNAARLGWKAEKVDARLHHIMLDIHHACVEHGGEGEQTNYVQGANIAGFVKVADAMLAQGVI

SEQ ID NO: 56928 - DNA, 1311 bp, Thermoplasma acidophilum DSM 1728
  CDS (1)..(1311): transl_table=11
atgtcaggaaaagctgatccacttgagatcgcgaaggaagcaaagccttcgcaggcaaacaacgaagtggaagaggatccgtttgagatcgcgctaaaacagctgaggaaggctgcaaaggttttgaatctagatgagcaggccctggagatactgagctcgccgcagaagatcctgcaggtgagcttgcccgtcaagatggatgacggcaaggtgaaggtattcaccggtttcagggtcaggcacaatatagccaggggcccggcgaagggaggcataaggttccacccgcaggagaccctttctacggttaaggctctgtctatgtggatgacttggaaatgcgccatagcagacataccctatggtggagcgaagggtggtatcatatgcgacccatcaacgatgagccagggcgagcttgagaggctcagcagggcatacataagggctatagctgacttcatcggccctgatgtggatgtacctgcacctgatgtaaacacgaacccacagataatggcatggatgctggacgaatacgagaacatagtcaggcacaatgcaccgaacgtcataaccggaaagcccctcgaggttggaggatcacttggaaggttcgattcaaccggtaagggaggcatgttcgtactccgcgaaggtgcaaagaagatcggtctagatctttccaaagcgcgcgtggctgtgcagggattcggaaacgtaggtcaattcgcagtcaaattcgttgaggagatgttcggagcaaaggttgtcgcagtttcggatataaagggaggcatatacagcgagaatggcttcaaattcgatgatctgctggcctggagcaagaagataggcagtgtcgttggattcccaggttcgaagcccataacgaacgaggaactgcttgaatccgatgtagacgtcctcataccggcagcaatagaggagcagataactgcaaggaatgcggataagatcaaggcaaagatcatacttgaacttgccaacggcccgacaacgccagaggccgatgagatactgtacaagaagggcaagctcgtgcttcctgacgtgctgtccaactccggtggtgtcatagtgtcctacttcgagtgggtccagaacaactacggcgagtactggagcaccgaggaagtgacgaacaagctcgatgtcaagatcacgaaggccgcaaggcaggtccttgagactatggacaagtaccatgtagatcccaggactgcagcttatgtcattgcggtgaaaaaggtcgcagatgctatgaaggtaaggggttggtactga

SEQ ID NO: 56929 - protein, 436 aa, Thermoplasma acidophilum DSM 1728
MSGKADPLEIAKEAKPSQANNEVEEDPFEIALKQLRKAAKVLNLDEQALEILSSPQKILQVSLPVKMDDGKVKVFTGFRVRHNIARGPAKGGIRFHPQETLSTVKALSMWMTWKCAIADIPYGGAKGGIICDPSTMSQGELERLSRAYIRAIADFIGPDVDVPAPDVNTNPQIMAWMLDEYENIVRHNAPNVITGKPLEVGGSLGRFDSTGKGGMFVLREGAKKIGLDLSKARVAVQGFGNVGQFAVKFVEEMFGAKVVAVSDIKGGIYSENGFKFDDLLAWSKKIGSVVGFPGSKPITNEELLESDVDVLIPAAIEEQITARNADKIKAKIILELANGPTTPEADEILYKKGKLVLPDVLSNSGGVIVSYFEWVQNNYGEYWSTEEVTNKLDVKITKAARQVLETMDKYHVDPRTAAYVIAVKKVADAMKVRGWY

SEQ ID NO: 56930 - DNA, 1326 bp, Salmonella typhimurium LT2
  CDS (1)..(1326): transl_table=11
atgtaccacggtcaattaaagaacatattacttttatcactaaggtttatcatggataagttatcttacgcttcagatagcagcacatctgcctggaatacctacctgcaacaaatcgagcgtgtggccccttatctgggcgagttatccccctgggtggatactctgcgccacccaaaacgcgctctgatcgtcgatattccggtacaaatggatgatggcactattcgtcatttcgaaggatatcgcgtgcagcacaacctctcccgaggtccgggtaaaggcggtgttcgctaccatcctgacgttgatctcaatgaagtgatggccctgtcagcatggatgaccatcaaatgtgccgcgctgaacctgccatacggcggcgctaaaggcggtatccgcgtcgatccgttctcgctgtcggaaggtgaactggagcgtttgacccgccgctataccagcgagatcggcattatcatcgggccgcagaaagatattcctgcgccggatgtcggcaccaacggtaaagtgatggcctggatgatggatacgtattccatgaatcatggcacgacggtcactggcgtcgtcaccggtaagcctatccatcttggcggttcgctgggccgtgaaaaagcgacggggcgcggcgttttcgtcagcgggctggaagccgcacgtcgggcgaatattgctgttgaaggcgctcgcgttgcggttcagggttttggtaacgtcggcagcgaagccgcgcgtctgtttgcaggcgctggcgcccgtgtcgtggcgattcaggatcataccgcgaccctgtttaacgccaccggtattgacatgaaggcgctcacggcatggcagacagaacacaaacagatagccggtttcccgggcgcggaaactatcgccagcgatgcgttctggcgtctggagatggatattctgatcccggcggcgcttgaaggtcagataactcgtcagcgcgcggaagccctgacgtgtaagctggtgctggaaggggctaacggcccaacctatccggatgctgatgatgttctggccagccgtggtatccttgtggtgcctgacgtggtctgtaacgcaggcggcgtaaccgtcagctacttcgaatgggtacaagatatggccagcttcttctggagcgaagaagagatcaatgcgcgcatggacaaaatcatgaccgacgcgattgtccatgtctgggagaaagcggctgagaaatcctgctctctgcgcaccgcagcctatattgtcgcctgtgagcgcattctgctggcccgtaaagatcgcggtatctatccaggttaa

SEQ ID NO: 56931 - protein, 441 aa, Salmonella typhimurium LT2
MYHGQLKNILLLSLRFIMDKLSYASDSSTSAWNTYLQQIERVAPYLGELSPWVDTLRHPKRALIVDIPVQMDDGTIRHFEGYRVQHNLSRGPGKGGVRYHPDVDLNEVMALSAWMTIKCAALNLPYGGAKGGIRVDPFSLSEGELERLTRRYTSEIGIIIGPQKDIPAPDVGTNGKVMAWMMDTYSMNHGTTVTGVVTGKPIHLGGSLGREKATGRGVFVSGLEAARRANIAVEGARVAVQGFGNVGSEAARLFAGAGARVVAIQDHTATLFNATGIDMKALTAWQTEHKQIAGFPGAETIASDAFWRLEMDILIPAALEGQITRQRAEALTCKLVLEGANGPTYPDADDVLASRGILVVPDVVCNAGGVTVSYFEWVQDMASFFWSEEEINARMDKIMTDAIVHVWEKAAEKSCSLRTAAYIVACERILLARKDRGIYPG

SEQ ID NO: 56932 - DNA, 1377 bp, Listeria innocua Clip11262
  CDS (1)..(1377): transl_table=11
atggcacaaacatctactatccaaaacgacactaaggcagccgaagaatacgcagcccgtgtgtttgagacaattaaacaacggaatcctggcgaaacggaattccaccaagcagttgaagaattcttaaactctgttatcccggcccttgcaaaagaacctaaatacgaagcacacggtattttagaacagctaacagaacccgaacgcctaattagtttccgagttccatgggtagatgatgctggcacagtacaagtaaatcgtggttaccgcgttcaatttaacagcgcaattggcccttataaaggcggccttcgcttccatccatccgttaccgggagtattgtaaaattccttggtttcgagcaaatcttcaaaaattctttaaccggtttaccaattggtggcggtaaaggtggctctgatttcaatccaaaaggtaaatcagacgctgaagtaatgcgtttttgtcaaagctttatgacagaattacaaaaacatatcggtccagatactgatgttccagctggtgatattggtgttggcggccgtgaaattggttacttatttggtcaatacaaacgtcttcgtggcgcttatgatgctggtactttaactggtaaaggtctatcatacggtggtagtttagctcgtacagaggcaactggttatggtcttgtttatttcacggttgaaatgttagaagcagctggtgaatccattcgcggtaagaagattgttgtttcaggttctggtaatgtagctatttatgcaattgaaaaagcacatgaacttggcgctaaagtagttgcatgtagtgattctgctggatttgtttatgacaaagaaggcatcaaagtagaaacagtgaaacaattaaaagaagtagagcgtaaacgtatcagtgaatatgtaacattgcatccatctgctgaatattatgcaggcggcgatgtgtggtctgttccatgtgatattgccttaccatgcgctactcaaaatgaaataaatgccgaccaagctcgtgcacttgtaaaaaacggtgtaatcgcagttgcagaaggtgcaaatatgccatctacgcttgaagcggttgacatttatcacgaaaacaaagtattatttggcccagcaaaagcagctaatgccggtggagttgcagtatcagcactcgaaatggctcaaaacagcacacgtatgagctggactttccaaacagtagatgaacacttacaaaacattatgaaagacatttataaaaactcaagcaatgctgcaagcgaatatggggcgcctggtaatttagttgtcggttccaatatcgcaggtttcctaaaagttgcagatacaatgattgctcacggaattatttaa

SEQ ID NO: 56933 - protein, 458 aa, Listeria innocua Clip11262
MAQTSTIQNDTKAAEEYAARVFETIKQRNPGETEFHQAVEEFLNSVIPALAKEPKYEAHGILEQLTEPERLISFRVPWVDDAGTVQVNRGYRVQFNSAIGPYKGGLRFHPSVTGSIVKFLGFEQIFKNSLTGLPIGGGKGGSDFNPKGKSDAEVMRFCQSFMTELQKHIGPDTDVPAGDIGVGGREIGYLFGQYKRLRGAYDAGTLTGKGLSYGGSLARTEATGYGLVYFTVEMLEAAGESIRGKKIVVSGSGNVAIYAIEKAHELGAKVVACSDSAGFVYDKEGIKVETVKQLKEVERKRISEYVTLHPSAEYYAGGDVWSVPCDIALPCATQNEINADQARALVKNGVIAVAEGANMPSTLEAVDIYHENKVLFGPAKAANAGGVAVSALEMAQNSTRMSWTFQTVDEHLQNIMKDIYKNSSNAASEYGAPGNLVVGSNIAGFLKVADTMIAHGII

SEQ ID NO: 56934 - DNA, 1314 bp, Nostoc sp. PCC 7120
  CDS (1)..(1314): transl_table=11
atgcggcgaataggagaaaaacatatggtttcaatgccgaccctacctttggaaggtgctagtccagcacatatttgtccatttgatcaagcttgtagctacttggaagcagccgcaaaagagttgaggctagatcaaggggcgctggaaattctcagtcacccacgtaaagttgtgacagtttctatacctgtgagattagataacggtgacatccgggtgctagcaggacatcgagtacagcattctgatatattaggcccctacaaaggtggaacgcgttaccatccagctgtgacactgcgggaagtatctgctctagcaatgctaatgacttggaaatgtgcgctattgggtattccttatggtggtgcgaagggaggtattgctatagatcccgaacactacagtgtaggtgaattagagagaattactcgtcgttatacaagtgaattgattaaagatatcggcccttccgtagatataccagcgccagatgtgggaacttccgcccgtgagatggcttggatgatggacacttattctatgaatgttggtcacgcagtcccaggggttgtcacaggtaagccaatttctatcggtggttcacggggacgggaaatggcaactggacgcggtgtaatgattattgtccgtgaagcactggcggatatgggcagaaccttagagggagtcaaagtagttattcaaggttttggcaatgtaggcggtgctgcggctgaattactgtaccaagctggagcgaaaattcttgctgtttctacaggtgcaggaggtttatttgcgtctgatggtctggatattccggcattaaaagcctacgctgcggaaaatcatcggagtattgtgggttttccccaagcagtaccaattagtaatgcagagttgctaactttaccttgcgatgttttgatacccgcagctttggaaaaccaaatcactgaggaaaatgtagaccagatacaggcgcaaattgtggcggaagctgctaatggcccggtgactttggaggctaaccgagttctagaagggcggggtgtgactgtactaccagacatcttggcgaatgctgggggtgtggtggtgagttatttagagtgggtgcaaggtctttcttacctattttgggatgaggagcgtgtcaatcgggaaatggaacacttgatggtgcaagcttatcatcaagttattaaacagtcacagatgcggcaagttcctttgcgattagccgcttataccttgggtgtgggtagggttgctcaggcgttgagcgatcgcggtctttatccttga

SEQ ID NO: 56935 - protein, 437 aa, Nostoc sp. PCC 7120
MRRIGEKHMVSMPTLPLEGASPAHICPFDQACSYLEAAAKELRLDQGALEILSHPRKVVTVSIPVRLDNGDIRVLAGHRVQHSDILGPYKGGTRYHPAVTLREVSALAMLMTWKCALLGIPYGGAKGGIAIDPEHYSVGELERITRRYTSELIKDIGPSVDIPAPDVGTSAREMAWMMDTYSMNVGHAVPGVVTGKPISIGGSRGREMATGRGVMIIVREALADMGRTLEGVKVVIQGFGNVGGAAAELLYQAGAKILAVSTGAGGLFASDGLDIPALKAYAAENHRSIVGFPQAVPISNAELLTLPCDVLIPAALENQITEENVDQIQAQIVAEAANGPVTLEANRVLEGRGVTVLPDILANAGGVVVSYLEWVQGLSYLFWDEERVNREMEHLMVQAYHQVIKQSQMRQVPLRLAAYTLGVGRVAQALSDRGLYP

SEQ ID NO: 56936 - DNA, 1266 bp, Brucella melitensis 16M
  CDS (1)..(1266): transl_table=11
gtgaccacggaaaatctgctcgaaagtgcactcgtccggctggacgaagcggcaagccacataaacatcgatgcggatgtcatcgaaaagctgaagtttgcgcgtgagaccatgaaagtgcggttgatgatccgcatggacgacggttcgcgcaagtcctttattgcgtggcgctgccgctatgacgacactcgcggaccgaccaagggcggcatccgctaccatcccgattcaacggtggaagaagtcgagacgcccgccttctggatgaccttcaaatgcgccgtgatgaacctgccttatggcggcggcaagggcgcgatccaggtcgatccgcgccagctctccaaggctgaactggagcgcctttcgcgcgcctatatccaggctttctccggcatcatcggcccggaccgcgacattccggccccggacgtctatacgaattccatgatcatgggctggatggctgacgaatactcccagatcgtcggccagtcctctcccgccgtcattaccggcaagcccatcgcacttggtggctcgctcggacgcaatgacgcgaccgcacgcggcggcttctacctcgttcgccacctctcgcacgatctgggcctcgcttcggttctgcgcgtcgccatccagggttttggcaatgccggacagttcatggccaagctgatggcgggcgacggccacaagatcgtcgccgtgtcggattccgcaggggcggtctattgcgcggatggccttgacgtcgacctgcttctggccgccaaggctgatggcaagtccgtcatttcaaccgccggtcacaagggccacgaggcgatcagcgccgacgaactcgtcgccgccgattgtgacgtgctggtgccaagcgccatggaaaacatgatccatgccggtaatgcagcttccattcgcgccaagcttatcgtggaactggccaacggcccggtcacgggggacgctgacaagatcctcgccgaaaagggcgtgatggtcctgccggacattcttgccaatgctggcggcgtgacggtttcctattttgaatgggtgcagaaccgtcagggttattactggacgcttgaagaaatccatgaacgcctgaagacgatcatggaacgcgaaggccgcgccatctggaaccatgcccgcgaacgcggtgtgaccctgcgcacggctgcctatgtgcatgcgctggagcgccttgcacaagcgatcgaggcccacggcacgcaaaacgacttcgcggcctga

SEQ ID NO: 56937 - protein, 421 aa, Brucella melitensis 16M
MTTENLLESALVRLDEAASHINIDADVIEKLKFARETMKVRLMIRMDDGSRKSFIAWRCRYDDTRGPTKGGIRYHPDSTVEEVETPAFWMTFKCAVMNLPYGGGKGAIQVDPRQLSKAELERLSRAYIQAFSGIIGPDRDIPAPDVYTNSMIMGWMADEYSQIVGQSSPAVITGKPIALGGSLGRNDATARGGFYLVRHLSHDLGLASVLRVAIQGFGNAGQFMAKLMAGDGHKIVAVSDSAGAVYCADGLDVDLLLAAKADGKSVISTAGHKGHEAISADELVAADCDVLVPSAMENMIHAGNAASIRAKLIVELANGPVTGDADKILAEKGVMVLPDILANAGGVTVSYFEWVQNRQGYYWTLEEIHERLKTIMEREGRAIWNHARERGVTLRTAAYVHALERLAQAIEAHGTQNDFAA

SEQ ID NO: 56938 - DNA, 1320 bp, Fusobacterium nucleatum subsp. nucleatum ATCC 25586
  CDS (1)..(1320): transl_table=11
ttgattattttttgtttattaatttttaaggaggaatttagaatgagtaaagaaactttaaacccattagaaagcggacaaaaacaagttaaaaaagcatgtgatgctttaggattggatccagcagtatatgaattattaaaggaacctcaaagaataatagaaattactattcctgtaaaaatggatgatggatctataaaaacatttaaaggatacagagcagctcataatgatgcagtaggtcctttcaaaggaggaataagattccaccaaaatgttaattctgatgaagtaaaagctctttctttatggatgagtattaaatgtcaagtaactggaatcccttatggaggaggaaaaggtggaattactgtagacccttctgaattatctcaaagagaattagaacaattatcaagaggatgggtaagaggaatgtggaaatacttaggtgaaaaagtagatgttcctgctccagatgtaaatacaaatggacaaattatggcttggatgcaagatgaatataataaattatctggagaacaaactataggtgtatttactggaaaacctttatcttatggaggatctcaaggaagaaatgaagcaactggatttggtgttgctgtaactatgagagaagctttcaaagcattaggaaaaaatcttaaaggtgcaacagttgcagttcaaggatttggaaatgttggaaaattcactgtaaaaaatataatgaaattaggtggaaaagttgtagcagttgctgaatttgaaaaaggaaagggagcttatgcaatatataaagattctgggtttacatttgaagaattagaagctgcaaaagctgctggaagtttaacaaaagttgctggtgcaaaagaattatctatggatgaattctgggctttaaatgttgaagctatcgctccatgtgcattagaaaatgctattactaaccatgaagctgaattaataaaagctggaattgtttgtgaaggagcaaatggaccaataactccagaagctgatgaagttctttacaaaaaaggtatagtagttactcctgacgttttaacaaatgctggaggagttacagtatcttactttgaatgggttcaaaatatctatggatactattggacagaaaaagaagttgaagaaaaagaagaaagagctatggttgatgcattcacacctatatgggcattaaagaaagaatttgatggaaaaggacaacctatttcttttagacaagctacttatatgaaatctattaagagaatagctgaagctatgaaaattagaggatggtactaa

SEQ ID NO: 56939 - protein, 439 aa, Fusobacterium nucleatum subsp. nucleatum ATCC 25586
MIIFCLLIFKEEFRMSKETLNPLESGQKQVKKACDALGLDPAVYELLKEPQRIIEITIPVKMDDGSIKTFKGYRAAHNDAVGPFKGGIRFHQNVNSDEVKALSLWMSIKCQVTGIPYGGGKGGITVDPSELSQRELEQLSRGWVRGMWKYLGEKVDVPAPDVNTNGQIMAWMQDEYNKLSGEQTIGVFTGKPLSYGGSQGRNEATGFGVAVTMREAFKALGKNLKGATVAVQGFGNVGKFTVKNIMKLGGKVVAVAEFEKGKGAYAIYKDSGFTFEELEAAKAAGSLTKVAGAKELSMDEFWALNVEAIAPCALENAITNHEAELIKAGIVCEGANGPITPEADEVLYKKGIVVTPDVLTNAGGVTVSYFEWVQNIYGYYWTEKEVEEKEERAMVDAFTPIWALKKEFDGKGQPISFRQATYMKSIKRIAEAMKIRGWY

SEQ ID NO: 56940 - DNA, 1242 bp, Thermoanaerobacter tengcongensis MB4
  CDS (1)..(1242): transl_table=11
atggcagttaatcctttaaaggctgttcaagaacagataaaaaatgcttgtgaacttctcaatttagaagaatcagtctatgagatattaaaagagcctctcagagtaatggaagtttccattcccgtacagatggacgatggaacagtgaaggtatttaaaggttacaggtcacagcacaacgatgcccttggacctgcaaaagggggaataagatttcatccggacgttacacttgatgaagtaaaagctctttctatgtggatgacctttaaatgcggtgtagttgggcttccatacggcggaggaaaaggaggagtagcagttaatcctcaagaactttcaccaacagaactagaaagattgagtagaggttatattcgggcaatttccagtataatagggcctgaaaaggatataccagcacctgacgtaggtacaaatgctcaagtgatggcatggatggtagatgagtataacaaaatagtcggttataatagtccggcagttataacaggaaaacctttgatatacgggggttcaaaaggtagggttgatgctacaggatatggagtagcgctaatcgcgcgcgaagctgcgaaaaagttagaaatggatataaagaactgtactgtagccatacagggttacggaaatgtaggaagttacacgggaattcacctgcagagactgggtgcaaagatcgtaggggtagtagatatatatggaggggtatataacgaaaggggaattgacgcagagaagttagcagaacatgtgagaaagacagggagtgtcaaagactttgagggcactacttctttaacaaatgaggaactatttgcattggacgtagatgtactaattcccgcagctcttgagaatcaaattacggaagaaaatgctccgaatgtgaaagcgaggatggtatgtgaagcggcaaatggtcctacaacacctgaggcagacaggatactgagagaaaaaggaatttttgtagtaccggatatacttgctaattctggtggggtgattgtttcttacttcgagtgggtgcagaatttgatgaattattattggactgaagaagaaataaaagaaaggcaagagattgtgatgataaatgcatttaataatatataccaattggctcaagaatataaggttgatatgagaacagctgcttatatgattgctataaagagaatatatgaagcgatgaaagtaagaggatggatatag

SEQ ID NO: 56941 - protein, 413 aa, Thermoanaerobacter tengcongensis MB4
MAVNPLKAVQEQIKNACELLNLEESVYEILKEPLRVMEVSIPVQMDDGTVKVFKGYRSQHNDALGPAKGGIRFHPDVTLDEVKALSMWMTFKCGVVGLPYGGGKGGVAVNPQELSPTELERLSRGYIRAISSIIGPEKDIPAPDVGTNAQVMAWMVDEYNKIVGYNSPAVITGKPLIYGGSKGRVDATGYGVALIAREAAKKLEMDIKNCTVAIQGYGNVGSYTGIHLQRLGAKIVGVVDIYGGVYNERGIDAEKLAEHVRKTGSVKDFEGTTSLTNEELFALDVDVLIPAALENQITEENAPNVKARMVCEAANGPTTPEADRILREKGIFVVPDILANSGGVIVSYFEWVQNLMNYYWTEEEIKERQEIVMINAFNNIYQLAQEYKVDMRTAAYMIAIKRIYEAMKVRGWI

SEQ ID NO: 56942 - DNA, 1251 bp, Thermoanaerobacter tengcongensis MB4
  CDS (1)..(1251): transl_table=11
atgtccacagaatcattaaatccattggtaattgctcaaaagcaaataaagaaagcttgtgacattttaggagttgaggagtcagtttacgagcttttgaaagagccaatgagagttctggaggtttccatccctgtgcaaatggacgatggaagcataaaagtcttcaagggatatagatcgcagcacaacgatgcactaggtcctacaaaaggaggaataagattccatccggatgtgactttagatgaagtaaaagctttatccatgtggatgacctttaaatgcggagtagtaggtcttccctatggcggagctaaaggtggagtggttgtaaatccaaaagaactctccaatgatgaacttcagaggctgagcaggggttatataagggctatagcaagcataataggacctgaaaaagacataccagctcctgatgttggaacaaacgcccagattatggcttggatggtagatgaatacaataaaattgtgggttacaacagccctgctgtgattacgggaaaacccctcatttacggcggttcaaaagggagagtggcagctacaggctacggagttgctctaatggcaagggaagcagtaaaacgtttaaacatggattttaaggactgtactgtagcaattcaggggtttggaaatgttggaagccatgccggtttaagtctccagaggttaggagctaaaattatagcagtgagcgatgtgtacggaggaatatacaatgaaaaaggaattgatgcagagaagttagtagaacatgtaaacaaaacaggaactgtgtgcaattttgagggaaccactcccatcacaaatgaagagcttttgacgatgaaggtggacatattagtgttggcagctttagaaaaccagattacctctgctaatgcaaatgaagtaaaggcaaagataatatgtgaaggtgctaacggacccacaactccagaagccgacaagatactttctgaaaaaggtgtttttgtagtgcctgatatacttgctaattctggaggagtcatagtctcttactttgagtgggtacagaatttgatgaactattactggactgagaaagaagtagaagagaggcaggaaatcatgatggtaaatgcttttaactctatatatgatttagcacagcagtataaagtagacatgagaactgcagcctacatgatttcaataaagagagtatatgaggccatgaaagtcagaggttggctgtaa

SEQ ID NO: 56943 - protein, 416 aa, Thermoanaerobacter tengcongensis MB4
MSTESLNPLVIAQKQIKKACDILGVEESVYELLKEPMRVLEVSIPVQMDDGSIKVFKGYRSQHNDALGPTKGGIRFHPDVTLDEVKALSMWMTFKCGVVGLPYGGAKGGVVVNPKELSNDELQRLSRGYIRAIASIIGPEKDIPAPDVGTNAQIMAWMVDEYNKIVGYNSPAVITGKPLIYGGSKGRVAATGYGVALMAREAVKRLNMDFKDCTVAIQGFGNVGSHAGLSLQRLGAKIIAVSDVYGGIYNEKGIDAEKLVEHVNKTGTVCNFEGTTPITNEELLTMKVDILVLAALENQITSANANEVKAKIICEGANGPTTPEADKILSEKGVFVVPDILANSGGVIVSYFEWVQNLMNYYWTEKEVEERQEIMMVNAFNSIYDLAQQYKVDMRTAAYMISIKRVYEAMKVRGWL

SEQ ID NO: 56944 - DNA, 1386 bp, Streptomyces coelicolor A3(2)
  CDS (1)..(1386): transl_table=11
gtgcccgccgtgccagaaagggcccctgtgacgacgcgaagcgagacgcagtccaccctcgaccacctcctcaccgagatcgagctgcgcaacccggcccagcccgagttccaccaggcggcccacgaggtcctggagaccctggcgccggtcgtcgcggcccgccccgagtacgccgagccgggcctcatcgagcggctggtcgagccggagcgccaggtgatgttccgggtgccgtggcaggacgaccagggccgcgtccgcgtcaaccggggcttccgggtcgagttcaacagcgcgctgggcccgtacaagggcggtctgcgcttccatccgtccgtcaacctgggcgtcatcaagttcctgggcttcgagcagatcttcaagaacgcgctgaccggcctcggcatcggcggcggcaagggcggcagcgacttcgacccgcacgggcgcagcgacgcggaggtcatgcggttctgccagtccttcatgacggagctgtaccggcacatcggcgagcacacggacgtcccggcgggggacatcggcgtcgggggccgcgagatcggctacctcttcggccagtaccggcggatcaccaaccgctgggagtccggcgtcctgaccggcaagggccagggctggggcggctcgctgatccgcccggaggcgaccggctacggcaacgtgctgttcgcggcggcgatgctgcgggagcgcggcgaggacctggagggccagaccgcggtcgtctccggctccggcaacgtggcgatctacaccatcgagaagctgaccgccctcggcgccaacgccgtcacctgctcggactcctccggctacgtcgtcgacgagaagggcatcgacctcgacctgctcaagcagatcaaggaggtcgagcgcggccgcgtcgacgcgtacgccgagcgccggggcgcctcggcccgcttcgtgcccggcggcagcgtctgggacgttccggccgaccttgccctcccctccgccacgcagaacgagctggacgagaacgccgccgccacgctcgtccgcaacggcgtcaaggcggtctccgagggcgcgaacatgccgaccacccccgaggccgtccacctgctccagaaggcgggcgtcgccttcggccccggcaaggcggccaacgcgggcggcgtcgcggtcagcgccctggagatggcgcagaaccacgcccgtacctcgtggacggcggcgcgggtcgaggaggagctggccgacatcatgaccagcatccacaccacctgccacgagaccgccgagcgctacgacgcccccggcgactacgtcaccggcgcgaacatcgccggcttcgagcgggtggccgacgcgatgctggcgcagggcgtcatctga

SEQ ID NO: 56945 - protein, 461 aa, Streptomyces coelicolor A3(2)
MPAVPERAPVTTRSETQSTLDHLLTEIELRNPAQPEFHQAAHEVLETLAPVVAARPEYAEPGLIERLVEPERQVMFRVPWQDDQGRVRVNRGFRVEFNSALGPYKGGLRFHPSVNLGVIKFLGFEQIFKNALTGLGIGGGKGGSDFDPHGRSDAEVMRFCQSFMTELYRHIGEHTDVPAGDIGVGGREIGYLFGQYRRITNRWESGVLTGKGQGWGGSLIRPEATGYGNVLFAAAMLRERGEDLEGQTAVVSGSGNVAIYTIEKLTALGANAVTCSDSSGYVVDEKGIDLDLLKQIKEVERGRVDAYAERRGASARFVPGGSVWDVPADLALPSATQNELDENAAATLVRNGVKAVSEGANMPTTPEAVHLLQKAGVAFGPGKAANAGGVAVSALEMAQNHARTSWTAARVEEELADIMTSIHTTCHETAERYDAPGDYVTGANIAGFERVADAMLAQGVI

SEQ ID NO: 56946 - DNA, 1608 bp, Drosophila melanogaster
  CDS (1)..(1608)
atgcttcgttatacggcacggattttgaatgggatttacccacttatgccaaggcaagtattaaaacgttccgcacaccaggtgcccgagaagctgaaaaaagttgagacggacaaggacccggaattctcggaaatggttctttattattatcacaaggccgcgcagactatggagcctgcattgctcaaggaaatggaaaagtatccgcatatgaagccggaggagcgtcaggctcgtgtcaccgctatactgaatctgcttgggagcgtctccacctcggtggaggttaattttcccattgtccgcaaaaacggcacctacgagatcatcagcggttatcgttcgcatcatgtacgccatcgattgcctctcaagggcggaatccgatacgctctggacgtgaacgagagcgaagttaaagcccttgccgccattatgacgttcaagtgcgcttgcgtgaatgtaccttatggtggatctaagggcggcatttgtatcgatcccaagaagtatacagtggatgagctgcagacgatcacacggcgatacacgatggagttgctcaagcgtaatatgattggtcccggcatcgatgtaccggcgcccgatgtgaacactggtccgcgtgagatgagctggattgttgatcagtaccagaagacatttggctacaaggatatcaattcatcggctattgtcaccgggaagcccgtacacaacggcggcattaatggtcgacattcggccacgggcagaggcgtttggaaggcgggcgatctctttctgaaggataaggaatggatggatctgctcaagtggaagacgggatggaaggacaagacggtcatagtgcagggatttggcaatgtgggctcctttgccgctaagtatgtgcacgaggcgggcgccaaagtcatcggaataaaagagtttgatgtttctctggttaataaggacggcatagatattaatgatctttttgaatacactgaggaaaagaagactattaaaggatatccaaaagctcaggagtctaaggaggacttgttggtagccgaaaccgatatccttatgccgtgtgccacccaaaaagtgataaccaccgacaatgccaaagacatcaaggccaagctgatcctggaaggcgccaacgggccgaccacaccatctggcgagaaaatcctattggataagggtgtcctcctagttcccgatctctattgcaatgcgggcggcgtaacagtatcctactttgagtacctcaaaaacattaaccacgtgtcatatggcaaaatgaactctaaatctacatccgagcttattatcgaactgatgaactccatcaatgagtctttgcatgaatgccccgatagtcaactaccgaacatatgtcccaataagaaacttaagaggatacaacaatgcaccacagaggcggatatcgtggactcggctctccaaacagttatggaatctgcagcacgtggcatcaaggagatggcccacaaatttgaattgtgtaacgatctgcggagggccgcctacgtttggtcttcattcaaaattttccaagccatggaaagctccggaatttcccaacagtag

SEQ ID NO: 56947 - protein, 535 aa, Drosophila melanogaster
MLRYTARILNGIYPLMPRQVLKRSAHQVPEKLKKVETDKDPEFSEMVLYYYHKAAQTMEPALLKEMEKYPHMKPEERQARVTAILNLLGSVSTSVEVNFPIVRKNGTYEIISGYRSHHVRHRLPLKGGIRYALDVNESEVKALAAIMTFKCACVNVPYGGSKGGICIDPKKYTVDELQTITRRYTMELLKRNMIGPGIDVPAPDVNTGPREMSWIVDQYQKTFGYKDINSSAIVTGKPVHNGGINGRHSATGRGVWKAGDLFLKDKEWMDLLKWKTGWKDKTVIVQGFGNVGSFAAKYVHEAGAKVIGIKEFDVSLVNKDGIDINDLFEYTEEKKTIKGYPKAQESKEDLLVAETDILMPCATQKVITTDNAKDIKAKLILEGANGPTTPSGEKILLDKGVLLVPDLYCNAGGVTVSYFEYLKNINHVSYGKMNSKSTSELIIELMNSINESLHECPDSQLPNICPNKKLKRIQQCTTEADIVDSALQTVMESAARGIKEMAHKFELCNDLRRAAYVWSSFKIFQAMESSGISQQ

SEQ ID NO: 56948 - DNA, 1281 bp, Oceanobacillus iheyensis HTE831
  CDS (1)..(1281): transl_table=11
atggtagccgataaagcagcagattcttcaaatgtgaatcaagaaaatatggatgttttaaatacaacacaaactattattaaaagtgcattggataaacttggttacccagaagaggtatttgaattattaaaagaaccgatgcggattctaacggtccgtatacctgtaagaatggatgacggtaatgtaaaagtgtttacaggttatcgtgctcagcacaatgatgcagtgggtcctaccaaaggtggaatacgctttcatcctaatgttactgaaacagaagtaaaggcgctttctatttggatgagtttgaaatcggggattgttgatcttccttatggtggagctaaaggaggaattatttgcgatcctcgtgaaatgtctttccgtgaattagaagcattaagtcgcggttatgtacgtgcggttagccaaatagtaggtccgacaaaagatatacctgcacctgatgtatttactaattctcaaattatggcgtggatgatggatgaatatagtaagattgatgaatttaacaatcctgggtttataactggtaaaccaattgtccttggtggatcgcatgggagagaatctgctactgcaaaaggtgtaacaatcgttttaaatgaagcagctaaaaagaaaggcatagatataaaaggagcccgtgttgttatacaagggtttggaaatgctggaagctttttagctaagtttttacatgatgccggggcgaaagttgtcgcaatatctgatgcgtacggtgccttgtatgatccagaaggcttggatattgattatttattggatcgccgtgacagttttggtacggtaacgaaattatttaataatacaatttccaatgatgcattatttgaattagactgcgatattattgtaccagctgctgttgagaatcagataactcgtgaaaatgctcataatataaaagcatctattgtagttgaagcagctaacggacctacaacgatggaagcaacaaaaatactaacagaacgtgacatattaattgtaccagatgttttagcttctgctggaggagttactgtatcttactttgaatgggtgcaaaacaatcaagggttctattggtcagaagaagaaatagataataaattacacgaaataatgattaaatcatttaacaacatctataatatgtcgaaaacacggagaattgatatgagattagctgcatatatggttggtgttagaaagatggcagaagcatctcgtttccgtggttgggtatag

SEQ ID NO: 56949 - protein, 426 aa, Oceanobacillus iheyensis HTE831
MVADKAADSSNVNQENMDVLNTTQTIIKSALDKLGYPEEVFELLKEPMRILTVRIPVRMDDGNVKVFTGYRAQHNDAVGPTKGGIRFHPNVTETEVKALSIWMSLKSGIVDLPYGGAKGGIICDPREMSFRELEALSRGYVRAVSQIVGPTKDIPAPDVFTNSQIMAWMMDEYSKIDEFNNPGFITGKPIVLGGSHGRESATAKGVTIVLNEAAKKKGIDIKGARVVIQGFGNAGSFLAKFLHDAGAKVVAISDAYGALYDPEGLDIDYLLDRRDSFGTVTKLFNNTISNDALFELDCDIIVPAAVENQITRENAHNIKASIVVEAANGPTTMEATKILTERDILIVPDVLASAGGVTVSYFEWVQNNQGFYWSEEEIDNKLHEIMIKSFNNIYNMSKTRRIDMRLAAYMVGVRKMAEASRFRGWV

SEQ ID NO: 56950 - DNA, 1266 bp, Brucella suis 1330
  CDS (1)..(1266): transl_table=11
gtgaccacggaaaatctgctcgaaagtgcactcgtccggctggacgaagcggcaagccacataaacatcgatgcggatgtcatcgaaaagctgaagtttgcgcgtgagaccatgaaagtgcggttgatgatccgcatggacgacggttcgcgcaagtcctttattgcgtggcgctgccgctatgacgacactcgcggaccgaccaagggcggcatccgctaccatcccgattcaacggtggaagaagtcgagacgctcgccttctggatgaccttcaaatgcgccgtgatgaacctgccttatggcggcggcaagggcgcgatccaggtcgatccgcgccagctctccaaggctgaactggagcgcctttcgcgcgcctatatccaggctttctccggcatcatcggcccggaccgcgacattccggccccggacgtctatacgaattccatgatcatgggctggatggctgacgaatactcccagatcgtcggccagtcctctcccgccgtcattaccggcaagcccatcgcacttggtggctcgctcggacgcaatgacgcgaccgcacgcggcggcttctacctcgttcgccacctctcgcacgatctgggcctcgcttcggttctgcgcgtcgccatccagggttttggcaatgccggacagttcatggccaagctgatggcgggcgacggccacaagatcgtcgccgtgtcggattccgcaggggcggtctattgcgcggatggccttgacgtcgacctgcttctggccgccaaggctgatggcaagtccgtcatttcaaccgccggtcacaagggccacgaggcgatcagcgccgacgaactcgtcgccgccgattgtgacgtgctggtgccaagcgccatggaaaacatgatccatgccagtaatgcagcttccattcgcgccaagcttatcgtggaactggccaacggcccggtcacgggggacgctgacaagatcctcgccgaaaagggtgtgatggtcctgccggacattcttgccaatgctggcggcgtgacggtttcctattttgaatgggtgcagaaccgtcagggttattactggacgcttgaagaaatccatgaacgcctgaagacgatcatggaacgcgaaggccgcgccatctggaaccatgcccgcgaacgcggtgtgaccctgcgcacggctgcctatgtgcatgcgctggagcgccttgcacaagcgatcgaggcccacggcacgcaaaacgacttcgcggcctga

SEQ ID NO: 56951 - protein, 421 aa, Brucella suis 1330
MTTENLLESALVRLDEAASHINIDADVIEKLKFARETMKVRLMIRMDDGSRKSFIAWRCRYDDTRGPTKGGIRYHPDSTVEEVETLAFWMTFKCAVMNLPYGGGKGAIQVDPRQLSKAELERLSRAYIQAFSGIIGPDRDIPAPDVYTNSMIMGWMADEYSQIVGQSSPAVITGKPIALGGSLGRNDATARGGFYLVRHLSHDLGLASVLRVAIQGFGNAGQFMAKLMAGDGHKIVAVSDSAGAVYCADGLDVDLLLAAKADGKSVISTAGHKGHEAISADELVAADCDVLVPSAMENMIHASNAASIRAKLIVELANGPVTGDADKILAEKGVMVLPDILANAGGVTVSYFEWVQNRQGYYWTLEEIHERLKTIMEREGRAIWNHARERGVTLRTAAYVHALERLAQAIEAHGTQNDFAA

SEQ ID NO: 56952 - DNA, 1401 bp, Corynebacterium efficiens YS-314
  CDS (1)..(1401): transl_table=11
ttgaaatttcattgcaaattcacctgcccgcggtgccgagatgggaacgttgaattcatgactgtagatgagcaggtctccaactactacgacatgctgctgaagcgcaacgccggggaacctgagttccaccaggctgtcgcggaggttctcgaatctctgaagatcgtcctggagaaggacccgcactacgccgactacggtctgatccagcgtctctgcgaaccggaacgccagctgatcttccgtgtgccctgggtggatgacaacggtcaggtgcacgtcaaccgtggtttccgtgtccagttcaactccgcactcggcccgtacaagggtggtctgcgtttccacccctccgtcaacctcggcatcgtcaagttcctcggcttcgagcagatcttcaagaactccctcaccggtctgccgatcggtggcggcaagggtggttccgacttcgacccgaagggcaagtccgagctggagatcatgcgcttctgccagtccttcatgaccgagctgcaccgccacatcggcgagtaccgggatgtcccggccggtgacatcggagtcggtggccgcgagatcggttacctcttcggccactaccgccgtctggccaaccagcacgagtccggtgtgctcaccggcaagggcctgacctggggtggttccctggtccgcaccgaggccaccggcttcggcaccgtctacttcgtccaggagatgatcaaggcggaaggggagaccctcgagggcaagaaggtcatcgtctccggttccggcaacgtggccacctacgccatccagaaggtgcaggaactgggtgcggttgtggtcggcttctccgactccagcggctgggtctccaccccgaacggtgttgacgtggccaagctgcgtgagatcaaggaggtccgtcgtgcacgcgtgtcctcctacgccgacgaggtggagggtgcggagtaccacaccgacggctccatctgggatctgaccgccgacatcgcgctgccctgcgccacccagaacgaactggacggcgacaacgcccgcaccctcgcggacaacggctgccgcttcgtggcggagggcgccaacatgccctccacccccgaggccatcgacgtcttccgtgagcgtggtgttctcttcgggccgggcaaggctgccaacgccggtggcgtggccacctccgccctggagatgcagcagaacgcctcccgtgattcctggagcttcgagtacaccgatgagcgtctccaccgcatcatgaagaacatcttcaagtcctgcgccgataccgccaaggagtacggccacgagaagaactacgtggtcggtgcgaacatcgccggattcaagaaggtcgctgacgccatgctcgcccagggtgtcatctaa

SEQ ID NO: 56953 - protein, 466 aa, Corynebacterium efficiens YS-314
MKFHCKFTCPRCRDGNVEFMTVDEQVSNYYDMLLKRNAGEPEFHQAVAEVLESLKIVLEKDPHYADYGLIQRLCEPERQLIFRVPWVDDNGQVHVNRGFRVQFNSALGPYKGGLRFHPSVNLGIVKFLGFEQIFKNSLTGLPIGGGKGGSDFDPKGKSELEIMRFCQSFMTELHRHIGEYRDVPAGDIGVGGREIGYLFGHYRRLANQHESGVLTGKGLTWGGSLVRTEATGFGTVYFVQEMIKAEGETLEGKKVIVSGSGNVATYAIQKVQELGAVVVGFSDSSGWVSTPNGVDVAKLREIKEVRRARVSSYADEVEGAEYHTDGSIWDLTADIALPCATQNELDGDNARTLADNGCRFVAEGANMPSTPEAIDVFRERGVLFGPGKAANAGGVATSALEMQQNASRDSWSFEYTDERLHRIMKNIFKSCADTAKEYGHEKNYVVGANIAGFKKVADAMLAQGVI

SEQ ID NO: 56954 - DNA, 1350 bp, Pseudomonas putida KT2440
  CDS (1)..(1350): transl_table=11
atgtctaccatgatcgaatctgtcgacaatttccttgcacgcctgaagcagcgtgacccaggccagccggaattccaccaggcggtggaagaggtgctgcgcaccctgtggccattccttgaagccaacccccactatctgcagtccggcatcctcgagcgcatggtcgagcccgagcgcgccgtacttttccgcgtttcttgggtcgatgaccagggcaaggtgcaggtcaaccgcggctaccgcattcagatgagcagtgccattggcccgtacaagggcgggctgcgcttccacccgtcggtgaacctcagcgtgctgaagttcctggcgttcgagcaggtgttcaagaactcgctgacctcgctgcccatgggcggcggcaagggcggctcggactttgacccgaaaggcaagagcgacgccgaagtgatgcgcttctgccaggcgttcatgagcgagctgtatcgccacatcggtgctgactgcgacgtaccggccggtgacatcggtgtgggggcccgcgaaatcggcttcatgttcggccagtacaagcgcctggccaaccagttcacctcggtgttgaccggtaagggcatgacctatggcggcagcctgatccgcccggaagccaccggctatggctgcgtttacttcgccgaagaaatgctcaagcgtcaggacaagcgtatcgacggccgccgcgtggcggtgtccggttcgggcaacgtcgcccagtatgctgcgcgtaaggtgatggacctgggcggcaaggtgatctcgctgtctgactctgaaggtaccttgtatgcagaagccgggctgaccgacgcccagtgggacgccttgatggagctgaaaaacgtcaagcgcggacgtatcagcgagctggccgggcaattcggcctggagttccgcaagggccagaccccgtggagcctgccgtgcgacatcgccctgccatgcgccacccagaacgagctgggcgccgaagatgcccgcaccttgctgcgtaacggctgtatctgtgtggccgaaggcgccaacatgccgactaccctcgaggctgtggatatcttcctggacgccggcattctgtacgccccgggcaaggcctccaatgcgggcggcgtagccgtgtcgggcctggaaatgtcgcagaacgccatgcgcctgctgtggacggccggtgaagtggacagcaagctgcacaacatcatgcagtcgattcaccatgcatgcgtgcactacggtgaagaggctgatggccggatcaactacgtcaagggggcgaacatcgcgggcttcgtgaaagtggccgatgcgatgctggctcagggcgtggtctga

SEQ ID NO: 56955 - protein, 449 aa, Pseudomonas putida KT2440
MSTMIESVDNFLARLKQRDPGQPEFHQAVEEVLRTLWPFLEANPHYLQSGILERMVEPERAVLFRVSWVDDQGKVQVNRGYRIQMSSAIGPYKGGLRFHPSVNLSVLKFLAFEQVFKNSLTSLPMGGGKGGSDFDPKGKSDAEVMRFCQAFMSELYRHIGADCDVPAGDIGVGAREIGFMFGQYKRLANQFTSVLTGKGMTYGGSLIRPEATGYGCVYFAEEMLKRQDKRIDGRRVAVSGSGNVAQYAARKVMDLGGKVISLSDSEGTLYAEAGLTDAQWDALMELKNVKRGRISELAGQFGLEFRKGQTPWSLPCDIALPCATQNELGAEDARTLLRNGCICVAEGANMPTTLEAVDIFLDAGILYAPGKASNAGGVAVSGLEMSQNAMRLLWTAGEVDSKLHNIMQSIHHACVHYGEEADGRINYVKGANIAGFVKVADAMLAQGVV

SEQ ID NO: 56956 - DNA, 1347 bp, Lactobacillus plantarum WCFS1
  CDS (1)..(1347): transl_table=11
ttgagtcaagcaaccgattatgtccaacatgtttaccaagtcattgaacaccgtgatccgaaccaaaccgaatttttagaggccatcaacgacgtcttcaaaacgatcacgccagtcctcgaacaacatccagaatatatcgaagccaatattttggaacgtttgaccgaaccagaacggattattcaattccgggttccttggctcgacgatgctggtcatgcacgagtcaaccgtgggttccgagtacaatttaactcagcaatcggtccttacaagggcggcttacggttacacccatccgttaatctgagtatcgtcaaattcttgggctttgaacagatcttcaaaaatgccctgaccggcctaccaattggcggtggtaaagggggctctgatttcgaccctaagggcaaatcagacaacgaaattatgcgcttctgtcagagtttcatgaccgaactgagcaagtacattggtctcgatactgacgttcctgctggtgatatcggtgttggtggccgcgaaatcggctttttatacggccaatacaagcgactccggggcgctgaccgcggcgtactcaccggtaaaggattgaactatggcggttcgttagcccggactgaagctaccggttatggtctcgcctactataccaacgaaatgctcaaggccaaccaactttccttccctggtcaacgcgttgccatttctggtgctggtaatgtcgccatctacgcgattcaaaaggttgaagaactcggtggcaaggtgattacttgctccgactcaaacggttacgttattgacgaaaacggtatcgacttcaagatcgttaagcagatcaaggaagttgaacgcggtcgtatcaaagactatgccgaccgtgtagccagtgccagctattacgaaggttccgtctgggacgcccaagtagcttatgatatcgcgttaccttgcgccacccaaaacgaaatcagcggtgatcaagccaagaacttgattgccaatggtgccaaggtcgttgccgaaggggctaacatgcctagcagtccagaagccattgcgacataccaagctgccagcttgctatatggtccggccaaagctgccaatgctggtggcgttgccgtttccgcccttgaaatgagccaaaatagtatgcgtttgagctggacttttgaagaagtcgataatcgcctcaagcaaatcatgcaagatatctttgcacactccgttgccgctgccgacgaataccacgttagcggtgattacctgagtggtgctaacattgctggcttcacaaaagttgctgacgccatgttagcgcaaggcttagtttaa

SEQ ID NO: 56957 - protein, 448 aa, Lactobacillus plantarum WCFS1
MSQATDYVQHVYQVIEHRDPNQTEFLEAINDVFKTITPVLEQHPEYIEANILERLTEPERIIQFRVPWLDDAGHARVNRGFRVQFNSAIGPYKGGLRLHPSVNLSIVKFLGFEQIFKNALTGLPIGGGKGGSDFDPKGKSDNEIMRFCQSFMTELSKYIGLDTDVPAGDIGVGGREIGFLYGQYKRLRGADRGVLTGKGLNYGGSLARTEATGYGLAYYTNEMLKANQLSFPGQRVAISGAGNVAIYAIQKVEELGGKVITCSDSNGYVIDENGIDFKIVKQIKEVERGRIKDYADRVASASYYEGSVWDAQVAYDIALPCATQNEISGDQAKNLIANGAKVVAEGANMPSSPEAIATYQAASLLYGPAKAANAGGVAVSALEMSQNSMRLSWTFEEVDNRLKQIMQDIFAHSVAAADEYHVSGDYLSGANIAGFTKVADAMLAQGLV

SEQ ID NO: 56958 - DNA, 1350 bp, Bordetella parapertussis 12822
  CDS (1)..(1350): transl_table=11
ttggggccgcagctggtttcgtggaaaaataagcgcaacctcagcccggagatcctccctatgtctcaagctcccgcccattccttgccctcatacctggatgccgagcatctgggcccctgggggatctacctgcagcaagtcgaccgcgtcacgccgtacctgggtccgctggcccgctgggtcgagacgctcaagcgtcccaagcgcgcgctgatcgtggacgtgccgatcgagatggacaacggcagcatcgcccacttcgagggctaccgcgtccagcacaatacgtcgcgcggcccgggcaagggcggcgtgcgtttccaccaggacgtgaccttgtcggaagtgatggcgctggcggcctggatgtcgatcaagaatgccgccgtcaacctgccgtacggcggcgccaagggcggcgtgcgggtcgacccgcgcacgctgtcgcactccgagctcgagcgcatgacgcgccgctacacctcggagatcggcgtcatcatcgggccgtccaaggacatcccggccccggacgtgaacaccaacgcccagaccatggcctggatgatggacacgtactccatgaacgaaggcgccaccgccaccggcgtggtgaccggcaagccgatcgcgctgggcggcagcctgggccgggtcgaggccaccggccgcggcgtcttcgtggtcggctgcgaggcggcgcgcgacctgaacctcgacgtatccaaggcccgcatcgtggtgcagggtttcggcaacgtcggcggcaccgcggcgcgcctgttccatgaggccggcgccaaggtgatcgcggtgcaggaccacaccggcaccatccacaacgacggcgggctggacgtgcacaagctgctggcgcacgtcggcaaccagggcggcgtggccggcttcaccggcgcgcagcaactggccgacgacgatttctggggattggagaccgatttcctgatccccgccgctcttgagggacagatcaacgaaaacaacgccgccagggtgcgcgccaaggtcgtggtcgagggcgccaacggcccgaccaccccggaagccgacgatatcctgcgcgagaacggcgtctacgtggtgcccgacgtgctggccaacgccggcggcgtgacggtcagctacttcgagtgggtgcaggacttctccagcttcttctggagcgaggaggagatcaaccagcggctcgagcgcctgatgcgcgaggcctacagcgccgtgtcgcaagtggccaaggagcacaaggtcaccctgcgtaccgcggccttcatcgtggcgtgcacccgcatcctgcaggcgcgccaggtgcgcggcctgtatccctga

SEQ ID NO: 56959 - protein, 449 aa, Bordetella parapertussis 12822
MGPQLVSWKNKRNLSPEILPMSQAPAHSLPSYLDAEHLGPWGIYLQQVDRVTPYLGPLARWVETLKRPKRALIVDVPIEMDNGSIAHFEGYRVQHNTSRGPGKGGVRFHQDVTLSEVMALAAWMSIKNAAVNLPYGGAKGGVRVDPRTLSHSELERMTRRYTSEIGVIIGPSKDIPAPDVNTNAQTMAWMMDTYSMNEGATATGVVTGKPIALGGSLGRVEATGRGVFVVGCEAARDLNLDVSKARIVVQGFGNVGGTAARLFHEAGAKVIAVQDHTGTIHNDGGLDVHKLLAHVGNQGGVAGFTGAQQLADDDFWGLETDFLIPAALEGQINENNAARVRAKVVVEGANGPTTPEADDILRENGVYVVPDVLANAGGVTVSYFEWVQDFSSFFWSEEEINQRLERLMREAYSAVSQVAKEHKVTLRTAAFIVACTRILQARQVRGLYP

SEQ ID NO: 56960 - DNA, 1377 bp, Gloeobacter violaceus PCC 7421
  CDS (1)..(1377): transl_table=11
atgttacgttctctgacgctcgcttggggcggggatcaatgtttttgtaacattgaatacagctgtttgaatccattcgtcaaggggagaagcatggttaccagcctcaacgactcgcccagtccggcttatatttgtccgaacgacatggcctgctcgaatctcgaccgcgccgcccagattttgcgcctcgatccgggagtggtcgaggtgttgggtacgccgcaccgggtgctcaccgtgtcggtaccggtgcgcatggacaacggccggatccgggtcttcgcaggccaccgggtgcagcactgcaacgtgctgggtccctacaaaggcggcatgcgctatcacccggacgtgacgcttcgggaagtgtcgaccctggcgatgctgatgacctggaagtgcgcactgatgggtattccctacggcggggccaaaggcggcattgccgtcaacccgacgaccctttcggtgggcgaactggagcggctcacccgccgctttaccagcgaactggtgcgcgacatcggcccgcaaattgacatcccggctccggatgtgggcaccggaccgcgggagatggcctggatgatggacacctactcaatgagtatcgggcacgcctcgccgggggtggtgaccggcaagcccctcagcatcggcggctccaagggccgcgacgcggccaccggcaggggcgtggtcatcgccacgcgcgaggcgctcgacaccgccgggctggcgctgcgcggcgccaccattgccattcaaggattcggcaaagtgggcaaggcggcggcgcttatcttccagcagcatggagcgcgggtgatcgcgctctccgacggctccgggggcatctacaaccccgacggtctcgacatcgagcaggccgccgattttgtgcgcgacggcagccgactggcccagtatccgtttccaggggtcaagccgatcgccaaccccgaactgttgacgctgccgtgcgacgtgctggtccccgccgcccttgaacaccagatcaccgaggcaaacgccgcccgggtgcgcgcccgtctcgtggtcgaagccgccaacgcccccacgacgatggaggccgaccgcatcctggaggagcgcggcgtgacggtactgccggatatcctcgccaacgccgggggcgtggtggtgagctatctcgaatgggtgcaggggttgtcgtatcttttttgggacgaggagaaggtcaacctcgaactggagaagttgatggtgggcgcctacgcgcgcgtgctgcaacaggccacccagttccgattgcccctcaggcccgccgcctacaccctcgccgtcgggcgggtggtggaggcgttcaaccaccgcggcctctacccgtaa

SEQ ID NO: 56961 - protein, 458 aa, Gloeobacter violaceus PCC 7421
MLRSLTLAWGGDQCFCNIEYSCLNPFVKGRSMVTSLNDSPSPAYICPNDMACSNLDRAAQILRLDPGVVEVLGTPHRVLTVSVPVRMDNGRIRVFAGHRVQHCNVLGPYKGGMRYHPDVTLREVSTLAMLMTWKCALMGIPYGGAKGGIAVNPTTLSVGELERLTRRFTSELVRDIGPQIDIPAPDVGTGPREMAWMMDTYSMSIGHASPGVVTGKPLSIGGSKGRDAATGRGVVIATREALDTAGLALRGATIAIQGFGKVGKAAALIFQQHGARVIALSDGSGGIYNPDGLDIEQAADFVRDGSRLAQYPFPGVKPIANPELLTLPCDVLVPAALEHQITEANAARVRARLVVEAANAPTTMEADRILEERGVTVLPDILANAGGVVVSYLEWVQGLSYLFWDEEKVNLELEKLMVGAYARVLQQATQFRLPLRPAAYTLAVGRVVEAFNHRGLYP

SEQ ID NO: 56962 - DNA, 1275 bp, Bdellovibrio bacteriovorus HD100
  CDS (1)..(1275): transl_table=11
atggaacacaagatagagcctctctatgacgggcctcttttcagaaacgccattcaaactctcgatgaagctgctaaaattatcaactgcgatcccaacatccttgagcgtctaaaaagacctcgtcgttgcatcacagtttctgtccctgttcgtatggacgaccacagtgtgaaagtattcacgggctaccgtgttcaatactctccaacgttgggcccctacaaaggtggcatccgttatcaccagaacgtggacctttccgaagttgtcggccttgcggctttgatgaccttcaagaactctgttttgggtcttcctttgggcggcgcaaaaggcggtatcactgttgatccgaccaaactttcccgcactgaaaaacaaaatctgactcgtcgttatgcttctgaaatcggtcctttcgtgggcccgacaaaagatattccagctccggacgtgggcactgatccacagacgatggcttggttcatggacacttattctcaagaacaaggtggcttcgctcaaccgggcgtggtgactggcaagccggtggaaatcggtggttctttgggtcgtaaccatgcgaccggtttgggtgttgtttatgttgcagaaaaagctttcgaagtttgcaacatgagcatgaagggcgcttccatcgcgatccagggcttcggtaacgtgggttctttcgcggcgaaatttgcgcatgagcgcggtgcccgcatcgtggctgtcagtgacgtttccggtggtatcttcaacggcgacggtctggacatcaacgaagtgaacgaatacatcaaggctcacaagttcctgaagggttatccaaaagctcagccgatcagcaatgaagagctgcttgaagtgaagtgtgatgctttgttcccgtgcgctctggaaaatcagatcgacacgcacaatgcagaaaaaatccaggcaaagatcatcgtggaaggcgccaacggtcctatcaccaatgcggcgacaaaaatccttcataaacgcggtgtctttattgctccggacgttatcgccaacggcggtggtgtgatcgtttcctacttcgagtgggttcaagacaccatgtcttacttctgggacgaagacgaagtgaatggccgcctgaaaggcatcatcaccaaagccttcgacaagggttattctttggccaaagaaaagaacattgatatgagatctgctgcaatggcggtttctgttcaacgtcttgagcgcgcgatgctgctcagaggcttgtaccctcgctaa

SEQ ID NO: 56963 - protein, 424 aa, Bdellovibrio bacteriovorus HD100
MEHKIEPLYDGPLFRNAIQTLDEAAKIINCDPNILERLKRPRRCITVSVPVRMDDHSVKVFTGYRVQYSPTLGPYKGGIRYHQNVDLSEVVGLAALMTFKNSVLGLPLGGAKGGITVDPTKLSRTEKQNLTRRYASEIGPFVGPTKDIPAPDVGTDPQTMAWFMDTYSQEQGGFAQPGVVTGKPVEIGGSLGRNHATGLGVVYVAEKAFEVCNMSMKGASIAIQGFGNVGSFAAKFAHERGARIVAVSDVSGGIFNGDGLDINEVNEYIKAHKFLKGYPKAQPISNEELLEVKCDALFPCALENQIDTHNAEKIQAKIIVEGANGPITNAATKILHKRGVFIAPDVIANGGGVIVSYFEWVQDTMSYFWDEDEVNGRLKGIITKAFDKGYSLAKEKNIDMRSAAMAVSVQRLERAMLLRGLYPR

SEQ ID NO: 56964 - DNA, 1242 bp, Treponema denticola ATCC 35405
  CDS (1)..(1242): transl_table=11
atggcgagtacatacgaaaaacttttaaccacaataacggaagccgcaaagacggctaacctggaagaggacgattacatatccctcttaagccctgaaagagagatgcatgtttcaatacccgtaaaaatggacaacggaaaaatcaaggtttttagcggatacagggttcagcattctacactaagaggtcctgcaaagggaggaataagatttcaccaagatgtaaatatcgatgaggtacgatccctttctgcatggatgacctttaaatgtgccgttgccgacattccctatggaggcggaaaaggaggcatttgcgtaaatccttcaaatctttcagaaacggaacttgaaaagctgacaagaggctacacaaggcggattacatcttttatcggccctaaaacggatatacctgccccggatgtaggaacaaatgcaaagattatgtcttggatagtggacagctacagcagctatgcaggagaatttactcccgcagttgttacgggaaaacctcttcctctcggcgggtctaaaggacgagtagaagccacaggccggggagttctttttgcaacgagggaaattttaaagaaactcaataaaaccttaaaagaccaaagtgtagttattcaagggcttggaaatgtcggcggcgttactgcagatcttttttataaagaagaagccaggataattgcaataagcgatacaagcagtgcaatatacaatgaaaaaggcttagatattcctcaaatactcaaacataaaaagggaggaaaaaaactcaagtcttttgaaggcgattttaaaagaataaccaatgaagaactattggagcttaaagccgatattttgattccggctgccctcgaaaatcaaattaccgaaaaaaatgcatcaaatattaaggcatccataataatcgaagcagcaaacggccccatcacccctgaagccgataagatcctcgaaaaaaagaatattataacggtgcccgatgtccttgctaactcgggaggtgtaatcgtttcatactttgaatgggtgcaaaacctgcaaggcttttattggacggaagaagaagtcaacaagcgccttgaagataagatgattgaagccttcaaactggtatgggacgtaaaagaggcctataaagtcagcatgagaaaggcagcctatattaaggccttaaaagaacttgtagaaactcaaaaagttaagggaattaactaa

SEQ ID NO: 56965 - protein, 413 aa, Treponema denticola ATCC 35405
MASTYEKLLTTITEAAKTANLEEDDYISLLSPEREMHVSIPVKMDNGKIKVFSGYRVQHSTLRGPAKGGIRFHQDVNIDEVRSLSAWMTFKCAVADIPYGGGKGGICVNPSNLSETELEKLTRGYTRRITSFIGPKTDIPAPDVGTNAKIMSWIVDSYSSYAGEFTPAVVTGKPLPLGGSKGRVEATGRGVLFATREILKKLNKTLKDQSVVIQGLGNVGGVTADLFYKEEARIIAISDTSSAIYNEKGLDIPQILKHKKGGKKLKSFEGDFKRITNEELLELKADILIPAALENQITEKNASNIKASIIIEAANGPITPEADKILEKKNIITVPDVLANSGGVIVSYFEWVQNLQGFYWTEEEVNKRLEDKMIEAFKLVWDVKEAYKVSMRKAAYIKALKELVETQKVKGIN

SEQ ID NO: 56966 - DNA, 1650 bp, Drosophila melanogaster
  CDS (1)..(1650)
atgtatcacctgaagagtctggcccgccagggcgcccgccgccagcaggagctggccacgctggccaaggcactgcccaccgctgtgatgcagtcgagccgcggctatgccaccgagcaccagattcccgaccgcctcaaggatgtgcccaccgccaaggatccgcgcttcttcgacatggtcgagtatttcttccatcgcggctgccaaatcgccgaggaatcgctggtggacgacatgaagggcaagctgacccgcgacgagaagaagcagaaggtgaagggcatcctcatgctgatgcagccctgcgaccacatcatcgagatcgccttccccctgcgccgcgatgccggcaactacgagatgatcaccggctaccgcgcccagcacagcacccacaagacgcccaccaagggaggcatccgtttctcgttggatgtgtcacgcgatgaggtcaaagccctgtccgccctgatgaccttcaagtgcgcctgcgtggatgtgccattcggcggagccaaggccggtctgaagatcaaccctaaggagtactccgagcacgagctggagaagatcacccgtcgcttcacccttgagttggccaagaagggcttcattggacccggtgtcgatgtgcccgcccccgacatgggaaccggtgagcgcgagatgtcctggattgccgatacttatgccaagaccatcggtcacctggacatcaatgctcatgcctgtgtcaccggcaagcccatcaaccagggcggtatccacggacgcgtctcggccaccggtcgcggtgtcttccacggcctggagaacttcatcaacgaggccaactacatgagccagatcggcaccactcccggctggggcggcaagaccttcatcgtccagggcttcggtaacgtgggcctgcacaccactcgctatctgacccgcgccggagccacctgcatcggtgtcattgagcacgacggcactctgtacaacccggagggcattgaccctaagctgctggaggactacaagaacgagcacggcaccattgtgggctaccagaacgccaagccctacgagggcgagaacctcatgttcgagaagtgcgacatcttcattcccgctgccgtcgagaaggtcatcaccagcgagaatgccaaccgcattcaagctaagatcattgccgaggctgccaacggccccaccacccccgctgccgacaagatcctcatcgatcgcaacatcctggtcattcccgatctgtacatcaacgccggtggtgtcaccgtctccttcttcgagtggctgaagaacctgaaccacgtctcgtacggtcgcctgaccttcaagtatgagcgcgagtccaactaccatctgcttgaatccgttcaagagtccctggagcgtcgcttcggccgtgtgggcggtcgcatccccgtgaccccctccgagtcgttccagaagcgcatctccggcgcctccgagaaggatatcgtgcactccggcctggactacaccatggagcgctccgcccgcgccatcatgaagacagccatgaagtacaacctgggcctggacctcagaaccgctgcctacgtcaactccattgagaagatcttcaccacataccgcgatgccggcctggccttctaa

SEQ ID NO: 56967 - protein, 549 aa, Drosophila melanogaster
MYHLKSLARQGARRQQELATLAKALPTAVMQSSRGYATEHQIPDRLKDVPTAKDPRFFDMVEYFFHRGCQIAEESLVDDMKGKLTRDEKKQKVKGILMLMQPCDHIIEIAFPLRRDAGNYEMITGYRAQHSTHKTPTKGGIRFSLDVSRDEVKALSALMTFKCACVDVPFGGAKAGLKINPKEYSEHELEKITRRFTLELAKKGFIGPGVDVPAPDMGTGEREMSWIADTYAKTIGHLDINAHACVTGKPINQGGIHGRVSATGRGVFHGLENFINEANYMSQIGTTPGWGGKTFIVQGFGNVGLHTTRYLTRAGATCIGVIEHDGTLYNPEGIDPKLLEDYKNEHGTIVGYQNAKPYEGENLMFEKCDIFIPAAVEKVITSENANRIQAKIIAEAANGPTTPAADKILIDRNILVIPDLYINAGGVTVSFFEWLKNLNHVSYGRLTFKYERESNYHLLESVQESLERRFGRVGGRIPVTPSESFQKRISGASEKDIVHSGLDYTMERSARAIMKTAMKYNLGLDLRTAAYVNSIEKIFTTYRDAGLAF

SEQ ID NO: 56968 - DNA, 1677 bp, Strongylocentrotus purpuratus
  CDS (1)..(1677)
atgttgaggaattttgctgcaggtctctacagggaatgctcgagaggagttggagcacagtcgtttttgagagttcgtccacaagtatccgcatcgcaaaatggggcagcatgcagtaccggtgccggggaggaagcacaggatgacccaaactttttcaagatggtggagctgttttacgaccgtggagcagccctggtcgaggacaggctcgttgagacactcaagggaccagaaacaagcaatgaaaaaagactcaaggttcaaggaattttgagactactgaagccatgcaaccatgtactaagcatcaactttccacttctaagggacgatggttcatttgaaatgattcaagcatacagggcccagcacagtcaacatagaacaccatgcaaaggaggtatccgatacagcatggacgtgagcgaagacgaagttaaggccctggcctctctgatgacatacaagtgtgccgtggtggacgtccccttcggtggcgccaagggcggcatcaagatcgacccaaggaaatactccgagagggagctggagaagatcaccaggaggttctgcatggagctagccaaaaagggctttattggacccggtatcgatgtacctgctccagacatgggcaccggagagagggagatgagctggatggctgacacctatgccatgactatcggctatcaagacatcaatgctcatgcttgcgttacaggcaaacctattacacagggtggtatacatggtcgtatctcagccaccgggcgtggtgtgtaccatggtgtagagaactttgtcaacgaggcttcctacatgagtgctgttagtctgactccgggcctcggtgacaagtcattcattgtacagggattcggtaacgtgggtcttcattccacaagataccttcacagatacggagctaagtgcgtaggtgtgatggagatagacggtagcatctacaacccagccggcatccatcctaaggaactggaagattacaagacggagcatggcaccattgtaggctttcctggagcagagccctatgaaggaaacctgctgacagcgcagtgcgacatcctggtaccctgcgcaggagaaaaacagatcacagctgacaatgcccatgacatcaaggccaagatcattgcagagggagccaacggacctaccacccctgctgctgatgccatcctgctgtctaagaatgtgcttgttataccagacatgttcattaatgccggtggtgtgactgtgtcgtacttcgagtggctcaagaacctcaaccatgtcagctacggtcgtctcaccttcaaatatgagagagattccaacacacatcttcttcagagtgtacaggagagtttggagaggaagtttggtcgccatgagagtgtacaggagagtttggagaggaagtttggtcgccatggtagcggcatccccatcacaccatcagaccaattcaaggatcgcatccagggtgccagtgagaaggacatcgtccacagtggtctttcatacaccatggagaggtctgcaaggcaaatcatgaagacagccatgaaatacaaccttggtctggacatcaggacggctgcctatgtcaactccattgagaagattttcctcacgtaccatgatgctggacttaccttcaattaa

SEQ ID NO: 56969 - protein, 558 aa, Strongylocentrotus purpuratus
MLRNFAAGLYRECSRGVGAQSFLRVRPQVSASQNGAACSTGAGEEAQDDPNFFKMVELFYDRGAALVEDRLVETLKGPETSNEKRLKVQGILRLLKPCNHVLSINFPLLRDDGSFEMIQAYRAQHSQHRTPCKGGIRYSMDVSEDEVKALASLMTYKCAVVDVPFGGAKGGIKIDPRKYSERELEKITRRFCMELAKKGFIGPGIDVPAPDMGTGEREMSWMADTYAMTIGYQDINAHACVTGKPITQGGIHGRISATGRGVYHGVENFVNEASYMSAVSLTPGLGDKSFIVQGFGNVGLHSTRYLHRYGAKCVGVMEIDGSIYNPAGIHPKELEDYKTEHGTIVGFPGAEPYEGNLLTAQCDILVPCAGEKQITADNAHDIKAKIIAEGANGPTTPAADAILLSKNVLVIPDMFINAGGVTVSYFEWLKNLNHVSYGRLTFKYERDSNTHLLQSVQESLERKFGRHESVQESLERKFGRHGSGIPITPSDQFKDRIQGASEKDIVHSGLSYTMERSARQIMKTAMKYNLGLDIRTAAYVNSIEKIFLTYHDAGLTFN

SEQ ID NO: 56970 - DNA, 1647 bp, Nasonia vitripennis
  CDS (1)..(1647)
atgttccatgtacgaggcctgacccgtacctcagctgctctgaagcagacccaggagttggctcaaaccgcagccctggtgcgccttcagaacagaggctacgctgaccaccaaattccggagaagctgaaggatgttcctacggcagccaaccccaagttcttcgacatggtcgagtacttcttccaccgagcctgccagatcgtcgaggacaagctcgtcgaggacgtgggcaaacgctcgaggctcagcatcgaggagagaaagaagaaggtcaagggtatcctcatgttgatggagccctgcgaccacatcctcgagacgaccttcccgctgaggcgcgactccggcgactacgagatgatcaccggcttcagggcgcaacactccactcatcggacgccgtgcaaaggaggtatccgtttttcgatggatgtgtgcagagacgaggtgaaggccctgtcagccctgatgacgttcaagtgcgcctgtgtggacgtgccgtttggtggagccaaggctggtatcaaaatcaaccccaaggagtactctgacaacgagctcgagaagatcactcgtcgattcaccctcgagttggccaagaagggcttcatcggaccgggtgttgacgtacccgcccccgacatgggtacaggcgagcgcgagatgtcctggatcgccgacacctacgccaagaccattggccatctcgacatcaacgcccacgcctgcgtcaccggcaaacctatcaatcagggtggtatccacggacgtatctccgccactggtcgtggtgtcttccatggactcgagaacttcatcaacgaggctaactacatgagcatgatcggaacgacgccaggctggggtggcaaaaccttcatcctgcagggattcggtaacgtgggtctgcacacgatgcgttacctgcaccgtgccggcgctacctgcatcggtatcatcgagcacgacggttcgatcatcaaccccgatggtatcgatcctaagcagctcgaggagtaccgcctcgacaacggcagcatcgttggtttcccccacgccaagccctacgaaggcgagaacctcatgtacgagccctgcgatatcttcatccctgccgccgtagagaaggtcatcaccaaggagaacgctggtcgcattcaggccaaaatcatcgccgaggctgccaacggccctacgacccccgcagccgacaagatcctcattgacaggaacattctcgtcattcccgatctgtacatcaacgctggtggtgtcaccgtgtccttcttcgagtggctcaaggatctcaaccacgtttcctacggtcgtcttaccttcaaatacgagagggaatccaactaccaccttcttgaatccgtgcaggagtcccttgagcgcaggttcggacgcgttggtggacgcattcccgtgacaccctccgagtccttccagaaacgtatctccggtgcttccgaaaaagacattgtacactctggattggactacactatggaacgatctgctagagctatcatgaagacggcaatgaagttcaaccttggactggacttgagaacggcggcgtatgtcaactcaatcgagaagatcttcacgacttattccgaagctggtcttgccttctaa

SEQ ID NO: 56971 - protein, 548 aa, Nasonia vitripennis
MFHVRGLTRTSAALKQTQELAQTAALVRLQNRGYADHQIPEKLKDVPTAANPKFFDMVEYFFHRACQIVEDKLVEDVGKRSRLSIEERKKKVKGILMLMEPCDHILETTFPLRRDSGDYEMITGFRAQHSTHRTPCKGGIRFSMDVCRDEVKALSALMTFKCACVDVPFGGAKAGIKINPKEYSDNELEKITRRFTLELAKKGFIGPGVDVPAPDMGTGEREMSWIADTYAKTIGHLDINAHACVTGKPINQGGIHGRISATGRGVFHGLENFINEANYMSMIGTTPGWGGKTFILQGFGNVGLHTMRYLHRAGATCIGIIEHDGSIINPDGIDPKQLEEYRLDNGSIVGFPHAKPYEGENLMYEPCDIFIPAAVEKVITKENAGRIQAKIIAEAANGPTTPAADKILIDRNILVIPDLYINAGGVTVSFFEWLKDLNHVSYGRLTFKYERESNYHLLESVQESLERRFGRVGGRIPVTPSESFQKRISGASEKDIVHSGLDYTMERSARAIMKTAMKFNLGLDLRTAAYVNSIEKIFTTYSEAGLAF

SEQ ID NO: 56972 - DNA, 1692 bp, Anopheles gambiae str. PEST
  CDS (1)..(1692)
atgtatcacctgaagacgatcgcgaagaatgccaccatcaagcaggaggtggccacgctggtcaaggcccagccgatggcgatgaaccagcagcagccgaagcgcacctacgccgagcaccagatcccggagcggctgaaggatgtgtcgaccgcggccaacccgcgcttcttcgacatggtcgagtacttcttccaccgcgcctgccagatctgcgaggacaagctggtggaggacatgaagggccgcgcctcgatggacgagaagaagaagaaggtgaagggcattctgatgctgatgcagccgtgcgatcacatcatcgagattgcctttccgctgcgacgcgattccggcgactacgagatgattaccggctaccgtgcccagcactgcacccaccgtaccccgaccaagggcggtattcgtttctcgctggacgtgtcgcgcgatgaagtgaaagccctgtccgcgctgatgacgttcaagtgcgcctgtgtggatgtaccgttcggtggcgccaaggccggtgtcaagatcgatccccgcaagtactccgagcatgagctggagaagattacccgccgtttcgcgctggagctgtccaagaagggcttcatcggcccgggcatcgatgtgccggccccggacatgggaacgggcgagcgcgagatgtcctggattgcggacacgtacgccaagacgatcggccatctggatattaatgcgcacgcgtgcgtcaccggcaagccgatcaaccagggcggcattcacggccgtgtgtccgccaccggacgtggtgtgttccacgggctggacaacttcatcaaggaggcgaactatatggcgcagatcggcacgacgcccggctggggcggcaagaccttcatcgtgcagggcttcggtaatgtcggtctgcactcgtgccgctacctgacccgtgccggtgccacctgcatcggtgtgattgagcacgacggttcgatcttcaacccgcagggtatcgacccgaaggctctggaagattacaagaacgagaagggcacgatcgttggcttcccaggcgcgcagccgtatgagggcgaaaacctgatgtacgagcagtgcgacatcttcatcccggctgccgtcgagaaggttatcaccgccgagaacgctggcaaaattaatgccaagatcattgccgaagctgccaacggtcccactaccccggccgcggacaagatcctgatcgaccgcaacattctcgtcattccagatctgtacatcaacgctggtggtgtgacggtatcgttcttcgaatggctcaagaacctgaaccacgtctcgtacggccgtctgacgttcaagtacgagcgagagtcgaactaccatctgctcgcttccattcagcaatcgttggagcgattcgtatttagcgacgaagagagtaaagcctcgctggagcgtcgcttcggtaatgtcggtggcaagattccggtcacgccctcggaagcattccagaagcgcatctccggtgcctcggagaaggacatcgtgcactccggactggactacacgatggagcgttcggcacgcgccatcatgaagacggccatgaagtacaatctcggactggaccttcgctcggccgcttacgtcaactcgatcgaaaagatcttccagacgtaccgtgacgccggtctcgctttctaa

SEQ ID NO: 56973 - protein, 563 aa, Anopheles gambiae str. PEST
MYHLKTIAKNATIKQEVATLVKAQPMAMNQQQPKRTYAEHQIPERLKDVSTAANPRFFDMVEYFFHRACQICEDKLVEDMKGRASMDEKKKKVKGILMLMQPCDHIIEIAFPLRRDSGDYEMITGYRAQHCTHRTPTKGGIRFSLDVSRDEVKALSALMTFKCACVDVPFGGAKAGVKIDPRKYSEHELEKITRRFALELSKKGFIGPGIDVPAPDMGTGEREMSWIADTYAKTIGHLDINAHACVTGKPINQGGIHGRVSATGRGVFHGLDNFIKEANYMAQIGTTPGWGGKTFIVQGFGNVGLHSCRYLTRAGATCIGVIEHDGSIFNPQGIDPKALEDYKNEKGTIVGFPGAQPYEGENLMYEQCDIFIPAAVEKVITAENAGKINAKIIAEAANGPTTPAADKILIDRNILVIPDLYINAGGVTVSFFEWLKNLNHVSYGRLTFKYERESNYHLLASIQQSLERFVFSDEESKASLERRFGNVGGKIPVTPSEAFQKRISGASEKDIVHSGLDYTMERSARAIMKTAMKYNLGLDLRSAAYVNSIEKIFQTYRDAGLAF

SEQ ID NO: 56974 - DNA, 1569 bp, Anopheles gambiae str. PEST
  CDS (1)..(1569)
atgcaacgttttgtggatactttcaagctcctccgccgcggagctcataccattccgaagcatctcgaatgcattccgaatgaacgagatccgccgttctcgaaaatggtagaatattgctttcacaaggcctgcattgtgcttgaaccacagctaatagaatcgatgagcaagtatccttcgatggccccagaaaagcgagccaatcgggtacaggcaatcttgaagatcatctcgaacaactcgagtacactagagtttcagtttccgttcgtgcgtgacgacggtcggtatgaaatggttacggcttttcgggcccatcactgccttcaccgtcttccagtgaaaggtggtattcgttactcgagcgatgtttgcaaggacgaggtcgaagcactttcggcactgatgaccttcaagtgtgcctgcgtaaacgtacctttcgggggtgccaaaggaggaatcataatcgaccctgccaagtatagtgagaaggaattgcaaagcatcacccggcgctacacagtagagctggcaaaaaagaacttcatcggaccggggatcgatgtgccggccccggatatgggcacgacttcgcgcgaaatgtcctggatagccgatcagtacgggaaaacgttcggacatcgcgacatcaacacgatggccgtcgttaccggcaagccactgaatcagggaggcattcgaggccgtacagaagccaccggtaaaggcgtatacatagcgactaattgcttcacgcgtgaggcaagctggatgcgggagatcggtctcgagcccggattggaaggaaagtcggtgatcgtacaagggtttggcaacgttggccaatacgctgcagaacacttccatcgagcgggatgcaaagttgtcggcatcatcgaaaaggatgtttcgcttcactgcaagtcgggaattgatatcaaagcactgagtcgatacaaaacacagcagaaaacaattaaaggatatcccaaggcaaacgaatttaatggagacctgctgctagaagagtgcgatattctcataccggccgccatggaaaaatcaatcacttcggagaatgccaaaaacataaaagccaagatcatcgccgagggagccaacggacccacgacaccggcggcagacaaaattctacaggaacgccgcattctcgtcatacctgacctgtactgcaatgctggcggcgttactgcgtcatactttgagtatctgaaaaacataaatcatatctcattcggtaagttatccttccgccatgaagcgcagaatttgcgggaggtgctcgcatcggtacaagaatcgttgcggagtgccggagtatgtgttactgtaacacccagcaagcacttgaagcattactttgagcatgccagcgaggccgatgtggtaacttccggactacaatttgtgctagaaacagctggaaaaggtattatgaacgttgcttcgcagcaccagctatgtttggacatccggaccgccgcttacatctggtcggtggagaaaattttcaaatcctatgaagaagcaggactttcgatgtaa

SEQ ID NO: 56975 - protein, 522 aa, Anopheles gambiae str. PEST
MQRFVDTFKLLRRGAHTIPKHLECIPNERDPPFSKMVEYCFHKACIVLEPQLIESMSKYPSMAPEKRANRVQAILKIISNNSSTLEFQFPFVRDDGRYEMVTAFRAHHCLHRLPVKGGIRYSSDVCKDEVEALSALMTFKCACVNVPFGGAKGGIIIDPAKYSEKELQSITRRYTVELAKKNFIGPGIDVPAPDMGTTSREMSWIADQYGKTFGHRDINTMAVVTGKPLNQGGIRGRTEATGKGVYIATNCFTREASWMREIGLEPGLEGKSVIVQGFGNVGQYAAEHFHRAGCKVVGIIEKDVSLHCKSGIDIKALSRYKTQQKTIKGYPKANEFNGDLLLEECDILIPAAMEKSITSENAKNIKAKIIAEGANGPTTPAADKILQERRILVIPDLYCNAGGVTASYFEYLKNINHISFGKLSFRHEAQNLREVLASVQESLRSAGVCVTVTPSKHLKHYFEHASEADVVTSGLQFVLETAGKGIMNVASQHQLCLDIRTAAYIWSVEKIFKSYEEAGLSM

SEQ ID NO: 56976 - DNA, 1356 bp, Gibberella zeae PH-1
  CDS (1)..(1356)
atgtcccaccttcctcacgagcccgagttcgagcaggcttacggcgagcttgcctctgccctcgagaacagctccctcttcaacgagcaccccgagtaccgcactgctctggctgttgccgccattcctgagcgtgtcatccagttccgcatcgtctgggaagatgacaagggcaacctccaggtcaaccgtggttaccgagtccaattcaactctgctctcggtccctacaagggcggtcttcgattccaccccagcgtcaacctgtccatcctcaagttccttggtttcgagcagatcttcaagaatgctctgactggcctcagcatgggtggtggcaagggtggtgccgacttcgaccccaagggcaagtctgatgctgagatccgaagattttgccagtctttcatgactgagctgtccaagcacattggtgccgagactgatgttcccgctggtgatattggtgttggtggccgtgagatcggctacctctttggtgcttaccgcaagcttcgcaaccgctgggagggtgtccttactggtaagggtctctcttggggtggcagcttgatccgacctgaggccaccggttacggtcttgtctactacgttgattacatgcttaagcacgccaaccgcggcagcttcgagggtaagcgcgttgctctgtctggttccggcaacgttgcccagtacgctgccctcaagatcatcgagcttggtggctccgttgtctccctatctgactccaagggtgctctcgtcgccaaggagggttcttctttcacccctgagcagatccacaacattgctgctctcaagatcaagcaccagtccctgactgctttcgagcaccaggacaagttcacctggattgagggcgcccgcccttgggtccacgttggcaaggttgacattgctcttcccagtgctacccagaacgaggtcagcaaggaggaggcccaggccctcctcgaggctggtgctttcatcgttgctgagggttccaacatgggctgcactgccgatgccattgatgtctttgaggcccaccgcaaggagaatggtgcccaggctctttggtacgcccccggaaaggcctccaactgtggtggtgttgccgtttctggtcttgagatggcccagaacagccagcgtatccagtggtccgagaaggaggtcgacgaccgcctcaaggccatcatgaaggacgccttcgtcgctggtcttgagaccgcccagaagtacgtcgaagccaaggagggcgagcttcctagcttggtcgctggtagcaacattgctggtttcatcaaggttgccgaggccatgcacaaccagggtgactggtactaa

SEQ ID NO: 56977 - protein, 451 aa, Gibberella zeae PH-1
MSHLPHEPEFEQAYGELASALENSSLFNEHPEYRTALAVAAIPERVIQFRIVWEDDKGNLQVNRGYRVQFNSALGPYKGGLRFHPSVNLSILKFLGFEQIFKNALTGLSMGGGKGGADFDPKGKSDAEIRRFCQSFMTELSKHIGAETDVPAGDIGVGGREIGYLFGAYRKLRNRWEGVLTGKGLSWGGSLIRPEATGYGLVYYVDYMLKHANRGSFEGKRVALSGSGNVAQYAALKIIELGGSVVSLSDSKGALVAKEGSSFTPEQIHNIAALKIKHQSLTAFEHQDKFTWIEGARPWVHVGKVDIALPSATQNEVSKEEAQALLEAGAFIVAEGSNMGCTADAIDVFEAHRKENGAQALWYAPGKASNCGGVAVSGLEMAQNSQRIQWSEKEVDDRLKAIMKDAFVAGLETAQKYVEAKEGELPSLVAGSNIAGFIKVAEAMHNQGDWY

SEQ ID NO: 56978 - DNA, 1662 bp, Apis mellifera
  CDS (1)..(1662)
atgtttcatgtaaagcaactaacaagatcgtcaattgctttaaagcaagtaccaagcaatgacattattcataatacattgatacgtatcgtaccagcatttcaagcacgcggttatgctgatcatcaaatacctgatcatttaaaggatattcctaatgatccgaatccaaaatttttcgatatggttgaatacttttttcaccgagcttgtcagattgtggaagataaattggtcgaagatattggcaaacgttccaggatgaccgttgaagagagaaaaaaaaaggtgaagggtattttaatgttaatggaacgatgtgaccatatcctcgaaacttcctttcctctgagacgcgattcaggcgattatgaaatgatcactggctatcgcgcgcagcattcaactcatagaacaccttgtaaaggaggtattcgtttttcgatggatgtctcgcgagacgaagtaaaggctttatcagcattaatgactttcaaatgtgcctgtgtagacgttccttttggtggagctaaagctggtattaagattaatcctaaattgtattcagaacatgagctcgaaaaaatcactagaaggttcacattagagcttgcaaaaaaaggatttatcggacctggtgtcgatgttcctgctcctgacatgggaactggagaacgcgaaatgtcttggatcgcggacacatatgccaaaactataggacatttggatattaacgctcatgcttgtgtaaccggtaaacctattaatcaaggtggaattcatggacgtatttctgcaacaggacgcggtgtgtttcacggactagaaaattttatcaatgaagctaattatatgagcatgattggtacaacacccggttggggagggaaaacattcattgtacaaggttttggtaatgttggtctgcattcgatgcgttatttacatcgtgctggggctgcttgtataggagtaatcgaacatgatggtgctatttacaatgccgaaggtattgaccctaagaaattggaagattatcgtatagaaaatggtactatcgtgggcttccctggtgctaaaccttatgaaggtgaaaatcttatgtatgaaccttgtgatatattcatacctgcagctattgaaaaagttattaataaagataatgcttcttttattcaggcaaaaattatagccgaagctgccaacggaccaactactccagctgccgataaaattttaatcgatcgaaatattttagtcataccagatttatacataaatgccggtggtgttacagtctcctttttcgaatggttaaaaaatttgaatcatgtgtcgtatggtcgtctaacttttaaatatgaaaaagaatcaaattatcacttattagaatctgtacaagaatcattggaacgtagatttggtcgtgtgggtggtagaattcctgttacaccttccgaagcatttcaaaaacgcatttctggtgcttctgaaaaggatatagttcattctggtttggattacacgatggaaagatctgcgagggcaattatgaaaacagctatgaaatttaatcttggtttggatttaaggacagcagcttatattaattcaatcgaaaaaatatttactacttactccgaagctggtcttgcgttttaa

SEQ ID NO: 56979 - protein, 553 aa, Apis mellifera
MFHVKQLTRSSIALKQVPSNDIIHNTLIRIVPAFQARGYADHQIPDHLKDIPNDPNPKFFDMVEYFFHRACQIVEDKLVEDIGKRSRMTVEERKKKVKGILMLMERCDHILETSFPLRRDSGDYEMITGYRAQHSTHRTPCKGGIRFSMDVSRDEVKALSALMTFKCACVDVPFGGAKAGIKINPKLYSEHELEKITRRFTLELAKKGFIGPGVDVPAPDMGTGEREMSWIADTYAKTIGHLDINAHACVTGKPINQGGIHGRISATGRGVFHGLENFINEANYMSMIGTTPGWGGKTFIVQGFGNVGLHSMRYLHRAGAACIGVIEHDGAIYNAEGIDPKKLEDYRIENGTIVGFPGAKPYEGENLMYEPCDIFIPAAIEKVINKDNASFIQAKIIAEAANGPTTPAADKILIDRNILVIPDLYINAGGVTVSFFEWLKNLNHVSYGRLTFKYEKESNYHLLESVQESLERRFGRVGGRIPVTPSEAFQKRISGASEKDIVHSGLDYTMERSARAIMKTAMKFNLGLDLRTAAYINSIEKIFTTYSEAGLAF

SEQ ID NO: 56980 - DNA, 1383 bp, Candida glabrata CBS 138
  CDS (1)..(1383)
atgtcttctcaagttaacgaaccagaatttcaacaagcttaccacgaagttgtttcctctttgaaggactcttctttgttcgaaaagcacccaaaatatgctaaggttcttccagttgtctctgtcccagagagaatcatccaattcagagttacttgggaaaatgacaaccacgagcaagaagttgctactggttacagagtccaattcaactccgctaagggtccatacaagggtggtctacgtttccatccatccgtcaacttgtctattctaaagtttttgggttttgaacaaatcttcaagaacgctttgactggtttggacatgggtggtgccaagggtggtctatgtgttgacctaaagggtagatccgacaacgaaatcagaagaatctgttacgctttcatgagagaactacacagacacattggtgctgacaccgatgttccagctggtgacatcggtgttggtggtcgtgaaatcggttacttgttcggtgcttacagacattacactaactcctgggaaggtgtccttactggtaagggtttgaactggggtggttctttgatcagaccagaagctactggttacggtctagtctactacacccagtctatgatcgactacgccaccaagggtaaagaatctttctctggtaagcgtgttgctatctctggtagtggtaacgttgctcaattcgctgctttgaaggttatcgaactaggtggtattgtcgtctctctatctgattctaagggttgtatcatctctgaaaccggtatcactactgaacagatcgcttctattgccgaagccaagatcaagttcaagtccttggaacaaattgtcggtgaatactctgcttttgctgaaaacaaggttgaatacgttgctggtgctcgtccatggaccttagttggtaaggttgacattgctctgccatgtgctacccaaaatgaagtttccggcgacgaagctaaggctttggttgctgctggtgtaaagtttgttgctgaaggttccaacatgggttgtactccagaagctattgatgtcttcgaaagctctcgtgctaccgcctctgctccaggtgaagctgtgtggtacgctatgggtaagaactctaacctgggtggtgtcttgacctctggtttggaaatggcccaaaactctcaaagaatgtcttggactagtgaggaagtcgaccaagaattgaagaagggtatggttaactgtttcaacgactgtattgaagccgctgaaaagtacagcaacgaatctaacaagaacgccttgccatctttggtcaagggtggtaacattgcaagtttcattaaggtcgctgatgccatgttcgaccaaggtgatgttttctaa

SEQ ID NO: 56981 - protein, 460 aa, Candida glabrata CBS 138
MSSQVNEPEFQQAYHEVVSSLKDSSLFEKHPKYAKVLPVVSVPERIIQFRVTWENDNHEQEVATGYRVQFNSAKGPYKGGLRFHPSVNLSILKFLGFEQIFKNALTGLDMGGAKGGLCVDLKGRSDNEIRRICYAFMRELHRHIGADTDVPAGDIGVGGREIGYLFGAYRHYTNSWEGVLTGKGLNWGGSLIRPEATGYGLVYYTQSMIDYATKGKESFSGKRVAISGSGNVAQFAALKVIELGGIVVSLSDSKGCIISETGITTEQIASIAEAKIKFKSLEQIVGEYSAFAENKVEYVAGARPWTLVGKVDIALPCATQNEVSGDEAKALVAAGVKFVAEGSNMGCTPEAIDVFESSRATASAPGEAVWYAMGKNSNLGGVLTSGLEMAQNSQRMSWTSEEVDQELKKGMVNCFNDCIEAAEKYSNESNKNALPSLVKGGNIASFIKVADAMFDQGDVF

SEQ ID NO: 56982 - DNA, 1386 bp, Kluyveromyces lactis NRRL Y-1140
  CDS (1)..(1386)
atgtctgctgaaccatatgaaccagaattccaacaagcctacaacgaagtttacaactgtttgaaagactctactttgttcgacaagaaacctgtctacaagaaggttttgccagttgtctctgttccagaaagaatcatccaattcagagttacctgggaaaatgacaaaggtgaacaagaagtcgctactggtttcagagttcaatttaactctgctaagggcccatacaagggtggtttgagattccatccaaccgttaacttgtccgttttgaagttcttgggtttcgaacaaatcttcaagaacgctttgactggtttatctcttggtggtgccaagggtggtctatgtttcgatccaaagggtagatctgattccgaaattagaagagtatgttacgctttcatgaaggaattgtccagacacattggtcaagacgttgatgtcccagctggtgacattcaagttggtggtcgtgaaatcggttatttgttcggtgcataccgtcactacaagaactcttgggaaggtgttttgaccggtaaggacttgaactggggtggttctttgatcagaccagaagctactggttacggtctgatttactacactgaagctatgatcaagtatgcttcccaaggtaaggaatctttcgaaggtaagcgtgttgtcatctccggttccggtaacgttgcccaatatgctgctttgaaatgtattgaattgggtgctaccgttttgtctttgtccgattctaagggttctgtcatctccgaaactggtatcactgcagagcacatctacgctatccaagatggtagagcagcctggaagactttggaacaaatcgttggtgaagcttctgtcttctctggaagttctgtgaaatacatcgctggtgctagaccatgggttcacgtaggtaaggttgatgttgctttgccatgtgccactcaaaacgaagtttctggtgctgaagctgaacacttggttgccaatggtgtcaagttcgttgctgaaggttctaatatgggttccactcaagaagccatcgatgtcttcgaaggtgttcgtttgcaaactgcctccgctagtgctcctgccgtctggtacgctccaggtaaggcttctaacatgggtggtgttgctgtttctggtttggaaatggctcaaaactccgctagagtttcatggaccagagaaacagttgacgctgaattgaagaagatcatgactacttgtttcgatgactgtgttactactgcaaaggaatattctaacgaatctaacgttgaagctttgccatctttggttaagggtgctaacttgactggtttcatcagagttgctgatgctatgttgcaccaaggtgatgttttctaa

SEQ ID NO: 56983 - protein, 461 aa, Kluyveromyces lactis NRRL Y-1140
MSAEPYEPEFQQAYNEVYNCLKDSTLFDKKPVYKKVLPVVSVPERIIQFRVTWENDKGEQEVATGFRVQFNSAKGPYKGGLRFHPTVNLSVLKFLGFEQIFKNALTGLSLGGAKGGLCFDPKGRSDSEIRRVCYAFMKELSRHIGQDVDVPAGDIQVGGREIGYLFGAYRHYKNSWEGVLTGKDLNWGGSLIRPEATGYGLIYYTEAMIKYASQGKESFEGKRVVISGSGNVAQYAALKCIELGATVLSLSDSKGSVISETGITAEHIYAIQDGRAAWKTLEQIVGEASVFSGSSVKYIAGARPWVHVGKVDVALPCATQNEVSGAEAEHLVANGVKFVAEGSNMGSTQEAIDVFEGVRLQTASASAPAVWYAPGKASNMGGVAVSGLEMAQNSARVSWTRETVDAELKKIMTTCFDDCVTTAKEYSNESNVEALPSLVKGANLTGFIRVADAMLHQGDVF

SEQ ID NO: 56984 - DNA, 1368 bp, Debaryomyces hansenii CBS767
  CDS (1)..(1368)
atggtcttacctcacgaaccagaatttcaacaagcttacaatgaattagtttctgctttagaagactctactttatttaccgaaaaaccagaatacaagaaggttattccagttgtctcggtcccagaaagaattatccaattcagagttgcatgggaaaacgacaacggtgatgttgaggtcaacaacggttacagagtgcaattcaactcggccttaggtccattcaagggtggtttaagattccatccatctgtcaacttgtctattttgaagtttttgggtttcgaacaaatcttcaagaacgctttgaccggtttatccatgggtggtggtaaaggtggttgtgacttcaacccaaagggtagaaccgactctgaaatcagaagattctgtgttgctttcatgagacaattagccagatacattggcagtgacaccgatgttccagctggtgatattggtgttggtagccgtgaagttggttacatgttcggtgcttacaagcaaatgcaaaacaactggtctggtattttgaccggtaagggtttaagctggggtggttctttaatccgtcctgaagctaccggttacggtgttgtctacttcgttgaaaagatgattgaaaaggccactggaggtaaggaatccttcaagggtaagagagttgccatctctggttcaggtaacgttgctcaatacgccgccttaaaggttattgagttaggttctaccgttgtttccttatccgactctaagggttgtatcatctcccaaactggtattactccagatcaaatcaaggccatcgctgcagctaagatacacttcaagactttggaagaaattaccaaggagtccgcatcgctcttctccggctctaacgaagttcaatacattgctggtgttcgtccatggacccactgtggccaagttgacgttgctttaccatctgctactcaaaatgaagtttctggtgaagaagcaaaggctttagttgaagctggctgtaagttcatcgctgaaggttccaatatgggttctaccaaggaagctatcgatgtttttgaagccaacagatctaaggctgtatggtacgctccaggtaaggctgccaactgtggtggtgttgctgtctctggtttagaaatggcacaaaactctcaaagagttacttgggctgctgaagaagtcgacgaaaagttgaagaacattatgtacacttgtttcgataactgttacgctaatgctgctaaatactctgctgaaaaggatgcagaaaatttaccatctttattaaagggtgctaacatcactggtttcatcaaggtcgccgatgctatgtttgaccaaggtgaagtcttttaa

SEQ ID NO: 56985 - protein, 455 aa, Debaryomyces hansenii CBS767
MVLPHEPEFQQAYNELVSALEDSTLFTEKPEYKKVIPVVSVPERIIQFRVAWENDNGDVEVNNGYRVQFNSALGPFKGGLRFHPSVNLSILKFLGFEQIFKNALTGLSMGGGKGGCDFNPKGRTDSEIRRFCVAFMRQLARYIGSDTDVPAGDIGVGSREVGYMFGAYKQMQNNWSGILTGKGLSWGGSLIRPEATGYGVVYFVEKMIEKATGGKESFKGKRVAISGSGNVAQYAALKVIELGSTVVSLSDSKGCIISQTGITPDQIKAIAAAKIHFKTLEEITKESASLFSGSNEVQYIAGVRPWTHCGQVDVALPSATQNEVSGEEAKALVEAGCKFIAEGSNMGSTKEAIDVFEANRSKAVWYAPGKAANCGGVAVSGLEMAQNSQRVTWAAEEVDEKLKNIMYTCFDNCYANAAKYSAEKDAENLPSLLKGANITGFIKVADAMFDQGEVF

SEQ ID NO: 56986 - DNA, 1377 bp, Yarrowia lipolytica CLIB122
  CDS (1)..(1377)
atgaactaccccgctgaacccgaattccaacaggcttacgacgagctctacaactccatccacgactcgactctgttcgacaagcaccccgagttcgagaaggtcatccctgtggtgtctgttcctgagcgaatcatccagttccgagttgtgtgggaggacgaccagggcaagctgcaggtcaaccgtggctaccgagtccagttcaactccgctctgggcccttacaagggaggtctccgattccacccttccgtcaacctgtccattctcaagttcctcggatacgagcagatcttcaagaacgccctgaccggcctcaacattggaggtggtaagggaggtgctgactttgaccccaagggcaagtccgacgccgagattcgacgattctgctacgccttcatgggcgagctccacagacacattggtgctgacactgatgtccctgccggtgatatcggtgttggtggtcgagaggtcggtttcctcttcggcgcctacaagaagtacaagaacacctgggagggtgttctgaccggtaagggtctaacctggggtggatctctgatccgacctgaggctaccggtttcggtctcgtctactacgttgagaagatgattgagtacgccacctccggcaaggagtccttcaagggcaagcgagtcgccatctctggttccggtaacgttgcccagtacgccgctctcaaggtcattgagctcggcggaaacgttgtctccatgtccgactctaagggcgctctggtgctggtctccgacttcaccgagggcttcacccccgccgagattgagcagattgccgacatcaagctccagcacaaggagctggcctctctctacccctccgccactcttcccgagaccaagttcaagtacattgaggacgctcgaccctggtgccacgttggcaaggtcgacgttgctcttccttgtgccacccagaacgaggtttccggtgaggaggccaagtctctggttgctgctggctgcaagttcatcgccgagggctccaacatgggctgtgagtccgacgccattgaggtcttcgaggccgagcgaatggcccgacctaacggtatctggtacggtcccggtaaggctgccaacgctggtggtgttgccgtttccggtctggagatggcccagaactctcagcgaatctcctggaccaaggaggaggttgaccagaagctcaaggatatcatggtcgactgcttcaacacctgcgttgagactgcttctacttactcctccgagaaggtcgatggcctcccctctctcgtcaagggtgccaacattgctggtttcctcaaggtctctgctgccatgaaggaccacggtgatttctggtaa

SEQ ID NO: 56987 - protein, 458 aa, Yarrowia lipolytica CLIB122
MNYPAEPEFQQAYDELYNSIHDSTLFDKHPEFEKVIPVVSVPERIIQFRVVWEDDQGKLQVNRGYRVQFNSALGPYKGGLRFHPSVNLSILKFLGYEQIFKNALTGLNIGGGKGGADFDPKGKSDAEIRRFCYAFMGELHRHIGADTDVPAGDIGVGGREVGFLFGAYKKYKNTWEGVLTGKGLTWGGSLIRPEATGFGLVYYVEKMIEYATSGKESFKGKRVAISGSGNVAQYAALKVIELGGNVVSMSDSKGALVLVSDFTEGFTPAEIEQIADIKLQHKELASLYPSATLPETKFKYIEDARPWCHVGKVDVALPCATQNEVSGEEAKSLVAAGCKFIAEGSNMGCESDAIEVFEAERMARPNGIWYGPGKAANAGGVAVSGLEMAQNSQRISWTKEEVDQKLKDIMVDCFNTCVETASTYSSEKVDGLPSLVKGANIAGFLKVSAAMKDHGDFW

SEQ ID NO: 56988 - DNA, 1380 bp, Aspergillus nidulans FGSC A4
  CDS (1)..(1380)
atgtctaaccttcccgttgagcccgagttcgagcaggcctacaaggagcttgcgtcgaccctcgagaactccaccctctttgagcagcaccctgaataccgacgggctctccaggtcgtctccgttcccgagcgcgttatccagttccgtgtcgtttgggagaacgacaagggcgaggttcagatcaaccgcggttaccgtgttcagttcaactccgctctcggtccctacaagggtggtctccgtttccacccctccgtcaacctttctatcctgaagttccttggcttcgagcagatcttcaaaaatgctctcacaggactaaacatgggtggtggcaagggtggttccgacttcgaccccaagggcaagtctgactctgaaattcgtcgcttctgtaccgctttcatgactgagctctgcaagcacatcggcgcggacactgacgttcccgctggtgatatcggtgttactggccgtgaggttggtttccttttcggccagtaccgcaggatccgcaaccagtgggagggtgttctcactggcaagggtggcagctggggtggtagcttgatccgccctgaagccactggatacggtgttgtctactacgttgagcacatgatcaagcacgttaccggtggaaaggagtccttcgcaggcaagcgtgtcgccatctccggctccggtaacgttgcccagtacgccgctctcaaggtcatcgagctcggtggttccgttgtctccctttccgactccaagggctctctcattgtcaaggatgagtccgcttctttcacccctgaagagatcgccctcattgccgacctcaaggttgcccgcaagcaactctccgagctcgccacctcctccgctttcgccggcaagttcacctacatccccgatgctcgcccttggaccaacattcccggcaagttcgaggttgctctcccttctgccactcagaacgaagtctccggcgaggaagccgagcacctcatcaagtccggtgtccgctatattgctgagggttccaacatgggttgcacccaggccgccatcgacatctttgaggctcaccgcaacgccaaccccggcgatgccatctggtacgcccctggtaaagccgccaacgctggtggtgtcgccgtctctggtcttgagatggctcagaactctgctcgtctctcctggacatccgaggaggtcgatgctcgcctcaagggcatcatggaggactgcttcaagaacggtctcgagactgctcagaagttcgctactcctgccaagggcgtcctgccttccctcgtcaccggttccaacattgccggtttcaccaaggtcgccgaggccatgaaggaccagggtgactggtggtga

SEQ ID NO: 56989 - protein, 459 aa, Aspergillus nidulans FGSC A4
MSNLPVEPEFEQAYKELASTLENSTLFEQHPEYRRALQVVSVPERVIQFRVVWENDKGEVQINRGYRVQFNSALGPYKGGLRFHPSVNLSILKFLGFEQIFKNALTGLNMGGGKGGSDFDPKGKSDSEIRRFCTAFMTELCKHIGADTDVPAGDIGVTGREVGFLFGQYRRIRNQWEGVLTGKGGSWGGSLIRPEATGYGVVYYVEHMIKHVTGGKESFAGKRVAISGSGNVAQYAALKVIELGGSVVSLSDSKGSLIVKDESASFTPEEIALIADLKVARKQLSELATSSAFAGKFTYIPDARPWTNIPGKFEVALPSATQNEVSGEEAEHLIKSGVRYIAEGSNMGCTQAAIDIFEAHRNANPGDAIWYAPGKAANAGGVAVSGLEMAQNSARLSWTSEEVDARLKGIMEDCFKNGLETAQKFATPAKGVLPSLVTGSNIAGFTKVAEAMKDQGDWW

SEQ ID NO: 56990 - DNA, 1371 bp, Candida albicans SC5314
  CDS (1)..(1371): transl_table=12
atggtcttacctcacgaaccagaattccaacaagcttacgatgaattagtttctgctgttgaagattctactttattcaaagaagaaccacaatacaaaaaagttattccagttgtttctatcccagaaagaatcattcaattcagagtcacttgggaaaacgacaaaggtgaaatcgaagtcaacaacggtttcagagttcaatacaactccgctttaggtccatacaagggtggtttacgtttccacccaactgtcaatttgtcaatcttgaaattcttgggttttgaacaaattttcaaaaacgctttaaccggattgtccatgggtggtggtaaaggtggttccgatttcaacccaaaaaacagatctgacaatgaaatcagaagattctgtgtttctttcatgagacaattggccagatacattggtccagataccgatgttccagctggtgatattggtgttggtggtagagaagttggtttcttattcggtgcttacaaacaaatgagaaacaactgggcgggtgttttgaccggtaaaggtttaacctggggtggttccttaattagaccagaagccactggttacggttgtgtttactacgttgaaaaaatgattgaaaaagccaccaatggtaaagaaactttcaaaggtaaaagagttgccatctctggttccggtaatgttgctcaatacgctgctttgaaagtaattgaattgggtggtactgttgtttccttgtcagactctaaaggttcaatcatttctaagaatggtatcactgctgatcaagtttacgccattgctgctgctaaattgaaattcaaatcattagaagaaattgttgctgactctgtgcaattgttctctggtgaccactctgttgaatacttggctggtgtccgtccatggactaaagttggtcaagtcgacgttgccttgccatctgctacccaaaacgaagtcagcggtgaagaagccaaagctttggttgatgctggttgtaaattcattgctgaaggttctaatatgggttccaccaaagaagctatcgaagtctttgaagctaacagagattccaacggtgtttggtatgctccaggtaaagctgccaactgtggtggtgttgctgtctctggtttagaaatggctcaaaactctcaaagagttcaatggactaacgaagaagttgatgctaaattgaaagaaatcatgtacacttgtttcgaaaactgctacaagactgctcaaaaatactccatcgaaaagaacgaaaatggtttaccatcattattgaaaggtgccaacattgctggtttcatcaaagttgctgatgccatgtttgaccaaggtgatgtcttttaa

SEQ ID NO: 56991 - protein, 456 aa, Candida albicans SC5314
MVLPHEPEFQQAYDELVSAVEDSTLFKEEPQYKKVIPVVSIPERIIQFRVTWENDKGEIEVNNGFRVQYNSALGPYKGGLRFHPTVNLSILKFLGFEQIFKNALTGLSMGGGKGGSDFNPKNRSDNEIRRFCVSFMRQLARYIGPDTDVPAGDIGVGGREVGFLFGAYKQMRNNWAGVLTGKGLTWGGSLIRPEATGYGCVYYVEKMIEKATNGKETFKGKRVAISGSGNVAQYAALKVIELGGTVVSLSDSKGSIISKNGITADQVYAIAAAKLKFKSLEEIVADSVQLFSGDHSVEYLAGVRPWTKVGQVDVALPSATQNEVSGEEAKALVDAGCKFIAEGSNMGSTKEAIEVFEANRDSNGVWYAPGKAANCGGVAVSGLEMAQNSQRVQWTNEEVDAKLKEIMYTCFENCYKTAQKYSIEKNENGLPSLLKGANIAGFIKVADAMFDQGDVF

SEQ ID NO: 56992 - DNA, 1368 bp, Ustilago maydis 521
  CDS (1)..(1368)
atgtccaaccttccctctgagcccgagttcgagcaggctcgcaacgagctggccaccacactcgctcctttcctggagcagtacccggaatacaacaaggcgtttgagattgttcagatccccgagcgcatcatccagttccgtgtggtctgggaggacgacaaccacgtctcacaggtaaaccgcggttaccgtgttcagttcaactcggcgctcggtccttacaagggaggtcttcgtctgcacgagaccgtcaacctgtccgtgctcaagtttttgggtttcgagcagatcttcaagaacgccctaaccggtctcaacattggtggtggtaagggtggaagcgacttcaaccccaagggcaagagcgatggtgaagtgcgtcgattctgcaaggcctttgctaccgagctgcagcgacacattggtcccaacaccgacgtacccgccggtgacattggcttctcgacgcgtgaggccggtttcgtgtttggaacgtacaagcagcttcgaaacgaatggaccggtgtgatcaccggtaaggcgttggactggggtggatccaacatccgtcctgaagccactggctacggtctgatctactacgtcgagcacatgatcaaccacgtcgagcagggcaccaacggcttcaacggcaaaaaagtcgtcatctcaggatccggtaatgtggcacagtacgctgcgctcaaggtactcgaactcggaggcaccgtgctctcgctttccgactcaaagggttctctgatcgccaaggacactaagggcttcaccgccgagatgatctccaagatcgccgagatcaagtacaatcgtggtgagctcgagtcgttcggtaccgcttccggtgcgctcgagtggcacgccggtgctcgcccttggaagctgttctcgtcgtacgacgttgcgctgccgtgcgccacgcaaaacgagctgaatgccgacgaggccaagttttcgctctcggccggctgtcgttacgtcgccgagggttccaacatgggtctcgaccaagccgccatcgacgtgtacgaacaatcgcgtatcaccgacccctcgaaagcgtgctggtacggtcccggaaaagctgccaactcgggcggtgtcgccgtctctggcctggaaatggcgcaaaactcggcgcgcctcacgtggtcccccgaagaggttgaccagaaactcaaggacattatgaaaaacgcctacgagaactgcttcaagaccggccaggctttccctgccaagaacgacaaggtcgccgacaagctgcccagcttggtcggtggtgccaacattgctggcttcaagaaggttgccgacgccatgaagcagcacggcgactggttctag

SEQ ID NO: 56993 - protein, 455 aa, Ustilago maydis 521
MSNLPSEPEFEQARNELATTLAPFLEQYPEYNKAFEIVQIPERIIQFRVVWEDDNHVSQVNRGYRVQFNSALGPYKGGLRLHETVNLSVLKFLGFEQIFKNALTGLNIGGGKGGSDFNPKGKSDGEVRRFCKAFATELQRHIGPNTDVPAGDIGFSTREAGFVFGTYKQLRNEWTGVITGKALDWGGSNIRPEATGYGLIYYVEHMINHVEQGTNGFNGKKVVISGSGNVAQYAALKVLELGGTVLSLSDSKGSLIAKDTKGFTAEMISKIAEIKYNRGELESFGTASGALEWHAGARPWKLFSSYDVALPCATQNELNADEAKFSLSAGCRYVAEGSNMGLDQAAIDVYEQSRITDPSKACWYGPGKAANSGGVAVSGLEMAQNSARLTWSPEEVDQKLKDIMKNAYENCFKTGQAFPAKNDKVADKLPSLVGGANIAGFKKVADAMKQHGDWF

SEQ ID NO: 56994 - DNA, 1356 bp, Cryptococcus neoformans var. neoformans B-3501A
  CDS (1)..(1356)
atgtccaactacccctctgagcccgaattccaacaggccgtcgccgagatcactcagactcttgagcctttccttgccaagaaccccgagtaccgacgagcgctcgacgtggttcaggtccccgagcgaatcgtgcaattccgagttacatgggagcgtgacgacggtaccatcgccatcaacaggggttaccgagtccaattcaactctgctctcggtccttacaagggtggtctccgtctccaccccaccgtcaacctctctatcctcaaattccttggtttcgagcagattttcaagaacgctctcactggtctcatgatgggtggtggtaagggtggttccgactttgaccccaagggcaaaaccgacagcgaaatccgacgattctgctatgccttcatgcaggagctctctcgacacatcggtaccgacactgatgtccctgctggtgacatcggtactggtggacgtgagattggcttcatgttcggtgcatacaagaagtacaggaacgagaacgctggtatccttactggtaagggtgctgactggggaggttcccacatccgtcccgaggccactggttacggtctcgtctactacgtcactgaaatgctccgtgacctcgacaacaccgactggaaaggcaagcgagtccttatctccggtgccggtaacgtcgcccagtacgctgctctcaaggttattgagctcggtggtaccgtcctctctctctccgattccactggtgctctcgtcgccactggtgatgagggcttcactcctgaggagatcatgaacattgccgacatcaagctccagcgaaagagcttgactgccttcgccactggctccaaattccaatggcacgagggcaagaggccctggacccttgtcagcaacgccgatatcgctcttccttctgcttcccagaacgagcttaacgacgaggaggctaaggccctcatcaaggccggtgtccgctacgttgctgaaggctccaatatgggctgcactcttgacgccattaagatcttcgaagagtcccgaactgcggccaagaacgccaccgacgccggtgtctgcttctacgctcctggtaaggctgccaactgtggtggtgttgccgtttccggccttgaaatggcccagaactcccaacgtctcaagtggactcacgaggaggtcgacgccaagctcaaggccatcatgatcaactgctaccagacctgttgggagaccggcaagcaatacgctgaggctggtgttgttccttccttggtcgccggtgccaacatcgctggtttcgtcaaggttgccaacgccatgcgcgaacagggtgactggtggtaa

SEQ ID NO: 56995 - protein, 451 aa, Cryptococcus neoformans var. neoformans B-3501A
MSNYPSEPEFQQAVAEITQTLEPFLAKNPEYRRALDVVQVPERIVQFRVTWERDDGTIAINRGYRVQFNSALGPYKGGLRLHPTVNLSILKFLGFEQIFKNALTGLMMGGGKGGSDFDPKGKTDSEIRRFCYAFMQELSRHIGTDTDVPAGDIGTGGREIGFMFGAYKKYRNENAGILTGKGADWGGSHIRPEATGYGLVYYVTEMLRDLDNTDWKGKRVLISGAGNVAQYAALKVIELGGTVLSLSDSTGALVATGDEGFTPEEIMNIADIKLQRKSLTAFATGSKFQWHEGKRPWTLVSNADIALPSASQNELNDEEAKALIKAGVRYVAEGSNMGCTLDAIKIFEESRTAAKNATDAGVCFYAPGKAANCGGVAVSGLEMAQNSQRLKWTHEEVDAKLKAIMINCYQTCWETGKQYAEAGVVPSLVAGANIAGFVKVANAMREQGDWW

SEQ ID NO: 56996 - DNA, 1647 bp, Tribolium castaneum
  CDS (1)..(1647)
atgttatctctcaagtcgctcccgaagctgaagagtgcgagtctcgagctcgcccccttgttcaagctcgccccgtgcctccagagccgcggctacgccgaccatgtcatccccgaccggctcaaagacatgcccacgcacgccagcccccgctttttcgacatggtggagtacttcttccaccggtcgtgcatcctggtggaggacaagctggtggaggacctggccaaggtgaagggcagtcggctgacgctggagcagcgcaaggccaaggtgaaggggattctgacgctgatggagcagtgtgaccacatcctggaggtggccttccccatcaggagggacaatggggagtacgagatcgtgcggggctacagggcgcagcacagcacccacaggacgccctgcaaaggcggtatccgttactcaatggacgtctcccgcgacgaagtcaaggccctatcggccctaatgaccttcaaatgcgcatgcgtcgatgtgcccttcgggggcggcaaggccggcattaaaatcaacccaaaagagtacagtgagcacgaactcgaaaaaatcacgcgtcgttttgcccttgaactggccaaaaagggtttcattggccccagtattgatgtccccgcccctgatatgggcaccggagagagggaaatgtcatggatcgctgacacgtactcgaaaacgattggctatcaggatattaatagccacgcctgcgttacgggcaaaccaatcaatcagggcgggattcacggaagggtgtcggccacagggcgtggcgtttttcacggattggataattttgttaatgaggcggcgtatatgagtctgtgtggaacgacgcccggatggggcgggaaaacgttcattgttcaagggtttggtaatgtgggcttacataccatgaggtacctgcacagggccggggccaggtgcattggggtgctggaacatgatgggtccatttataatcccaatgggttggaccccaaggaattggaagactacagaatgaccaacggcaccattgtgggcttccccggttccaaagcctacgaaggtgacagtttattgtacgaggagtgcgatattttagtgcctgcggccaccgagaaggttatcaacaaggaaaatgctcataaaattaaggccaaaattattgccgaagcggccaatggccccacaaccccagccgctgatcaaattctcattgaaaaaaatattctcgtaattcccgacttgtacataaatgcaggtggtgtaaccgtttcgttcttcgaatggttgaaaaatatcaatcatgtgagctatggcagactcaccttcaagtatgagagggactcgaactaccatctgttgcaatcggttcaggagtcacttgagcgcaggtttggaagtgtggggggcaaaatcccagtgacccccagcgagtctttcagtaagagaatagcgggggcttctgaaaaagatatcgtccattcagggttggactatactatggaaagatcagctaaagctatcatgaaaaccgcaatgaaattcaatctgggcctggatttgagaactgccgcttacattaactcgatcgagaaaatcttcaatacttactcagaagctggacttaccttctaa

SEQ ID NO: 56997 - protein, 548 aa, Tribolium castaneum
MLSLKSLPKLKSASLELAPLFKLAPCLQSRGYADHVIPDRLKDMPTHASPRFFDMVEYFFHRSCILVEDKLVEDLAKVKGSRLTLEQRKAKVKGILTLMEQCDHILEVAFPIRRDNGEYEIVRGYRAQHSTHRTPCKGGIRYSMDVSRDEVKALSALMTFKCACVDVPFGGGKAGIKINPKEYSEHELEKITRRFALELAKKGFIGPSIDVPAPDMGTGEREMSWIADTYSKTIGYQDINSHACVTGKPINQGGIHGRVSATGRGVFHGLDNFVNEAAYMSLCGTTPGWGGKTFIVQGFGNVGLHTMRYLHRAGARCIGVLEHDGSIYNPNGLDPKELEDYRMTNGTIVGFPGSKAYEGDSLLYEECDILVPAATEKVINKENAHKIKAKIIAEAANGPTTPAADQILIEKNILVIPDLYINAGGVTVSFFEWLKNINHVSYGRLTFKYERDSNYHLLQSVQESLERRFGSVGGKIPVTPSESFSKRIAGASEKDIVHSGLDYTMERSAKAIMKTAMKFNLGLDLRTAAYINSIEKIFNTYSEAGLTF

SEQ ID NO: 56998 - DNA, 1299 bp, Bradyrhizobium sp. ORS278
  CDS (1)..(1299): transl_table=11
atggttgccggcctgcaggagcagattcgggagtggaagatgactgtctatgcgggtccggtcttcgagatggccgccaatcagttcaacgtgatcgccgatcaccttggcatcccaggcgacgagcgcgaccggctgctgctcccgaagcgggcgatcaccgtctcgtgtccgatccacaaggacgacggcaccattgccgtgttcgaggggtatcgtgttcagcatctcctgaccatggggccgaccaagggcggcacccgttttgcgccgaccgtcgacatcggcgaggtcgcggcgcttgcgatctggatgagctggaaatgcgcgctggtgggcttgccctatggcggcgccaagggcggcgtcaatgtggacctctccaagctgtcccgccgtgagctggagtcgctctcccgccgctacatgcaggaaatgatccccttcgtcggcccgcataccgacgtgatggcgccggacatgggcaccaacgagcaggtgatggcgtggttcatggatacgtactccatgtatcagggccagaccgtgaccgagatcgtcaccggcaagccggtgttctcgggcggcacgctcggccgccgcgaggcgaccggccgcggcgtcgctcacgtgtcgcggcgggtgatggatctgctgggcatcgatcccgccaagtccaccgtcgttgttcagggcttcggcaatgtcggctcctacgctgcgctcggctttcaccagatgggcatgaaggtgattgcggtcagcgatcataccggcgcgctccacgatgccagaggcctcgacattcccgcactgatggcgcatgcaagcaagcacggcagcatcgctggcttctccaccgagctcgccttcgatcccaaggacatcctgacgctcgcctgcgacatcctggtgccggcggcgatcgagcgcgtcatcgacgccaaggtggcggcgaacctgaaatgccgcgtcatcgcggaagccgccaacggcccgaccacgccggatgccgacctggtgctcgaccagcgccgcaaggagatcttcctcattcccgacattctctgcaactccggcggcgtcatcgtcagctatttcgaatgggtgcaggatctgcagcagctgttctgggaggaggaggaggtgatgcggcgcgagtaccagatcctcgatcgtgccttcgagaagatggtcgcgcgcgccaaggccgacgacatcgcgcaccggacggcggcgatggcgatcggcgtcgagaaggtgcgcaacgccaagaacacgcgagggctgttcccgtga

SEQ ID NO: 56999 - protein, 432 aa, Bradyrhizobium sp. ORS278
MVAGLQEQIREWKMTVYAGPVFEMAANQFNVIADHLGIPGDERDRLLLPKRAITVSCPIHKDDGTIAVFEGYRVQHLLTMGPTKGGTRFAPTVDIGEVAALAIWMSWKCALVGLPYGGAKGGVNVDLSKLSRRELESLSRRYMQEMIPFVGPHTDVMAPDMGTNEQVMAWFMDTYSMYQGQTVTEIVTGKPVFSGGTLGRREATGRGVAHVSRRVMDLLGIDPAKSTVVVQGFGNVGSYAALGFHQMGMKVIAVSDHTGALHDARGLDIPALMAHASKHGSIAGFSTELAFDPKDILTLACDILVPAAIERVIDAKVAANLKCRVIAEAANGPTTPDADLVLDQRRKEIFLIPDILCNSGGVIVSYFEWVQDLQQLFWEEEEVMRREYQILDRAFEKMVARAKADDIAHRTAAMAIGVEKVRNAKNTRGLFP

SEQ ID NO: 57000 - DNA, 1275 bp, Thermus thermophilus HB27
  CDS (1)..(1275): transl_table=11
atgaagagcgaacccctttcctacctgggcaaggacggaggcccctgggagatcttcacggagcaggtggaccgggtcgtcccctacctggggcggctcgcccccctggcggaaagcctcaagcggcccaagagagtcctcatcgtggacgtccccgtgcgcctggacgacgggagcgtggcctactttgaagggtaccgggtccaccacaacaccgcccgggggcccgccaagggcggggtgcgctaccaccccgaggtcaccctctccgaggtcatggccctggcggggtggatgaccatcaaaaacgccgccgtgggcctaccctacgggggcggcaagggcgggatacgggtggacccgaggaagctttcccccggggagctggagcgcctcacccgccgctacacctcggagatcgggatcctcctcggtcccgaccgggacatccccgcccccgacgtgaacaccggggagcgggagatggcctggatgatggacacctactccatgaacgtgggccgcaccgtgcccggggtggtgacggggaagcccatcgccttaggcggctccctgggccggagggacgccacggggaggggggtcttcatcaccgcggcggccgcggcggagaagatcgggcttcaggtggagggggccagggtggccatccagggcttcggcaacgtgggcaacgccgccgcccgggccttccacgaccacggggcccgcgtcgtcgccgtccaggaccacaccggcaccgtctacaacgaggcgggcattgacccttacgacctcctccgccacgtgcaggagttcgggggggtgaggggttaccccaaggcggagcccctgccggcggcggacttctggggcctgcccgtggagttcctcgtcccggcggccttggagaagcagatcaccgagcagaacgcctggcgcatccgggcccggatcgtggccgagggggcgaacggccccaccaccccggccgccgacgacatcctcttggagaagggggtcctggtggtccccgacgtgatcgccaacgccgggggcgtgacggtgagctactttgagtgggtccaggacttcaactcctacttctggacggaggaggagatcaacgcccgcctggagcgggtgctccgcaacgcctttgaggcggtgtggcaggtagctcaggagaagaagatccccttgcgcaccgccgcctacgtggtggcggcgacccgggtcctcgaggcccgggccctccggggcctatacccttaa

SEQ ID NO: 57001 - protein, 424 aa, Thermus thermophilus HB27
MKSEPLSYLGKDGGPWEIFTEQVDRVVPYLGRLAPLAESLKRPKRVLIVDVPVRLDDGSVAYFEGYRVHHNTARGPAKGGVRYHPEVTLSEVMALAGWMTIKNAAVGLPYGGGKGGIRVDPRKLSPGELERLTRRYTSEIGILLGPDRDIPAPDVNTGEREMAWMMDTYSMNVGRTVPGVVTGKPIALGGSLGRRDATGRGVFITAAAAAEKIGLQVEGARVAIQGFGNVGNAAARAFHDHGARVVAVQDHTGTVYNEAGIDPYDLLRHVQEFGGVRGYPKAEPLPAADFWGLPVEFLVPAALEKQITEQNAWRIRARIVAEGANGPTTPAADDILLEKGVLVVPDVIANAGGVTVSYFEWVQDFNSYFWTEEEINARLERVLRNAFEAVWQVAQEKKIPLRTAAYVVAATRVLEARALRGLYP

SEQ ID NO: 57002 - DNA, 1248 bp, Picrophilus torridus DSM 9790
  CDS (1)..(1248): transl_table=11
atggaggatttggatccattcacaatttcaaggcagcagctccagaaggctgcaaaggtcatgaaccttgataagcaggcccttgagatattaagctatccaagggagatattgcaggtatcaatacctgtaaaaatggacagcggcgaggtaaaggtatttacaggatttagggttcattacaacaatgcaagggggccaacaaagggtggcattagatactatgaaaaggagaatttgtcagaggtaatggcactttcggcatggatgacctggaagactgcacttcttgatttaccactcggcggtgcaaagggcggaattatatgcaatccaaaggaattaagccagggtgagcttgaaaggttaagccgtggctacatagatgcaatagctgatttcataggccctgacaaggatatacccgcacctgatgtttacacaaatccacagataatggcatggatgatggacgagtacgaaaaggttatgagaagatcaagtcccggggtaataacaggaaagccactggctgttggtggttcagagggccgcggggatgcaaccgcaaagggcggtatgtacgttttaagggaggcggcaagatcaataggtcttgacctttcaaaggcaaaggttgccgtccagggctttggcaatgcaggccagtacgctgtaaaatttgcaactgagatgttcggtgcaaaggtggttgctgtttcagattcaaccggcggcatatacgcaaaggacggtgtaaactatgaaaagctcttagagcataaaagaaaggatggcacagtaatgaactatgacggctctgagaacatatcagaagaggaggttctcgaacaggacgtcgatgttttaatacctgcagcaatagaggatcagatccgtggtgacaatgcatccaagataaaggcaaagataatccttgagcttgcaaatggaccgacaacgcccgaggccgatgagatactatacaagaacaatgttctggttcttccagacttcctttcaaatgccggtggtgtaaccgtttcatactttgaatgggttcagaacgtcacaggtgattactgggatgaggagaccgtttactcaaaactggataaaaagatgaccgccgcaacaagaagcgttcttgaaacatcaaagcgctatgaggttgacccaaggacagctgcatacataatagccgtgaagaaggtggccgacgcaatgaaggccagaggctggtattaa

SEQ ID NO: 57003 - protein, 415 aa, Picrophilus torridus DSM 9790
MEDLDPFTISRQQLQKAAKVMNLDKQALEILSYPREILQVSIPVKMDSGEVKVFTGFRVHYNNARGPTKGGIRYYEKENLSEVMALSAWMTWKTALLDLPLGGAKGGIICNPKELSQGELERLSRGYIDAIADFIGPDKDIPAPDVYTNPQIMAWMMDEYEKVMRRSSPGVITGKPLAVGGSEGRGDATAKGGMYVLREAARSIGLDLSKAKVAVQGFGNAGQYAVKFATEMFGAKVVAVSDSTGGIYAKDGVNYEKLLEHKRKDGTVMNYDGSENISEEEVLEQDVDVLIPAAIEDQIRGDNASKIKAKIILELANGPTTPEADEILYKNNVLVLPDFLSNAGGVTVSYFEWVQNVTGDYWDEETVYSKLDKKMTAATRSVLETSKRYEVDPRTAAYIIAVKKVADAMKARGWY

SEQ ID NO: 57004 - DNA, 1272 bp, Acinetobacter sp. ADP1
  CDS (1)..(1272): transl_table=11
atgtcactttcatatgaaatagaaaataatggtgcatggcaaacctatttggcgcaggtagatcgtgttgcaccttatcttgaagcagatctcattccttatattaataccttaaagcgaccaaaaagagcgttgattgttgatgttccgattgtgatggatgatggggcgatccagcattttgagggttaccgagtccaacataatttgtctcgtggtccaggcaaaggcgggattcgctatcatccagatgttgagctcaacgaagtgatggcgctctcggcatggatgacgatcaagacagcagttttaaatttaccttatggcggggcaaaaggagggattcgagttgatcctaaaaagctatcagcccgagagctggaacgtttaacccgtcgttttaccagtgaaattagcccgattattggcccacagaatgatattcctgcaccagatgtaggaaccaatgccgatatcatgggctggatgatggatacctattcaagtatcaaaggccatacggttacaggtgtggtcactggtaaacctgtccatttgggaggttccctcgggcgagtacgcgcgacgggtcgtggtgtgtttgtcactggacttgaagtcgcgaaaaagattaatttgtctatcgaaaatagccgtgtggctgtacaaggctttggtaatgtaggtagtgaagctgcttatctgtttaataaagcgaatgccaaagtggtctgtgcacaggatcatacagggacaatctttaatgatgacggattggatgttaaaagtttacaagagcatgtggcacaaacaggtggtgttgcaggctttccagattcaagcaaaatagaggatgctgaattctggaatgtcgagatggatattctggttcctgctgcacttgaaggtcaaatcacagccgaacgtgcacaaacgctgaaagcaaaactagtgttagaaggtgcaaatggtccaacgtatccagatgcagatgatgtgttggggcagcgaaatatcattgtagttcctgatgtattatgtaatgcaggtggtgtcaccgtcagttattttgaatgggtacaggatatgtcaagttatttctggactgaggacgaaattaatgcacgtttggataaattaatgattcaggctgtggatgatgtctggaaaaaagcccaagaaaaatcttgtacgatgcgtacagccgcttatattctggcctgtgagcgcattttaaaagcacgtaaggaacgtggtatctttcctggttaa

SEQ ID NO: 57005 - protein, 423 aa, Acinetobacter sp. ADP1
MSLSYEIENNGAWQTYLAQVDRVAPYLEADLIPYINTLKRPKRALIVDVPIVMDDGAIQHFEGYRVQHNLSRGPGKGGIRYHPDVELNEVMALSAWMTIKTAVLNLPYGGAKGGIRVDPKKLSARELERLTRRFTSEISPIIGPQNDIPAPDVGTNADIMGWMMDTYSSIKGHTVTGVVTGKPVHLGGSLGRVRATGRGVFVTGLEVAKKINLSIENSRVAVQGFGNVGSEAAYLFNKANAKVVCAQDHTGTIFNDDGLDVKSLQEHVAQTGGVAGFPDSSKIEDAEFWNVEMDILVPAALEGQITAERAQTLKAKLVLEGANGPTYPDADDVLGQRNIIVVPDVLCNAGGVTVSYFEWVQDMSSYFWTEDEINARLDKLMIQAVDDVWKKAQEKSCTMRTAAYILACERILKARKERGIFPG

SEQ ID NO: 57006 - DNA, 1350 bp, Desulfotalea psychrophila LSv54
  CDS (1)..(1350): transl_table=11
atggaccccataattcagcaattacatgccaaggatcaagaccaacatgaatttcatcaggccgtagaagaggttttagaaagtgtaaagccggtgcttgatagaaatttatggtatcgtcaacagggtgtttgggagcgccttatagagcctgaacgtgttattatgtttcgtgttccctgggtggatgatgagggtaatgtccgtgttaacagagggtttagggtcgaaatgaactctgccctaggaccttataagggggggcttcgttttcacccttcagtaaatttgagcataataaagtttttggcctttgagcagacctttaagaattccctgactaccctgcccatgggtggtggcaagggaggttctgattttaatccaaaggggtgttcggattttgaggtaatgaggttttgtcactcctttatgttggagttataccgccatatcggtcctaataccgatgtgccagcgggcgatattggtgttggcgcccgtgaaattggttatctttttggcatgtacaaaaagataaagaatgagttcaccggggtgcttaccggtaagagtcttggctggggtggtagtcttattcgtcccgaggcaacgggctatggtaatgtctattttgcctccgagatgctgactacccgggaccagaccatagagggtaagagctgtcttgtctccggttctggtaatgtggcccagtttaccatcgaaaaaatacttgatcttggtggcaaggtacacaccatctctgattccgatggctatatatatgatgaggagggtattgactgtgataaacttggctggatcaaacagttaaaaaatatccgtcgtggccgggttgctgaatatgttgagacctatcctcaggctgtttatacacctattgacccgactcttggctataaccctctttgggatcactctgctgattgtgcttttcctagtgctactcaaaatgagattaacgagcaggatgcaaagaaccttgtcaaaaatggtgtgtttcttatcagtgaaggcgccaatatgccaagtagtcctgaggcggttgctgtttttcatgatgcgaattgtctttatggtcctagcaaggcggcaaatgccggtggtgttgctgtctccggtcttgagatgtcacaaaataccatacggatgtcttggccacgggaagaggtggatactcgtcttaaacagataatgcactctattcactctacctgtgttgatgctgcttcggaatataattatgggcaaaattatgttgcaggtgctaatattgcgggctttgttaaggttgttaatgccatgttggatcagggcgttgtttag

SEQ ID NO: 57007 - protein, 449 aa, Desulfotalea psychrophila LSv54
MDPIIQQLHAKDQDQHEFHQAVEEVLESVKPVLDRNLWYRQQGVWERLIEPERVIMFRVPWVDDEGNVRVNRGFRVEMNSALGPYKGGLRFHPSVNLSIIKFLAFEQTFKNSLTTLPMGGGKGGSDFNPKGCSDFEVMRFCHSFMLELYRHIGPNTDVPAGDIGVGAREIGYLFGMYKKIKNEFTGVLTGKSLGWGGSLIRPEATGYGNVYFASEMLTTRDQTIEGKSCLVSGSGNVAQFTIEKILDLGGKVHTISDSDGYIYDEEGIDCDKLGWIKQLKNIRRGRVAEYVETYPQAVYTPIDPTLGYNPLWDHSADCAFPSATQNEINEQDAKNLVKNGVFLISEGANMPSSPEAVAVFHDANCLYGPSKAANAGGVAVSGLEMSQNTIRMSWPREEVDTRLKQIMHSIHSTCVDAASEYNYGQNYVAGANIAGFVKVVNAMLDQGVV

SEQ ID NO: 57008 - DNA, 1317 bp, Symbiobacterium thermophilum IAM 14863
  CDS (1)..(1317): transl_table=11
gtgagaggcgtcacgaatggggggaaagagatgggcggcgctcaaaatccgtttctgattgcgcaacagcaggttcggaacgcggtggcggcgttgggcgagagcgaggagctgttcgagctcctgaaggcgccggcccatttcatcgaggtgcagatcccggtgcgcatggatgacgggagcctgcgcgtgttcaccgggtaccggagccagcacctcacgaccctcgggcccgccaagggaggcatccggttccacccggcggtcaccgccgatgaggtgaaggccctctccatgtggatgacgttcaagacgtccgtggtggggctcccctacggcggcggcaagggcggcgtcgtcgtcgacccgcgcaagctcagcctgggcgaactggagcggctctcccgcggctacgtgcgggcgatctggccctacctcgggcccgacaaggacattcctgccccagacgtgaacaccaacgcgcagatcatgggctggatgaccgacgagtacgagaccatcgtgggcgccagctgtccggccgtgttcacgggcaagccgctctccatgggcggctcgctgggccgcgaggaggccaccggccggggcaccgtcatcaccatccgcgaggccctggcgtacctggggctgcccgtggcgggcgcccgggtggcggtgcagggcttcggcaacgccggacagcacgcggcgcggctgctggaggagctgggagccgtcctggtcgcggccagcgacagccgtggcggcatcgtctgccccggcggaatgcgcgtggccgacctcatcgcgtacaagcaggcgacgggcagcgtcgtcggcttccctggcagccgggccaccgaccagttcggggtgctgacggccgactgcgacatcctggtgccggcggccctggagaaccagatcgacgccgaggtggccaggtccatccgggcccgcgtggtggccgaggcggccaacggcccgacgacgcccgacggtgaccacgtcctggcgcagcggaagatttttctcatcccggacatcctcgccaacgcaggcggcgtgaccgtttcgtattttgagtgggtgcagaaccggaaccagtattactggacggcggaggaggtcaacgcccggctggaacagcgcatggtggcctccttccgcgacgtggtcgccatggccgagcggcacggtgcctacacccggacggcggcctacatgtacgccatccaccgcatcgccgaatcgctgcggatgcgggggctgctcagggcgccggcccgccaggcgctccgggcggcggccggctaa

SEQ ID NO: 57009 - protein, 438 aa, Symbiobacterium thermophilum IAM 14863
MRGVTNGGKEMGGAQNPFLIAQQQVRNAVAALGESEELFELLKAPAHFIEVQIPVRMDDGSLRVFTGYRSQHLTTLGPAKGGIRFHPAVTADEVKALSMWMTFKTSVVGLPYGGGKGGVVVDPRKLSLGELERLSRGYVRAIWPYLGPDKDIPAPDVNTNAQIMGWMTDEYETIVGASCPAVFTGKPLSMGGSLGREEATGRGTVITIREALAYLGLPVAGARVAVQGFGNAGQHAARLLEELGAVLVAASDSRGGIVCPGGMRVADLIAYKQATGSVVGFPGSRATDQFGVLTADCDILVPAALENQIDAEVARSIRARVVAEAANGPTTPDGDHVLAQRKIFLIPDILANAGGVTVSYFEWVQNRNQYYWTAEEVNARLEQRMVASFRDVVAMAERHGAYTRTAAYMYAIHRIAESLRMRGLLRAPARQALRAAAG

SEQ ID NO: 57010 - DNA, 1275 bp, Bacillus licheniformis ATCC 14580
  CDS (1)..(1275): transl_table=11
atggtagccgatcaaaacaccggtcatactgaagaaaacacacatgacgttttgaaatcaacgcaaacggtgatacataaggcgcttgaaaaattgggatatcctgaagaggtgtatgaattactaaaagaaccgattcgttttttaacggtgaaaattccggttcgcatggacgatggatctgttaagattttcacgggctaccgagcccagcacaatgatgcagtagggccgacaaaaggcggcatccgttttcatccgggagttacagaaaaagaagttaaagcgctttctatttggatgagtctgaaatgcggcatcatcgaccttccatatggaggcggaaagggcgggatcatctgtgatccgcgggatatgtcctttcctgaactggaacgtttaagcagagggtacgttcgggcgatcagccaaattgtcggaccgacaaaagacgtaccggctcccgatgtatttaccaattctcaaatcatggcatggatgatggacgaatattcaagaatcgacgaattcaactcgccgggcttcattaccggcaaaccgctcgttttaggtggttctcacggcagagaatctgcgacagcaaaaggggttacaatctgcattaaagaggcggcgaaaaagaaaaacatcgacattgagggagcttctgtcgtcgtgcaggggttcggaaatgcgggaagctaccttgcgaaattcatgtatgacgcaggtgcaaaggttgtcggcatttctgatgcatacggcggcctgtacgatcctgaagggcttgacatcgattacctgcttgaccgccgagacagcttcggaacggtcacaaagctgtttaatgacaccattacaaacaaagaactgctggagctggagtgcgacattcttgtgccggctgccatagaaaatcaaattaccgcggaaaacgcccataacatcaaggcgaaaatcgttgtcgaagctgccaacggcccgacgacgctcgaagcgacgaaaattctttccgaccgcgacattcttcttgtaccggacgtgctggcaagcgccggcggtgtaacggtatcctattttgagtgggtgcaaaacaaccagggattctactggactgaagaagaagttgaagaacgtttggaaaaaatgatggtcaaatcgttcaacaacatttatgaaatggcgcacaaccgcagaattgacatgaggcttgcagcctatatggtgggcgtccgcaagatggcggaagcatcccgcttcagaggctggatatag

SEQ ID NO: 57011 - protein, 424 aa, Bacillus licheniformis ATCC 14580
MVADQNTGHTEENTHDVLKSTQTVIHKALEKLGYPEEVYELLKEPIRFLTVKIPVRMDDGSVKIFTGYRAQHNDAVGPTKGGIRFHPGVTEKEVKALSIWMSLKCGIIDLPYGGGKGGIICDPRDMSFPELERLSRGYVRAISQIVGPTKDVPAPDVFTNSQIMAWMMDEYSRIDEFNSPGFITGKPLVLGGSHGRESATAKGVTICIKEAAKKKNIDIEGASVVVQGFGNAGSYLAKFMYDAGAKVVGISDAYGGLYDPEGLDIDYLLDRRDSFGTVTKLFNDTITNKELLELECDILVPAAIENQITAENAHNIKAKIVVEAANGPTTLEATKILSDRDILLVPDVLASAGGVTVSYFEWVQNNQGFYWTEEEVEERLEKMMVKSFNNIYEMAHNRRIDMRLAAYMVGVRKMAEASRFRGWI

SEQ ID NO: 57012 - DNA, 1431 bp, Silicibacter pomeroyi DSS-3
  CDS (1)..(1431): transl_table=11
atggcccccaagaacgagcccagtttcagacagagcgtggatatgatgttcaacagggcggtggccctgatggacctgccgccgggactggaggaaaagatcagggtttgcaacgccacctatacggtgcgcttcggcgtgcgtctgcgcggtcagatccagacctttgtcggctatcgttcggtgcattccgaacatatggagccggtcaagggcggtatccgttacgcgatgtcggtgaaccaggacgaggtcgaggcgctggcggcgctgatgacctataaatgcgcgctggtcgaggcgccctttggcggttccaagggcgggttgtgcatcgacccgcgccagtatgaagagcatgagctggaacagatcacccgccgctttgcctatgaactggccaagcgcgacctgatcaacccctcgcagaacgtgcccgcgcccgacatgggcaccggcgagcgcgagatggcctggatcgccgaccagtatgcgcgcatgaacaccaccgatatcaacgcgcgcgcctgtgtcaccggcaagccgctgaatgcgggcggcatccatggtcgggtcgaagccactgggcgcggcgtgcaatacgccttgcaggaattcttccgcgaccgcgtcggggtaggcaaatcgggccttgacggcaagctcgacggcaagcgcgtcatcgtgcagggcctgggcaacgtgggctatcacgcggccaagttcctgagcgaggaagacggctgtgtgatcaccggcatcatcgaacgcgacggcgcgctggtcagcgacgaggggctggatgtcgaggcggtgcacaactggatcgtcaagcatggcggtgtcaccggcttcccggacgggacctttgtggccgagggtgccaaggtgctggaagagccgtgcgacatcctgatcccggcggcgatggaaggggtgatcaacctcgccaatgccgatcggatcaaggcgccgctgatcatcgaggcggcgaacggtccggtgaccgccggtgccgatgagatcctgcgcaagaagggctgcgtgatcattcccgacatgtatgccaatgccggcggtgtgacggtgtcctatttcgaatgggtcaagaacctcagccatatccggttcggccgcatgcagcgccgccaggaagaggcacgccatcagctggtcatcgacgagctggagcggctcgaccgctatctgggcgatgcctggtcgatgacgccgcagttcaaggagaagtaccttcgcggcgccgacgagctggaactggtacgctcggggctcgatgacaccatgcgcatcgcctatcaggccatgcgcgatgtctggcacgaacggggcgatgtcgaggatctgcgcaccgccgcctatctggtctcgatcgaccgggtcgccaagagctatcgcgccaagggtctctga

SEQ ID NO: 57013 - protein, 476 aa, Silicibacter pomeroyi DSS-3
MAPKNEPSFRQSVDMMFNRAVALMDLPPGLEEKIRVCNATYTVRFGVRLRGQIQTFVGYRSVHSEHMEPVKGGIRYAMSVNQDEVEALAALMTYKCALVEAPFGGSKGGLCIDPRQYEEHELEQITRRFAYELAKRDLINPSQNVPAPDMGTGEREMAWIADQYARMNTTDINARACVTGKPLNAGGIHGRVEATGRGVQYALQEFFRDRVGVGKSGLDGKLDGKRVIVQGLGNVGYHAAKFLSEEDGCVITGIIERDGALVSDEGLDVEAVHNWIVKHGGVTGFPDGTFVAEGAKVLEEPCDILIPAAMEGVINLANADRIKAPLIIEAANGPVTAGADEILRKKGCVIIPDMYANAGGVTVSYFEWVKNLSHIRFGRMQRRQEEARHQLVIDELERLDRYLGDAWSMTPQFKEKYLRGADELELVRSGLDDTMRIAYQAMRDVWHERGDVEDLRTAAYLVSIDRVAKSYRAKGL

SEQ ID NO: 57014 - DNA, 1245 bp, Staphylococcus epidermidis RP62A
  CDS (1)..(1245): transl_table=11
atgactgagaataataatttagtaacttccactcaagggattattaaagaagcattacacaagttgggctttgatgatggtatgtatgaccttataaaagaaccaattagatttttacaagtgcgcattccagtacgaatggacgatgggacagttaaaacatttactggataccgtgcacaacataatgatgcagttggccctactaaaggtggcgttcgtttccatccagaagttgatgaagaagaagtgaaggcattatcaatgtggatgactttaaaatgtggcattgttaatttaccttatggtgggggtaaaggcggtattgtttgtgatccacgtcaaatgagtatacacgaagttgagcgtctatctcgagggtatgtaagagctatatctcaatttgttgggcctaacaaagatattccagcaccagacgtttttacaaactctcaaattatggcttggatgatggatgagtatagtgcattagataaatttaattcgccaggttttataacaggcaaacctattgtattaggtggatctcaaggacgtgatcgctctacagctttaggtgtagtcattgcaattgaacaagcggcaaaacgtcgtggcatggatattaaagatgccaaaattgtgattcaaggtttcggcaatgcaggtagtttcttagctaaattcttatacgatttaggtgctaaagtagttggtataagtgatgcatatggagccttacatgaccctaatggacttgatatagattatttattagatcgacgtgatagcttcggtacagttacaaatctattcgaagatacaatttctaacaaagaattattcgaattggattgtgacatccttgttcctgctgcaatttccaatcaaatcactgaagataatgcgcacgatattaaagcaagcattgtagttgaagctgctaatggccctacgacgcctgaagcaacacgtattttaacagaaagagatatattactagtgccggatgtacttgcaagtgcaggaggtgtgactgtatcttatttcgagtgggtacaaaataatcaaggttattattggactgaagaagaagtcaatgacaaactacgtgagaagttagtaacagcatttgatacgatttatgaattgtcacaaaatagaaaaattgatatgagattagcagcatatatagtaggtattaaacgtactgctgaagcagcaagatatagaggttgggcataa

SEQ ID NO: 57015 - protein, 414 aa, Staphylococcus epidermidis RP62A
MTENNNLVTSTQGIIKEALHKLGFDDGMYDLIKEPIRFLQVRIPVRMDDGTVKTFTGYRAQHNDAVGPTKGGVRFHPEVDEEEVKALSMWMTLKCGIVNLPYGGGKGGIVCDPRQMSIHEVERLSRGYVRAISQFVGPNKDIPAPDVFTNSQIMAWMMDEYSALDKFNSPGFITGKPIVLGGSQGRDRSTALGVVIAIEQAAKRRGMDIKDAKIVIQGFGNAGSFLAKFLYDLGAKVVGISDAYGALHDPNGLDIDYLLDRRDSFGTVTNLFEDTISNKELFELDCDILVPAAISNQITEDNAHDIKASIVVEAANGPTTPEATRILTERDILLVPDVLASAGGVTVSYFEWVQNNQGYYWTEEEVNDKLREKLVTAFDTIYELSQNRKIDMRLAAYIVGIKRTAEAARYRGWA

SEQ ID NO: 57016 - DNA, 1284 bp, Dechloromonas aromatica RCB
  CDS (1)..(1284): transl_table=11
atgaatgccccgctgctgccttcttatatttcggctcaaaacatcggtccgtggcacatcttcctgcagcaagtcgagcaggtcgcaccgctgctcgacaagtcgctgtggccgtgggtggaaaccctgcgtcgaccaaaacgttcgttgatcgtcgatgtgccgatccgtctcgatagcggtgaagtggcgcattttgagggttatcgcgtgcatcacaacacctcacgcgggccgggcaagggcggcgtgcgctttcatcaggatgtcaccttgtccgaggtgatggcgctggccggctggatgacgatcaagaacgcggtagtcaatgtgccgttcggcggtgccaagggcggtgtccgtgtcgatccccggcagctttcgatttcggaactcgaagggctgacccgccgttacaccagcgaaatcagttcgatgatcgggccggacaaggatattccggcgccggacatgaataccaatgcccaggtcatggcctggatgatggatacctattccatgggtgaggggcggacggtgactggcgtcgtgaccggcaagccgctgtcgctgggcggttcgctcgggcggcaggatgcaaccgggcggggcgtttttgtcactgcccgcgaggcagcacgcaagctgaatctgccgattgagggagcgcgggtggctgtgcagggcttcggtaatgtcggcgaggctagtgcgcggatctttgcgcaggccggcgccaggatcgttgccgtgcaggatgtcagtgcgacgctttattgcgaagcgggtctggatatcgcggccttgaagcggtatttggcggaaaacaagacattgcttggcgcaccgggttgcgaagtgattgataacgcggctttctgggctgtgccttgcgacttcatggtgccggccgcactggagtcgcagatcaaccgctataacgccggccagattaccgcccgtattgtcgtcgaaggtgccaatggcccgaccacccctgaggccgatgtcatcctggccgagcgcggcatcaccgttgtgcccgacgtgctggccaatgccgggggcgtcacggtcagttacttcgagtgggtgcaggatttttccagcttcttctggagtgaggatgagatctaccagcgccttgaacggatcatgtccgaggccttcaatgcgatctggcaactggcagaggcccgccagatgtcgctccgttcggctgccttcgtgattggatgcactcgggtgctcgaagcccgggcgacgcgtggtttgtatccctga

SEQ ID NO: 57017 - protein, 427 aa, Dechloromonas aromatica RCB
MNAPLLPSYISAQNIGPWHIFLQQVEQVAPLLDKSLWPWVETLRRPKRSLIVDVPIRLDSGEVAHFEGYRVHHNTSRGPGKGGVRFHQDVTLSEVMALAGWMTIKNAVVNVPFGGAKGGVRVDPRQLSISELEGLTRRYTSEISSMIGPDKDIPAPDMNTNAQVMAWMMDTYSMGEGRTVTGVVTGKPLSLGGSLGRQDATGRGVFVTAREAARKLNLPIEGARVAVQGFGNVGEASARIFAQAGARIVAVQDVSATLYCEAGLDIAALKRYLAENKTLLGAPGCEVIDNAAFWAVPCDFMVPAALESQINRYNAGQITARIVVEGANGPTTPEADVILAERGITVVPDVLANAGGVTVSYFEWVQDFSSFFWSEDEIYQRLERIMSEAFNAIWQLAEARQMSLRSAAFVIGCTRVLEARATRGLYP

SEQ ID NO: 57018 - DNA, 1308 bp, Ralstonia eutropha JMP134
  CDS (1)..(1308): transl_table=11
atgtcctccgcagcaccgacccatactgctggccaaaagcacgcactgccgtcctacctcaacgccgacaacctcggcccctggggcatctacctgcaacaagtcgaccgtgtcacgccttacctgggctcgctggcacgctgggttgaaaccctcaagcgccccaagcgcgcgatgatcgtcgacgtacccatcgagctcgataacggcaccatcgcccactacgagggctaccgcgtgcagcacaacctgtcgcgcggcccggggaagggcggcgtgcgcttccaccaggacgtgacgctgtcggaagtcatggcgctgtcggcatggatgtcggtgaagaacgccgcggtgaacgtgccctacggcggtgccaagggtggcatccgcgtggacccgcgcaccctgtcgcacgccgagctggaacgcctcacgcgccgctacaccagcgaaatcaacatcatcatcgggccgagcaaggacatcccggcgccggacgtcaacaccaatgcccaggtgatggcgtggatgatggacacgtattcgatgaactccggcagcaccgcgaccggtgtcgtgaccggcaagccgatctcgctgggcggctcgctgggccgccatgaggcgaccggccgcggcgtgttcgtggtgggttccgaggccgcgcgcaatatcggcctggagatcaagggtgcccgcgtggccgtgcagggcttcggcaacgtcggcgccgtggccgcgaaactgttccaggaggcgggcgccaaggtggtggccgtgcaggaccatcgcgtctcgctgtacaacccggccggcctggacgtgccggcaatgatggaatacgcctcgcacagcggcaccgtcgacggcttccaggcggaaaccatttcgtcggagcagttctggcaggtggactgcgacatcctgatcccggccgcgctggaaggccagatcaccgcgaagaatgcgccccagatcaaggcacgcctggtcatcgaaggtgcaaacggcccgaccacgcccgaggccgatgacatcctgcgcgagcgcaatatcctcgtggcgccggacgtgatcgccaacgccggcggcgtgaccgtgtcgtatttcgagtgggtgcaggatttttccagcttcttctggaccgaagaggaaatcaacgaacgcctggtacggatcatgcaagaggcgttccgcgctatctggcaggtcgcgcaggacaacaaggtaacgctgcgcacggccgcgtttatcgtggcctgtacgcgcatcctgcaggcgcgcgaaatgcgaggcctgtacccctga

SEQ ID NO: 57019 - protein, 435 aa, Ralstonia eutropha JMP134
MSSAAPTHTAGQKHALPSYLNADNLGPWGIYLQQVDRVTPYLGSLARWVETLKRPKRAMIVDVPIELDNGTIAHYEGYRVQHNLSRGPGKGGVRFHQDVTLSEVMALSAWMSVKNAAVNVPYGGAKGGIRVDPRTLSHAELERLTRRYTSEINIIIGPSKDIPAPDVNTNAQVMAWMMDTYSMNSGSTATGVVTGKPISLGGSLGRHEATGRGVFVVGSEAARNIGLEIKGARVAVQGFGNVGAVAAKLFQEAGAKVVAVQDHRVSLYNPAGLDVPAMMEYASHSGTVDGFQAETISSEQFWQVDCDILIPAALEGQITAKNAPQIKARLVIEGANGPTTPEADDILRERNILVAPDVIANAGGVTVSYFEWVQDFSSFFWTEEEINERLVRIMQEAFRAIWQVAQDNKVTLRTAAFIVACTRILQAREMRGLYP

SEQ ID NO: 57020 - DNA, 1290 bp, Anabaena variabilis ATCC 29413
  CDS (1)..(1290): transl_table=11
atggtttcaatgcctaccctaccgttggaaggtgctagtccagcccatatttgtccatttgatcaagcttgtagctacttagaagcagctgcaaaagagttgaggttagatcaagggacgctggaaattctcagtcacccacgtaaagttgtgacagtctctattcctgtgagattagataacggcgatatccgggtactagcaggacaccgagtacagcattctgatatattaggcccctacaaaggcggaacacgttaccatccagctgtgacattgagagaagtatctgctctggcaatgctaatgacttggaaatgtgcgctactgggtattccttatggtggtgcgaagggaggtattgctataaatccccaacactacagcgtaggtgaattagagaaaattacgcgtcgttatacaagcgaattgattaaagatatcggccctgccgtagatataccagcgccagatgtgggaacttctgcccgtgagatggcttggatgatggatacttactctgtgaatgttggtcacgcagtcccaggggttgtcacaggtaagccaatttccattggtggttcacggggaagagaaatggcaactggacggggtgtaatgattattgtccgtgaagcactggcggatatgggcagaactttagagggagtaaaagtagttattcaaggttttggcaatgtaggcggtgctgcggctgaattgctgtaccaagctggagccaaaattcttgctgtttctacaggtgcaggaggtttatttgcggctgatggtctcgatattccagcgttaaaagcctacgctgcggaaaatcatcgaagtattgtgggttttccccaagcagtagcaattagtaatgcagagttgctaactttaccttgcgatgttttgattcccgcagctttagaaaaccaaatcactgaagaaaatgtagaccagatacaggcgcaaattgtcgcggaagctgctaatggcccggtaactttggaggctaaccgagttctagaggggcggggtgtgactgtactgccagacatcttggcgaatgctgggggcgtggtggtgagttatttagagtgggtacaaggtctttcctacctgttttgggatgaggagcgtgtcaaccgggaaatggaacacttgatggtgcaagcttatcatcaagtgattaaacagtcgcagatgcggcaagttcctttgcgattagccgcttataccttgggtgtaggtagggttgctcaagcgttgagcgatcgcggtctttatccttga

SEQ ID NO: 57021 - protein, 429 aa, Anabaena variabilis ATCC 29413
MVSMPTLPLEGASPAHICPFDQACSYLEAAAKELRLDQGTLEILSHPRKVVTVSIPVRLDNGDIRVLAGHRVQHSDILGPYKGGTRYHPAVTLREVSALAMLMTWKCALLGIPYGGAKGGIAINPQHYSVGELEKITRRYTSELIKDIGPAVDIPAPDVGTSAREMAWMMDTYSVNVGHAVPGVVTGKPISIGGSRGREMATGRGVMIIVREALADMGRTLEGVKVVIQGFGNVGGAAAELLYQAGAKILAVSTGAGGLFAADGLDIPALKAYAAENHRSIVGFPQAVAISNAELLTLPCDVLIPAALENQITEENVDQIQAQIVAEAANGPVTLEANRVLEGRGVTVLPDILANAGGVVVSYLEWVQGLSYLFWDEERVNREMEHLMVQAYHQVIKQSQMRQVPLRLAAYTLGVGRVAQALSDRGLYP

SEQ ID NO: 57022 - DNA, 1428 bp, Rhodobacter sphaeroides 2.4.1
  CDS (1)..(1428): transl_table=11
atgcaagccgcagaacccagtttccgcgaatccgtcgatctgatgttcaaccgcgccgtggcgctgatggacctctcgccgggcctcgaggagaagatccgggtctgcaactccacctataccgtgcgcttcggggtgcggctgcggggcaagatcttcaccttcaccggctaccgctcggtccattccgaacatatggagccggtgaagggcgggatccgctatgccctgtcggtgagccaggacgaggtcgaggcgctggctgcgctcatgacctacaaatgcgcgctggtcgagacgcccttcggcggttcgaagggcgggctctgcatcgatccgcgcgaatgggacgagcatgagctggagcagatcacccggcgcttcgcctacgagctggccaagcgcgacctgatccatccggcgcagaacgtgcccgcccccgacatgggcacgggcgagcgcgagatggcctggatcgccgaccaatatgcgcgaatgaacacggccgacatcaacgcgcgcgcctgcgtgaccggcaagccgatcaatgcgggcggcatccacggccgggtcgaggccacggggcgcggcgtgcagtttgcgctgcgcgaattcttccgccatgccgaggacaaggcgcgcgcggggctctcgggcgatctcgacggcaagcggatcatcgtgcagggcctgggcaatgtgggctatcacgcggcgaagttcctgaccgaggaggatggcgccaaggtcacgggcgtgatcgagcgcgacggggcgctggtcaatccggccgggatcccggtcgaggagctgcgccactggatgatgaagaccggctcgatccgcggcttctcgcaggccgacttcgtcgaggacgggcgcaagctgctcgaagaggagtgcgacattctcatccccgccgcgatggagggtgtcatcacccgggagaatgcggcgcggatcaaggcgccgctcatcatcgaggcggcgaacggcccgatcaccttcggcgcggacgagatcctgcgccagaaggggacggtcatcgtgcccgatctctatgccaatgcgggcggcgtcacggtctcctatttcgaatgggtgaagaacctcagccacatccgcttcggccggatgcagcggcgggccgaggaggcgcgctcgcgcgcgctggtcgaggagctcgagcggctttcggcggatcaggggctgggctggcagctcgcgcccgacttcaagcagaagttcatgcaggggtcggacgagctggcgctggtgcgctcgggcctcgatgacacgatgcgcatcgcctatcagtcgatgcgcgaggtctggcacggggcggaaggcgcgcaggatctgcgcgtggcggcctatatcgtggcgatccgccgggtggcggccacctaccgctcgaaggggctctga

SEQ ID NO: 57023 - protein, 475 aa, Rhodobacter sphaeroides 2.4.1
MQAAEPSFRESVDLMFNRAVALMDLSPGLEEKIRVCNSTYTVRFGVRLRGKIFTFTGYRSVHSEHMEPVKGGIRYALSVSQDEVEALAALMTYKCALVETPFGGSKGGLCIDPREWDEHELEQITRRFAYELAKRDLIHPAQNVPAPDMGTGEREMAWIADQYARMNTADINARACVTGKPINAGGIHGRVEATGRGVQFALREFFRHAEDKARAGLSGDLDGKRIIVQGLGNVGYHAAKFLTEEDGAKVTGVIERDGALVNPAGIPVEELRHWMMKTGSIRGFSQADFVEDGRKLLEEECDILIPAAMEGVITRENAARIKAPLIIEAANGPITFGADEILRQKGTVIVPDLYANAGGVTVSYFEWVKNLSHIRFGRMQRRAEEARSRALVEELERLSADQGLGWQLAPDFKQKFMQGSDELALVRSGLDDTMRIAYQSMREVWHGAEGAQDLRVAAYIVAIRRVAATYRSKGL

SEQ ID NO: 57024 - DNA, 1287 bp, Syntrophus aciditrophicus SB
  CDS (1)..(1287): transl_table=11
atggaagacaaatcttataacccgtttgtacatgcccaggcgcaatttgacaaggtagctgcgattatcggtctcgatgaggcaacccgcgatttgctgagacagcccatgagggaacaccatgtactcattcccgtgcgcatggacgatgggactacaaagatattcaagggattccgtgtcatgcacaacgacgcgagaggaccggcgaaaggaggcattcgttttcaccctcaggaaactgcagataccgtccgcgcccttgcaatgtggatgacctggaagtgcgcggtggttaatatccctctcggcggaggcaagggaggcgttatatgcgacccccataacctgaccgaaaccgagcaggaacggttgtgcaggggatggataaggaatctcgcgaaagaaatgggaccatgcattgacgtgccggcccccgatgtcatgacgaacgcaaagcatatgttatggatgctcgatgagtttgaagccattcacgggggtaaatatcccgggtttataaccggaaagccgatagaaatgggtggttcgctgggaaggacggaagccaccggatttggaaccatctatgtattgcgggaagcgctgaaagacctcggaatcaaaccggaaaacacgagcatcagcatccagggcttcggtaacgtatcgcagttcgcagccagaaagttcagtgagctcggaggaaaaatcgccgcagtttcctgctgggacaatgcggataaaacctctcacacctatttcaaaaaagacggtctggatgtggatatgcttgcgtctattaccaataccttcggatgcatcaataaggaaaaggctgttgccgcaggttatgaaattctacccggtgatgcatgggttgaacaggatgtcgacattctcatgcctgccgcactggaaaaccagattacgtcggcgaacgtgaaccggataagcgaaaaggtcaaagtcctccttgaaggcgccaacgggccaaccgctcctgaggcggacgaagtgataagggcgcgcggcatttttcttctccccgattttcttgcaaatgccggcggtgtcacatgcagctatttcgagcaagtgcagtcaaacatgaactactactgggaaaaagatgaagtactggagaggctcgatgcaaaaatgacatcggcttaccgggctgttcaggatcttgcgcggagcaaaggcctgtatatgcgggacgccgcctatgtcatagctatcaaccgggtggcccaggctgtcaagatgaggggctgggtatag

SEQ ID NO: 57025 - protein, 428 aa, Syntrophus aciditrophicus SB
MEDKSYNPFVHAQAQFDKVAAIIGLDEATRDLLRQPMREHHVLIPVRMDDGTTKIFKGFRVMHNDARGPAKGGIRFHPQETADTVRALAMWMTWKCAVVNIPLGGGKGGVICDPHNLTETEQERLCRGWIRNLAKEMGPCIDVPAPDVMTNAKHMLWMLDEFEAIHGGKYPGFITGKPIEMGGSLGRTEATGFGTIYVLREALKDLGIKPENTSISIQGFGNVSQFAARKFSELGGKIAAVSCWDNADKTSHTYFKKDGLDVDMLASITNTFGCINKEKAVAAGYEILPGDAWVEQDVDILMPAALENQITSANVNRISEKVKVLLEGANGPTAPEADEVIRARGIFLLPDFLANAGGVTCSYFEQVQSNMNYYWEKDEVLERLDAKMTSAYRAVQDLARSKGLYMRDAAYVIAINRVAQAVKMRGWV

SEQ ID NO: 57026 - DNA, 1356 bp, Novosphingobium aromaticivorans DSM 12444
  CDS (1)..(1356): transl_table=11
gtggccgtttccgatcatgtcgacctgccgacgttcatggagggcgtgaagaagcgcaatccctatcagcccgaattcgtccaggctgtgcaggaggttgccgaggacatcttcgacttcatcgaggacaaggaggaataccacgcccagcagatcctgcgccgcatcgcggagccggaccgggtcgtgtcgttccgggtgtgctgggaggatgacaatggcaacgtccgtgtccagcgcggttggcgcgtgcagaacaacaatgccatcggcccctacaagggcggcatccgctttcatccctcggtcaatgagtccgtcctgaagttcctcgctttcgagcagaccttcaagaacgcgctgacgggcttgcccatggggggtggcaagggcggttcgaacttcaaccccaagggcaagagcgtgcgcgagatcatgcgcttctgccagtcgttcatgaccgagctctatcgccacatcggcgccgacgtcgacgttccggcgggcgatatcggtgttggcgggcgcgagatcggctacatgttcggtcagtacaagcgcatcaccaaccacttcaccggcgtgctgacgggcaagggtctcgaatggggtggctcgcttatccgtaccgaggcgaccggttacggcgcggtctatttcctcgccaacatgctggcgaccaagggtgaggaccttcgtggcaagacggcggtgatctccggttcgggcaacgtcgcgacgcatgccgccgagaagatcgtccagttgggcggaaaggttctgacgctgtccgattccggcgggttcatccatgaccccgacggcatcgaccaggagaagatcgactgggtgaagacccacaagactcatcgtcgcgggcgcatcgaggaatacgtcgatgcctttccaggagcgtcgttccatgcaggcaagacgccgtggggcgtgccctgcgatgtcgcgctgccctgcgccacgcagaacgaactgctgggcgaggatgcgcgcacgctcatcgccaacggctgcaagggcgtggccgaaggcgccaacatgccgaccgacctcgaaggcgtgcatgtgttcaaggctgccaggattctctacgcgccgggcaaggcatcgaacgcggggggcgtcgcggtttctggcctcgagatgagccagaactccgaacgtcgctcgtggaaggagcatgaactgcagcagatgttgaaggacatcatggccggcatccacaagtcctgcctgacgtacggcgaccagggcggcggctatatcgactacgtgaagggcgcgaacatcgccggcttcaagaaggttgccgatgccatgctggctttcggcgtggtctga

SEQ ID NO: 57027 - protein, 451 aa, Novosphingobium aromaticivorans DSM 12444
MAVSDHVDLPTFMEGVKKRNPYQPEFVQAVQEVAEDIFDFIEDKEEYHAQQILRRIAEPDRVVSFRVCWEDDNGNVRVQRGWRVQNNNAIGPYKGGIRFHPSVNESVLKFLAFEQTFKNALTGLPMGGGKGGSNFNPKGKSVREIMRFCQSFMTELYRHIGADVDVPAGDIGVGGREIGYMFGQYKRITNHFTGVLTGKGLEWGGSLIRTEATGYGAVYFLANMLATKGEDLRGKTAVISGSGNVATHAAEKIVQLGGKVLTLSDSGGFIHDPDGIDQEKIDWVKTHKTHRRGRIEEYVDAFPGASFHAGKTPWGVPCDVALPCATQNELLGEDARTLIANGCKGVAEGANMPTDLEGVHVFKAARILYAPGKASNAGGVAVSGLEMSQNSERRSWKEHELQQMLKDIMAGIHKSCLTYGDQGGGYIDYVKGANIAGFKKVADAMLAFGVV

SEQ ID NO: 57028 - DNA, 1350 bp, Francisella tularensis subsp. holarctica
  CDS (1)..(1350): transl_table=11
atgaatgctcagaagtacattgatagcgtaattgctcaagtagaaaaaagagatggtcatgaaaaagaattcatccaagctgtaaaagaagtattttctacacttaaaccagctctagaacataatcctaaatatatcgaagaaaatattctagcacgtatggttgagcctgaaagaggtatttcttttagagtaccatgggttgataaggatggtaatatccaagtaaaccgtggttacagatatcagtttaatggcgctatcggtccttttaaaggcgggattagattccacccaagtgtatactctggtattatcaaattcttaggcttcgagcaagttttcaaaaacagcttaactactctacctatgggtggtggtaaaggtggtgctgactttgaccctaaaggcaaaactgatgctgaaatcatgaacttctgccaaagctttatgatggaattacaacgtcatattggtccagatatcgatgtcccagctggtgatattggtgttggtggtaaagaaatcggctatatgtatggacaatacagaagaattcgtgcatgttttgagaatggtgtattaactggtaaatcgctagagtcaggcggtagcttaatccgtcctgaggctacaggttatggtgcagtattcttcttagatgaaatgctaaagcatgatggtgaaactttacagggtaaaactgtagtaacatctggttatggtaacgttgcttggggtgtatgtaagaaagttgctcaattaggcggtaaagttgttacaatatctggttcaaaaggttttgttcacgatcctgaaggtattacaactgatgagaaaattgaattcttattaaaaatccgtaacggtgaaaaaacaatgcaagactacgctaaagaattcaatgcaagctggcacgcaggtcaaaaaccttggggtataaaagcagatatcgctatccctgcagctactcaaaacgagatagattttgaagatgctcaaaaacttattgattctggtgttaagtatgttgttgaagcatctaacatgccaacaactaatgaagcaattgaattccttatgaagaaaggtataattctagctccaggtaaagctgctaacgctggtggtgttgcagtttctggtctagaaatgagccaaaactcagctagactatcttggtcagctgaagaagttgaatctaaacttcaacaaatcatggctaacattttccatgcttgtaagtttgctagtagtaaatacaaccttggctacaacctagttgctggtgcaaacttagctggttttgaaaaagtagcagaagctatgattcaacaaggtagatactaa

SEQ ID NO: 57029 - protein, 449 aa, Francisella tularensis subsp. holarctica
MNAQKYIDSVIAQVEKRDGHEKEFIQAVKEVFSTLKPALEHNPKYIEENILARMVEPERGISFRVPWVDKDGNIQVNRGYRYQFNGAIGPFKGGIRFHPSVYSGIIKFLGFEQVFKNSLTTLPMGGGKGGADFDPKGKTDAEIMNFCQSFMMELQRHIGPDIDVPAGDIGVGGKEIGYMYGQYRRIRACFENGVLTGKSLESGGSLIRPEATGYGAVFFLDEMLKHDGETLQGKTVVTSGYGNVAWGVCKKVAQLGGKVVTISGSKGFVHDPEGITTDEKIEFLLKIRNGEKTMQDYAKEFNASWHAGQKPWGIKADIAIPAATQNEIDFEDAQKLIDSGVKYVVEASNMPTTNEAIEFLMKKGIILAPGKAANAGGVAVSGLEMSQNSARLSWSAEEVESKLQQIMANIFHACKFASSKYNLGYNLVAGANLAGFEKVAEAMIQQGRY

SEQ ID NO: 57030 - DNA, 1323 bp, Burkholderia xenovorans LB400
  CDS (1)..(1323): transl_table=11
atgtcatcccagcaacaggcagcacaactcgcacaatccgcagcaacgttgcactcggttccttcctacctgaataaagacgacctcggcccgtggggcaactacctgcgtcaggtcgatcgcgtcgcgccgtacctcggctccctgtcccgctggctcgaaaccctgaagcgcccgaagcgcattctgatcgtcgacgtgcctatcgaactcgataacggcacggtcgctcacttcgaaggctatcgcgtgcagcacaacgtatcgcgcggtccgggcaagggcggtgtgcgttatcaccaggacgtgacgttgtcggaagtgatggcgctgtcggcgtggatgtcggtgaagaatgctgcggtgaacgtcccgtacggcggcgcgaagggcggcatccgtgtcgatccgcgcaccttgtcgcgtggtgagttggagcgtgtgacgcgccgctataccagcgaaatcggcatcatcatcggaccgaataccgacattcccgcgccggacgtgaacacgaacgagcagatcatggcgtggatgatggacacctactcgatgaaccagggccaaacggccacgggcgtcgtgacgggcaagccgatcacgctgggcggctcgctcggccgccgcgaggcaaccggccgcggcgtgttcgtggtggcgtcggaagccgcacgccgtatcggcgtggacatcgaaggcgcgcgcatcgcggtgcagggtttcggcaacgtgggcgggatcgcggcgcgtctgttccaggaagcgggttcgaagctggtcgcggtgcaggatcacaccggctcgctgtacaagtccacgggtatcgacgcggttgcattgctcgagcacgtcgcaaaacacggcggcgtgggcggcttcccggaagcggatgccgtgagcaatgaagaattctggacggtcgaatcggacatcctgattccggccgcgctggaaaaccagatcaccgaaaagaacgcggcgaagatcaggacgaagatcgtcgtggaaggcgccaacggcccgaccactacggcggcggacgacatcctgcacgatcgcggcattctcgtgattccggacgtggtggccaacgccggcggcgtgaccgtgtcgtacttcgaatgggtgcaggacttctcgagcttcttctggacggaagacgagatcaaccagcgtctggagcgtgtgatgcgcgaagcgttcgccgcggtgtggcaggtttcgagcgagcagaaggtgtccgtgcggaccgcggcgtttatcgtcgcgtgtaagcggattctggaagcgcgcgaactgcgcggcctgtatccctga

SEQ ID NO: 57031 - protein, 440 aa, Burkholderia xenovorans LB400
MSSQQQAAQLAQSAATLHSVPSYLNKDDLGPWGNYLRQVDRVAPYLGSLSRWLETLKRPKRILIVDVPIELDNGTVAHFEGYRVQHNVSRGPGKGGVRYHQDVTLSEVMALSAWMSVKNAAVNVPYGGAKGGIRVDPRTLSRGELERVTRRYTSEIGIIIGPNTDIPAPDVNTNEQIMAWMMDTYSMNQGQTATGVVTGKPITLGGSLGRREATGRGVFVVASEAARRIGVDIEGARIAVQGFGNVGGIAARLFQEAGSKLVAVQDHTGSLYKSTGIDAVALLEHVAKHGGVGGFPEADAVSNEEFWTVESDILIPAALENQITEKNAAKIRTKIVVEGANGPTTTAADDILHDRGILVIPDVVANAGGVTVSYFEWVQDFSSFFWTEDEINQRLERVMREAFAAVWQVSSEQKVSVRTAAFIVACKRILEARELRGLYP

SEQ ID NO: 57032 - DNA, 1251 bp, Methanococcoides burtonii DSM 6242
  CDS (1)..(1251): transl_table=11
atggcagaacaaaacccatttgagaatgcaagaaagcagttacagaagtgcgcagatatccttgagctcgatgagggcattcatgatatcctgaagaacccaatgagggaaatgcatgtgtcccttcctatccgcatggatgatggaagcatcaaggtcttccagggattcagggtacagtacaatgatgcaaaaggtccaacaaaaggtggtatccgcttccacccagacgagaccgttgacactgtcaaggcacttgcagcatggatgacatggaaatgtgcagttatggacatccccctcggtggaggtaagggtggagttatctgcaaccctaaggaaatgtcccagagtgaacttgagcgcctttcaaggaagtacatttcaagtatctcaatgatcgtaggtcctgacaaggacgtacctgctcctgatgtctacaccaacccacagatgatggcatggatgatggacgagttctccaagttcgctggcaagaaccagtttggtgtcatcactggtaagccactcagcgttggtggttccctcggtcgtggcgatgctacagcacgtggcggtctttacgcagtccgtgaagcagcagcagagatcggccttgaacttaaggacgcaactgtcgcaattcagggatacggtaatgcaggttattttgctggaactctctgtgaagagctcttcggatgcaaggtcgtcgctgtaagtgacagccgcggcggtgctgtcaacatgaacggtatcagcgcagaagcagcacaggagcacaagaaggcaaccggttcagttgttggtctcgcaggcacagagcctatctccaacgaagacatccttgagcttgatgtcgatatacttatcccggcagctcttgagcacgtcatcacacacgagaatgcagacaatatcaaagcaaagatcgttgcagaacttgcaaatggtccaactactccggaagcagatgagatgctcttccagaaaggcgtacacctcattcctgacttcctctgtaatggtggcggtgtgacagtatcttacttcgagatggtacagaacttctacatgtaccgctggagcatagagagggtccacaacagacttgacgcaaagatgaccaacgcataccacgctgttctcgaagcgtccaagcagtataatgtcaacatgagaactgcagcatatgtcgtagctgtcaaccgtgtagttgaagcaatggcagaccgcggatggttatactaa

SEQ ID NO: 57033 - protein, 416 aa, Methanococcoides burtonii DSM 6242
MAEQNPFENARKQLQKCADILELDEGIHDILKNPMREMHVSLPIRMDDGSIKVFQGFRVQYNDAKGPTKGGIRFHPDETVDTVKALAAWMTWKCAVMDIPLGGGKGGVICNPKEMSQSELERLSRKYISSISMIVGPDKDVPAPDVYTNPQMMAWMMDEFSKFAGKNQFGVITGKPLSVGGSLGRGDATARGGLYAVREAAAEIGLELKDATVAIQGYGNAGYFAGTLCEELFGCKVVAVSDSRGGAVNMNGISAEAAQEHKKATGSVVGLAGTEPISNEDILELDVDILIPAALEHVITHENADNIKAKIVAELANGPTTPEADEMLFQKGVHLIPDFLCNGGGVTVSYFEMVQNFYMYRWSIERVHNRLDAKMTNAYHAVLEASKQYNVNMRTAAYVVAVNRVVEAMADRGWLY

SEQ ID NO: 57034 - DNA, 1308 bp, Ralstonia metallidurans CH34
  CDS (1)..(1308): transl_table=11
atgtcttccgcagcaccgacgcaaaacgtctccaatggtcataccctgccttcgtacctgaacgccgacaacctcggcccgtgggggatctacctgcagcaagtcgaccgtgtcacgccctacctgggctcgctggcacgctgggtggaaaccctgaagcgcccgaagcgcgcgatgatcgtcgacgtacccatcgaactcgacaacggcacgatcgcccacttcgagggctatcgcgtgcagcacaacctgtcgcgcggcccgggcaagggcggcgtccgcttccaccaggacgtgacgttgtccgaggtgatggcgctgtcggcctggatgtcggtcaagaatgcggccgtgaacgtgccgtacggcggcgccaagggcggtatccgcgttgatccgcgcaccctgtcgcacggcgaactggaacgcctgacccgccggtacacgagcgaaatcaacatcatcatcggaccgagcaaggacattcccgccccggacgtgaacaccaacgcccaggtcatggcctggatgatggatacctactcgatgaactcgggcagcacggccaccggcgtggtgaccggcaagccgatctcgctgggcggttcgctgggtcgtcatgaagccacgggccgcggtgtgttcgtcgtcggttccgaggcggcccgcaacctgggcatggacgtcaagggcgcgcgcgtggcggtgcagggcttcggcaacgtgggtgccgtggcagccaagctgttccatgaggcgggcgccacggtggtggcggtgcaggaccatcgcaccacgctgttcgacccggccggtctggacgtgccgaagatgatggagtacgcgtcgcacagcggcacgatcgaaggctaccgcgccgaggtcatctccaccgagcagttctgggaagtcgattgcgacatcctgatcccggccgcgctggaagggcaactgaccgccagcaatgcgccgaagatcaaggcgaagctggtgatcgagggcgccaacggcccgaccacgcccgaggccgacgatattcttcgcgagcgcaatatcctggtttgcccggacgtgatcgccaacgccggcggcgtgaccgtgtcctactttgaatgggtgcaggatttctcgagcttcttctggaccgaagaggagatcaacgagcgcctggtacggatcatgcaagaggccttccgggcaatctggcaggttgcccaggacaacaaggtcacgttgcggacggctgcgtttatcgttgcctgtacgcgtattctgcaggcgcgcgaaatgcgcggcctgtatccctga

SEQ ID NO: 57035 - protein, 435 aa, Ralstonia metallidurans CH34
MSSAAPTQNVSNGHTLPSYLNADNLGPWGIYLQQVDRVTPYLGSLARWVETLKRPKRAMIVDVPIELDNGTIAHFEGYRVQHNLSRGPGKGGVRFHQDVTLSEVMALSAWMSVKNAAVNVPYGGAKGGIRVDPRTLSHGELERLTRRYTSEINIIIGPSKDIPAPDVNTNAQVMAWMMDTYSMNSGSTATGVVTGKPISLGGSLGRHEATGRGVFVVGSEAARNLGMDVKGARVAVQGFGNVGAVAAKLFHEAGATVVAVQDHRTTLFDPAGLDVPKMMEYASHSGTIEGYRAEVISTEQFWEVDCDILIPAALEGQLTASNAPKIKAKLVIEGANGPTTPEADDILRERNILVCPDVIANAGGVTVSYFEWVQDFSSFFWTEEEINERLVRIMQEAFRAIWQVAQDNKVTLRTAAFIVACTRILQAREMRGLYP

SEQ ID NO: 57036 - DNA, 1269 bp, Acidobacteria bacterium Ellin345
  CDS (1)..(1269): transl_table=11
atgactaccgcagagcaattcgacaaagaactcaatccatgggaacagcaggcagcacgctttgatactgccaccacgaaactcaaactcgatgaaggcctgatcagcgttctgcgtgttcccgcccgcgaagttacggtcaacattccggtcagcatggacaccggcaagatccggatgttcaccggttaccgtgtccagcactcgttcgcgcgtggccccgcaaagggcggcgtccggttttcgccggaagtaagtctcgacgaagtgcgcgccctggcggcgtggatgacctggaaatgcgcagtcgtgaacattcccttcggcggcgccaagggcggcattatctgcgacccgaagacgatgtctatgggcgaactggagcgcatgacgcgccgctacaccgccgagttgatggagtttatcggtcctgaaaaggacgttccggcacccgacgtcaacaccaacgaacagacgatggcgtggatgatggacacctactccatgcacatgcgcatgacggtgaacgccgtcgttactggcaagccgctgaatatgggcggatcgcgcggacgtcgcgaggccaccggacgtggtgtgatgatcaccgccgaccaatgcctgaagaagttcaacatgtcgcgcgagagcacgcgggtgatcgtgcagggcttcggcaacgtcggttctaacgcggcgcagctgatgcaccaggccggttacaaagtcatcggcattggtgagtgggatggcggcctgcacaacgtgaacggaatcgatatcaatgcgctggtggattacaaggcgcacaacggatccattcacggtttcccgggcgcagagaaagcggcaaccgcggacctgatgattgccgattgcgatgtgctgattccggccgcgaccgagaacgtcatcaccacgaaaaacgccgaaaaggtgaaggcgaggatcatcgtggaaggcgcgaacggaccgactacgtccggggcggacgaaatcctgaacgacaagaaggtcttcgtaatgcctgacattcttgccaatgccggcggcgtgacggtgtcgtatttcgaatgggtgcaggaccgccaaggctacttctggaaggaatcggtggtcaacgagcagctcgagcacatcatggttagctctttcgaggatgtcgtgaatatgtccgagcagcacaatgtaccaaatcgcatcggtgcctacatgctggctattgacagagtggcatacactatccggcagcgcggaatttacgcgtag

SEQ ID NO: 57037 - protein, 422 aa, Acidobacteria bacterium Ellin345
MTTAEQFDKELNPWEQQAARFDTATTKLKLDEGLISVLRVPAREVTVNIPVSMDTGKIRMFTGYRVQHSFARGPAKGGVRFSPEVSLDEVRALAAWMTWKCAVVNIPFGGAKGGIICDPKTMSMGELERMTRRYTAELMEFIGPEKDVPAPDVNTNEQTMAWMMDTYSMHMRMTVNAVVTGKPLNMGGSRGRREATGRGVMITADQCLKKFNMSRESTRVIVQGFGNVGSNAAQLMHQAGYKVIGIGEWDGGLHNVNGIDINALVDYKAHNGSIHGFPGAEKAATADLMIADCDVLIPAATENVITTKNAEKVKARIIVEGANGPTTSGADEILNDKKVFVMPDILANAGGVTVSYFEWVQDRQGYFWKESVVNEQLEHIMVSSFEDVVNMSEQHNVPNRIGAYMLAIDRVAYTIRQRGIYA

SEQ ID NO: 57038 - DNA, 1230 bp, Myxococcus xanthus DK 1622
  CDS (1)..(1230): transl_table=11
atgagcgccgtcgagggtaccaactactacttccgcaaagccgcgcggatcatggacgtaggcacccccatcgaaacgctgctcgccacgccccttcgcgaggtgaaggtccaggtctccatcgagatggactccggagagattcgcaccttcctcggctaccggattcagcacgacaacagccgtggccccatgaagggcggcctgcgctaccacccgatgctggaccaggacgagtgcgcgtcgctcgcctcgctgatgacgtggaagacggccgtcgtgaatgtcccctatggcggcgccaagggcggcatcgcctgcgacccgtcccagctgagcatcaaggagctggagcgcctcacccggaagtacgtggaccaggtgcaggacgtcatcggccccacgcgcgacatcccggcccccgacgtcaacaccaacccccaggtgatggcgtggatcatggaccagtattcgcgctaccacggccactctcccgcggtggtgacgggcaagccgctggagctctacggctccaagggccgcgaggccgccaccggccgcgggctgctctacgtggcgcgtgaaatcctgcgcgacctgggcctgccggtgaagggcacgcgcttcgcgctccaaggcttcggcaacgtgggcggccacaccgcgcagctcctctgggaggacggcggcgtggtggtggccgtggcggacgcgctgggcggcgttcgcaacccgcagggcctggacatcccctccctcttcgagcacgtgaagcgcaccggcacggtgacgggcttcagcgggggcgcttcgtgcagcaacgatgacgtgctgggcgcggactgtgaggtcctcatccccgcggcgctgggccacgtgctcacccgggagaatgcccacgcggtgcgcgccaagctcatcatcgaaggcgccaacggccccacccagccggaggccgacgaaatcttcgagaagcgcggcatcttcgtggtgccagacgtgctcgccagcgcaggcggcgtgacggtgagctacttcgagtgggtgcagaacctccagcacctgtcgtgggaggaggaccgcgtcaacgcggagctggagaagtccatgaaggaggcctacgagcgcgtggcgcaggtggcgcgctcccggaaggtctccatgcggacggccgcgtacatcctggcgattggccgggtgggcaaggccaccgtgctgcgcggcatctga

SEQ ID NO: 57039 - protein, 409 aa, Myxococcus xanthus DK 1622
MSAVEGTNYYFRKAARIMDVGTPIETLLATPLREVKVQVSIEMDSGEIRTFLGYRIQHDNSRGPMKGGLRYHPMLDQDECASLASLMTWKTAVVNVPYGGAKGGIACDPSQLSIKELERLTRKYVDQVQDVIGPTRDIPAPDVNTNPQVMAWIMDQYSRYHGHSPAVVTGKPLELYGSKGREAATGRGLLYVAREILRDLGLPVKGTRFALQGFGNVGGHTAQLLWEDGGVVVAVADALGGVRNPQGLDIPSLFEHVKRTGTVTGFSGGASCSNDDVLGADCEVLIPAALGHVLTRENAHAVRAKLIIEGANGPTQPEADEIFEKRGIFVVPDVLASAGGVTVSYFEWVQNLQHLSWEEDRVNAELEKSMKEAYERVAQVARSRKVSMRTAAYILAIGRVGKATVLRGI

SEQ ID NO: 57040 - DNA, 1347 bp, Mycobacterium sp. MCS
  CDS (1)..(1347): transl_table=11
atgaacggactgcacgagaacctgcagggcatcttcgaagaggtggcgcggcgcaacccgggcgagacggagttccaccaggccgtctacgaggtgctccagagcctcggaccggtggtggccaaacaccccgagtacgccgacagcgcgatcatccgccggctgtgcgagccggagcgccagatcctgttccgcgtgccgtgggtcgacgacagcggcgcggtccagatgaaccgtgggttccgcgtcgagttcaactcggcgctgggcccgttcaagggcggcctgcggttccacccgtcggtgtacctcggcatcatcaaattcctcggcttcgagcagatcttcaagaactcgctgaccgggatgccgatcggcggcgccaagggcggttcggacttcgacccgaagggccgctcgaacggcgagatcatgcggttctgccagtcgttcatgaccgagctgtaccgccacatcggtgagtacaccgacgtgcccgccggtgacatcggcgtcggcatgcgcgagatcggttacctgttcggccagtacaagcgcatcaccaaccgctacgaatccggtgttctcaccggtaagggcatcacgtggggcgggtcgctggtacgcaccgaggccaccggctacggcaccgtctacttcatcgccgacatcctcaagtcgcgtggggagtcattcgagggcacacgtgccgtggtgtcgggttcgggcaacgtcgccatctacgcgatcgagaagatccagcacctcggcggcacggtcatcgcgtgttcggactccgacggctacgtggtcgaccccgacggcatcgacctcgcgctgctcaaggaggtcaaggaggtccagcgcggccgggtggcggactacgccgagatgcgctgcggccgagcacgtttcgtacacggcaacgtgtgggacgtggaatgcgacatcgcggtgcccagcgccacgcagaacgagatcaacggcgccgacgccgcggcactggtcaagggcggctgtcgcatcgtcgccgaaggcgcgaacatgccgtgcacgcccgaggcggtgaaactcttcgccgaagccggcaccgtcttcgcccccggtaaggccgtgaacgcaggcggggtggcgaccagcgcgctggagatgcagcagaacgcctcccgcgattcgtggaccttcgacgagaccgaggacaagctcgccgagatcatgggccgcatccacgaccgctgcctgcagaccgccgaggaatacggtcagcctggcaactacgtggccggtgccaacatcgccggcttcacccgggtggccgacgcgatgctggccctcggaatcatctga

SEQ ID NO: 57041 - protein, 448 aa, Mycobacterium sp. MCS
MNGLHENLQGIFEEVARRNPGETEFHQAVYEVLQSLGPVVAKHPEYADSAIIRRLCEPERQILFRVPWVDDSGAVQMNRGFRVEFNSALGPFKGGLRFHPSVYLGIIKFLGFEQIFKNSLTGMPIGGAKGGSDFDPKGRSNGEIMRFCQSFMTELYRHIGEYTDVPAGDIGVGMREIGYLFGQYKRITNRYESGVLTGKGITWGGSLVRTEATGYGTVYFIADILKSRGESFEGTRAVVSGSGNVAIYAIEKIQHLGGTVIACSDSDGYVVDPDGIDLALLKEVKEVQRGRVADYAEMRCGRARFVHGNVWDVECDIAVPSATQNEINGADAAALVKGGCRIVAEGANMPCTPEAVKLFAEAGTVFAPGKAVNAGGVATSALEMQQNASRDSWTFDETEDKLAEIMGRIHDRCLQTAEEYGQPGNYVAGANIAGFTRVADAMLALGII

SEQ ID NO: 57042 - DNA, 1287 bp, Trichodesmium erythraeum IMS101
  CDS (1)..(1287): transl_table=11
atgtcagattctttgtttgatgatgctagtcgtaggttagaaagggctttacaatatgtttctctttcagaagatacaaaagaacgtctcaaataccctaaagctaccttaatagtttctattcctgtccggatggatgatggctcattacgagtttttcaaggttatcgagttcgttatgatgatacaagaggacccacaaaaggtggcattcgttatcatcccaatgtgtctattgatgaagtaaagtctttggctttttggatgacttttaaatgtgctgttgtcagtttgccttttggaggggccaaaggtggcattactgttaatcctaaagaattatctcggatggaattggaacgtttgagtcgggggtatattgatgcgatcgctgattttatcggtcctgataccgatattcctgcaccggatatgtatactaaccccatgataatgggttggatgatggatgaatacagcattattcgcagacaactaagtccggcagttattacgggtaaacctgtgagcatcggtggtagtttgggaagaaatactgcaacggcaatgggtgctttttttgctattgaaactattatgccgaagtttgaatatactcctgaaaaaactacagtagcaatacaagggtttggtaatgccggggcgtttttagctgagttactatgtcttcatggttataaggttgttgctgttagtgattctcagggaggtatttattctgcacaaggtttagatattccaagtattcgtcaatataaggaagttaataaacagatacaagcagtttattgcaaggatagtgtttgcaatattgttgagcatacagttttgactaatgaagaacttttagctttggatgttgatattttaattcctgctgctttggagaatcaaattactgaggaaaatgtcaaagatattcaggcaaagtttatttttgaagctgctaatggtccgactacttctggtgcagataaaattttagaagaccgtggagtttatgtatttcctgatattttgataaatgctggtggtgtgactgtcagttattttgagtgggtacaaaatcgtagtggtttgtattggactttggatgaagttaatcaaaaattgaaagcaaaaatggtcgcagaaacagagaatatttggcaaatatctcaggagttatctatttctatgcgaactgctgcttatgtgcatggtttagatagattaggacaagcaattaatgctaaaggaactagagctttttatgccaaaaggtag

SEQ ID NO: 57043 - protein, 428 aa, Trichodesmium erythraeum IMS101
MSDSLFDDASRRLERALQYVSLSEDTKERLKYPKATLIVSIPVRMDDGSLRVFQGYRVRYDDTRGPTKGGIRYHPNVSIDEVKSLAFWMTFKCAVVSLPFGGAKGGITVNPKELSRMELERLSRGYIDAIADFIGPDTDIPAPDMYTNPMIMGWMMDEYSIIRRQLSPAVITGKPVSIGGSLGRNTATAMGAFFAIETIMPKFEYTPEKTTVAIQGFGNAGAFLAELLCLHGYKVVAVSDSQGGIYSAQGLDIPSIRQYKEVNKQIQAVYCKDSVCNIVEHTVLTNEELLALDVDILIPAALENQITEENVKDIQAKFIFEAANGPTTSGADKILEDRGVYVFPDILINAGGVTVSYFEWVQNRSGLYWTLDEVNQKLKAKMVAETENIWQISQELSISMRTAAYVHGLDRLGQAINAKGTRAFYAKR

SEQ ID NO: 57044 - DNA, 1263 bp, Solibacter usitatus Ellin6076
  CDS (1)..(1263): transl_table=11
atgttagcaaccgcaaccactccaatgaacgcgtacgacgtcgcgttggagaattttgacctggcggcaaacgcgctgggactagacgacagcatccgggccatgatcaagtacccggagcgcattctcagcgtgagcgtgccagtccggatggacaccgggaagattgtccgcttcgaaggctatcgcgtgcagcacagcacgatgcgtggtccggcgaagggcggaatccgcttccatccgaatgtcacgatggacgaggtgaaagcgctggccacgtggatgacgtggaagtgcgccgtggtcaacatcccttacggcggcggcaagggcggcgtgacctgtaacccgaaggaactgtcgatgggcgaactcgaacggatgacccgccggtacgcgagctcgatcctgccgatcatcgggccggagaaggacattccggcgccggacgtctacacgaccccgcagatcatggcgtggatcatggacacgtacagcatgaataaaggatatccggtgcacggcgtggtgacgggcaagccgctctccataggtggatcgctcggacgcaacgaagcgacggcgcgcggcgtgttttacaccacgatgagcagctgtgagcacctggggatccaactggccggatcgcgggtggtggtgcagggcttcgggaacgccggggcgatcgccgccgacttgttccacggcgctggcgctaaggtgctggcggtgagcgacacctcgggctgcatcttcaacaaaaacggcctgcatattccggcggtggtggcttacaaggcgcggacggggcgtctggaaggcttcccggaagcaacgcggattacgccggcggagttgttggcgctggaatgcgaaatcctcgtgccggcggcgctggagaacgcgatcacggaagagaatgcgcataccatccacgcgaagatcatcagcgaagcggccaacgggccggtgactccggaagcggaccgcattctcggatcgaagggcatcttcctgattccggacatcctttgcaatgcgggcggcgtgacggtcagttacttcgaatgggtgcaggacgagaaccacctgttctgggacgagcaggacgtgaacgcgaaactggagaagatcatgaagcgctccttcgcggacgtgctcaagatccacctggataagaaggtggatatgcgcctggcggcaaatatgctcggcgtgtcgcgcgttgcggaagcctgcaaggtccgggggctgtacccgtag

SEQ ID NO: 57045 - protein, 420 aa, Solibacter usitatus Ellin6076
MLATATTPMNAYDVALENFDLAANALGLDDSIRAMIKYPERILSVSVPVRMDTGKIVRFEGYRVQHSTMRGPAKGGIRFHPNVTMDEVKALATWMTWKCAVVNIPYGGGKGGVTCNPKELSMGELERMTRRYASSILPIIGPEKDIPAPDVYTTPQIMAWIMDTYSMNKGYPVHGVVTGKPLSIGGSLGRNEATARGVFYTTMSSCEHLGIQLAGSRVVVQGFGNAGAIAADLFHGAGAKVLAVSDTSGCIFNKNGLHIPAVVAYKARTGRLEGFPEATRITPAELLALECEILVPAALENAITEENAHTIHAKIISEAANGPVTPEADRILGSKGIFLIPDILCNAGGVTVSYFEWVQDENHLFWDEQDVNAKLEKIMKRSFADVLKIHLDKKVDMRLAANMLGVSRVAEACKVRGLYP

SEQ ID NO: 57046 - DNA, 1305 bp, Solibacter usitatus Ellin6076
  CDS (1)..(1305): transl_table=11
atgagcttcggaggctcgagagtggccacgtcgacattgcctgtttccatttccctcgaaaacgaaaagaacccctggctcgccgccgccgcgcgctttgaagaagccgcgaagcggctcaagctggacgacggtatgcgtaaagtgctcggcaccccgtccaaggaactcaccgttcacatccccgtgcagctcgatgacggccggatcgaagtcttcaccggataccgcgttcagcattccgtcgctcgcggcccggccaagggcggtatccgcttcgcgccggacgtcacgctcgatgaagtccgcgccctcgcctcctggatgacctggaagtgcgccgtcgtcaacatccccttcggcggcggcaaaggcggcgtcatctgcgatccgcacatcctctccgataccgagctcgaaaaactcacccgccggtacaccgccgagatcatcgatttcataggaccggagcgcgacgtgcccgccccggatgtcaacaccaacgaaaaggtcatggcatggatgatggacacctattccatgcacgcgcgccacacggtcaccgccatagtcaccggaaaacccatggcgctcggcgggtcccgcggccgtcccgaagctaccggacgcggctgcatgatggtcacccagcgcgctctgaaccgcatgggcaaacgccccgaagatacctccgtcgtcattcagggcttcggcaatgtcggcggcatggcggccaaactgatgagcgccgtcggcttcaagatcatcgctattgtcgagtatgatggcgccgcctacaatcccaatggcctcgatatcgccgcgctccagcttcatcggaaggagacgggttccatcacgggcttctccggcggcgaagatatggataagaccgaggccatgttcctcgaatgcgacgtcctcatccctgccgccaccgagaacgtcatcacctcccagaacgcgcaccgcgtgcgctgcaggatcctctgcgaaggcgccaacggtcccactactccgctggccgacgatattctcgccgagaagaaggtcttcgtgatccccgacatcctcgccaacgccggtggcgtcaccgtctcctacttcgagtgggtgcaggaccgccagggcttcttctggaacgaacagctcgtcaacgaacgcctccaggagatcatggacgaaagcttcgacgccatcgtcgcctatgctgaggcccaccaggttaacaatcgcatcgccgcctacatggtcgccctcgatcgcgttgcccaggccatcaaactccgcggcatctacgcatag

SEQ ID NO: 57047 - protein, 434 aa, Solibacter usitatus Ellin6076
MSFGGSRVATSTLPVSISLENEKNPWLAAAARFEEAAKRLKLDDGMRKVLGTPSKELTVHIPVQLDDGRIEVFTGYRVQHSVARGPAKGGIRFAPDVTLDEVRALASWMTWKCAVVNIPFGGGKGGVICDPHILSDTELEKLTRRYTAEIIDFIGPERDVPAPDVNTNEKVMAWMMDTYSMHARHTVTAIVTGKPMALGGSRGRPEATGRGCMMVTQRALNRMGKRPEDTSVVIQGFGNVGGMAAKLMSAVGFKIIAIVEYDGAAYNPNGLDIAALQLHRKETGSITGFSGGEDMDKTEAMFLECDVLIPAATENVITSQNAHRVRCRILCEGANGPTTPLADDILAEKKVFVIPDILANAGGVTVSYFEWVQDRQGFFWNEQLVNERLQEIMDESFDAIVAYAEAHQVNNRIAAYMVALDRVAQAIKLRGIYA

SEQ ID NO: 57048 - DNA, 1266 bp, Neisseria meningitidis FAM18
  CDS (1)..(1266): transl_table=11
atgtctgaagcccttgcaaaagaaaccctcaatccgtttgaaatcgcgcgcaaacaggtcaaaaccgcctgcgaccggctgaaaaccgatccggccgtttatgaaatcctgaagagtccgacccgcgtgttggaagtcaatttccccgtcaaactcgacgacggcacggtcaaaaccttcacgggctaccgttcgcaacacaacaacgccgtcggcccctataaaggcggcgtgcgcttccatcccggagtgaatctggacgaagtcaaagccctgtcgatttggatgaccatcaaatgctgcgttgcgggtattccttacggcggcggcaaaggcggcgttaccttgaatccgcgcgattattccgaggcggaactggaacgcatcgcccgcgcttattccgaagccatttctccgctgatcggcgagaaaatcgatattcccgcacctgatgtgaacaccaacggcaaaatcatgtcttggatggttgatgcctatgaaaacgtggtgaaacattctgcaccgggcgtatttaccggtaaaccggttgagttcggcggctctttggcgcgtaccgaggctaccggttacggcgtgaacctcgccgccgtccaagccttggaaaaactgggcaaagacgtgaagggtgccacttacgccatccaaggcttcggtaatgtcggttaccacacaggttattacgcgcatcaatccggcgcgaaagttgttgcggtttctactgttgacgttgccatttacaacgaaaacggcttggatatggaagcaatcatcaaagaattccaaaccaaaggtttcatcaccaatgaagccggctacggcaaggaaattaccaacgccgaacttttggctctggaagtggacgtacttgccccttgcgcactggaaaaccaactgacttctgaaaatgccggtaaagtccgcgcgacaatcgtggtcgaaggcgcgaacggcccgactacgcccgaagccgacgttatcctgcgtcaaaacggcgtattggtcgtgcccgatattttggcgaactgcggcggcgtggtggtatcttattttgaatgggtacaaaatctgcaaggctattattgggagtttgacgaagttcaggaaaaagaaaccgtcgtcctgcgccgtgcgttccgcgatatatggaacttggcgcaagagtatgatgtcgatttgcgaaccgcgtcttacatgatgagtatccgccgtgttgaaaaagcgatgaaactgcgcggttggtattga

SEQ ID NO: 57049 - protein, 421 aa, Neisseria meningitidis FAM18
MSEALAKETLNPFEIARKQVKTACDRLKTDPAVYEILKSPTRVLEVNFPVKLDDGTVKTFTGYRSQHNNAVGPYKGGVRFHPGVNLDEVKALSIWMTIKCCVAGIPYGGGKGGVTLNPRDYSEAELERIARAYSEAISPLIGEKIDIPAPDVNTNGKIMSWMVDAYENVVKHSAPGVFTGKPVEFGGSLARTEATGYGVNLAAVQALEKLGKDVKGATYAIQGFGNVGYHTGYYAHQSGAKVVAVSTVDVAIYNENGLDMEAIIKEFQTKGFITNEAGYGKEITNAELLALEVDVLAPCALENQLTSENAGKVRATIVVEGANGPTTPEADVILRQNGVLVVPDILANCGGVVVSYFEWVQNLQGYYWEFDEVQEKETVVLRRAFRDIWNLAQEYDVDLRTASYMMSIRRVEKAMKLRGWY

SEQ ID NO: 57050 - DNA, 1305 bp, Acidovorax sp. JS42
  CDS (1)..(1305): transl_table=11
atgtccaacacccccaacccaccccttcccacccacgcgctgccgtcctatctggaccccaaccacctcggcccctggggggtgtatctgcagcaaatcgaccgcgtcaccccttacctgggcagcctggcgcgctgggtggagacgctgaagcgccccaagcgtgcgctgatcgtggatgtgcccattgagctggacaacggcaccatcgcccacttcgagggctaccgcgtgcagcacaacgtcagccgaggcccgggcaagggcggtgtgcgctttcaccaggacgtgaccctgtccgaagtcatggccctgtcggcctggatgagcatcaagaacgcggccgtgaacgtgccctacggtggcgccaagggcggcatccgcgtcgaccccaagaccctgtcgaaggccgagctggagcgcctgacgcgccgctacaccagcgagatcggcatcatcatcggcccctccaaggacattcccgcgccggacgtgaacaccaacgcccaggtcatggcctggatgatggacacctattccatgaacgtgggcaccaccgccaccggcgtggtcacgggcaagcccgtggacctgggtggctcgctgggccgcgtggaggccacgggccgcggcgtgttcaccgtgggcgtggaggccgcgcgcctgaccggcatggccatcgagggtgcgcgcgtggccgtgcagggctttggcaacgtgggtggcacggccggcaagctgtttgccgaggccggcgccaaggtggtggcggtgcaggaccacaccggcagcatccacaacgacaagggtctggacgtgccggcgctgctggcgcacgtgcagcgaaccggcggcgtgggcggattcgccggcgccgagcccatggccaacgacgccttctggggcgtggcctgcgacatcctgatccccgcagcgctggagagccagatcaccaaggacaacgcgggacggatccaggccaagatggtgatcgagggcgccaacggccccaccacccccgaggccgacgacatcctcaacgacaagggcgtactggtgctgcccgacgtgatctccaacgccggcggcgtgacggtcagctacttcgagtgggtgcaggacttctccagcttcttctggaccgaggacgagatcaacgcccgcctggtgcgcatcatgaaagaggccttcgcgggcgtgtggcaggtggcgcaggagaacaaggtcacgctgcgcacggcgaccttcatcgtggcctgcaagcgcatcctgcatgcacgcgagatgcgcggcctgtacccctga

SEQ ID NO: 57051 - protein, 434 aa, Acidovorax sp. JS42
MSNTPNPPLPTHALPSYLDPNHLGPWGVYLQQIDRVTPYLGSLARWVETLKRPKRALIVDVPIELDNGTIAHFEGYRVQHNVSRGPGKGGVRFHQDVTLSEVMALSAWMSIKNAAVNVPYGGAKGGIRVDPKTLSKAELERLTRRYTSEIGIIIGPSKDIPAPDVNTNAQVMAWMMDTYSMNVGTTATGVVTGKPVDLGGSLGRVEATGRGVFTVGVEAARLTGMAIEGARVAVQGFGNVGGTAGKLFAEAGAKVVAVQDHTGSIHNDKGLDVPALLAHVQRTGGVGGFAGAEPMANDAFWGVACDILIPAALESQITKDNAGRIQAKMVIEGANGPTTPEADDILNDKGVLVLPDVISNAGGVTVSYFEWVQDFSSFFWTEDEINARLVRIMKEAFAGVWQVAQENKVTLRTATFIVACKRILHAREMRGLYP

SEQ ID NO: 57052 - DNA, 1125 bp, Magnetospirillum magnetotacticum MS-1
  CDS (1)..(1125): transl_table=11
atgctcgcgaccccgcgccgcgaggtgaacgtggccgtgccgctgcggcgcgacgacggccgcaccgtcctgttccacggctaccgcgtgcagcacaacgtctcgcgcggtccgggcaagggcggcctgcggtacgcgccgagcgtcgacatcgacgaggtccgcgcgctcgccatgtggatgacgtggaagtgcgccctcgtggacctgccgtacggcggcgcgaagggcggcgtcgcgatcgacccgcgctcctactccgacgcggagctcgagcgcgtcacgcgccgctacacgtcggagatcatgccggtcatcgggcccgagcgggacatcatggcgcccgacatgggcacgagcgagcggaccatggcctgggtcatggacacctactccgtcaaccagggctacacgatcccagcggtcgtgacgggcaagcccatcaccgtgggcgggtcgctcggtcgcacgacggcgacgagcgccggggtcgtgcacgtcaccgccgcggcgctcgaggaggcgggcgtgccgctgtccgacgtgcgcgtcgccgtccagggcttcggcaaggtcgggtcgcacgcggccgcgatcttcgccgcccgcggcgcgcgcgtcgtggcggtctccgaccagtacggcggggtgcacgccccggacgggctcgacgtgcgggcgctggtcgagcacgtcgccgcgacggggagcgtcgtgggcttcgaccgggccgacccggtggacaacgacgcgctgctcgcgctcgacgtcgacgtgctcgtcccggccgcggtcgagggcgtgctcgacggcgacaccgcccgcaccgtgcgcgcgcgctgggtcgtcgagggcgccaacggcccgacgaccgccgagggcgaccgcgtgctcgcgaagaacggcgtgaccgtggtgccagacgtgctcgcgaacgcgggcggcgtcgtcgtctcctacttcgagtgggtccaggcgaaccaggcgtactggtggaccgcggacgagatcggcgacaagctcgagcaccgcatgctccacgcctacgaggaggtcgcggtctcgcgcgccgcgaggacctcagcctgcgcgacgcggcgctcgtcatcggcgtccagaacgtag

SEQ ID NO: 57053 - protein, 374 aa, Magnetospirillum magnetotacticum MS-1
MLATPRREVNVAVPLRRDDGRTVLFHGYRVQHNVSRGPGKGGLRYAPSVDIDEVRALAMWMTWKCALVDLPYGGAKGGVAIDPRSYSDAELERVTRRYTSEIMPVIGPERDIMAPDMGTSERTMAWVMDTYSVNQGYTIPAVVTGKPITVGGSLGRTTATSAGVVHVTAAALEEAGVPLSDVRVAVQGFGKVGSHAAAIFAARGARVVAVSDQYGGVHAPDGLDVRALVEHVAATGSVVGFDRADPVDNDALLALDVDVLVPAAVEGVLDGDTARTVRARWVVEGANGPTTAEGDRVLAKNGVTVVPDVLANAGGVVVSYFEWVQANQAYWWTADEIGDKLEHRMLHAYEEVAVSRAARTSACATRRSSSASRT

SEQ ID NO: 57054 - DNA, 1431 bp, Sulfitobacter sp. EE-36
  CDS (1)..(1431): transl_table=11
atgaaccccggaaccgaaccgagctttcgcgatagcgtcgacatcatgtttaaccgggcggtggccctgatggacctgtcgccgggtctggaagagaagattcgcgtgtgcaacgcgacctacacggtgcgtttcggcgtgcgcctgcgcggcggtatccagaccttcaccggctatcgctcggtccattccgaacacatggagccggtcaagggcggcatccgttacagccccggcgtgaaccagaacgaggtagaggcgctggcggcgttgatgacctataaatgcgcgctggtcgaagcgccgttcgggggctccaaaggcgggctgtgcattgatccgcgcgactatgacgaacacgagctggaactgatcacccgccgtttcgcatacgagctgatcaagcgcgatatgatcaaccccgcgcaaaacgttcccgcccccgacatgggcacgggcgagcgcgagatggcctggatcgcggatcagtacaagcgcatgaacaccacggatatcaacggggttgcctgtgtgacgggcaagccgatcaacgcgggcggcatccatggccgcaccgaagcgacaggccgcggcgtgcaatatgcgctgcacgctttcttccgcgacaccaaggggatggaaaaggctggtctgggcggtgagctggacggtaaacgcgtcgtggtgcagggcttgggcaatgtgggctaccacgccgccaagttcctgagcgaagaggatggctgcaagatcaccgcgatcattgaacgcgacggcgctttgttcgatgaccgtggtcttgacgtggaagaggtgcaccgctggatttccatgcatggtacgatcaagggctatcccgatgcgccccttgaagaagacggtgccaagctgctggaagcggactgtgacatcctgatccctgcggcgctggaaggggtgattaacctgaccaacgcgcataacatcaaggccccgctgatcgtcgaagccgccaacggccccgtaaccgccggtgccgatgatatcctgcgtgcaaaaggcgtcgtgatcatccctgacatgtatgccaacgccggcggtgtgacggtgtcctatttcgaatgggtcaagaacctgagccacattcgttttggccgtatgcagcgccgcaacgaggaaagccgccaccagctgttggtggacgagctggaacgtctgagcgccgatagcggcgtcggctggcagctaagcccgaacttcaaggataagtacctgcggggcgccggggagcttgagttggtccgctccggtctttacgacacaatgagcgacgcctaccggtcgatggcggaagtctggcacagccgcgacgatgtcgaagacctgcgcaccgccgcctatctggtcagcatcggcaaggtcgccgccagctaccgcgcaaaggggctgtaa

SEQ ID NO: 57055 - protein, 476 aa, Sulfitobacter sp. EE-36
MNPGTEPSFRDSVDIMFNRAVALMDLSPGLEEKIRVCNATYTVRFGVRLRGGIQTFTGYRSVHSEHMEPVKGGIRYSPGVNQNEVEALAALMTYKCALVEAPFGGSKGGLCIDPRDYDEHELELITRRFAYELIKRDMINPAQNVPAPDMGTGEREMAWIADQYKRMNTTDINGVACVTGKPINAGGIHGRTEATGRGVQYALHAFFRDTKGMEKAGLGGELDGKRVVVQGLGNVGYHAAKFLSEEDGCKITAIIERDGALFDDRGLDVEEVHRWISMHGTIKGYPDAPLEEDGAKLLEADCDILIPAALEGVINLTNAHNIKAPLIVEAANGPVTAGADDILRAKGVVIIPDMYANAGGVTVSYFEWVKNLSHIRFGRMQRRNEESRHQLLVDELERLSADSGVGWQLSPNFKDKYLRGAGELELVRSGLYDTMSDAYRSMAEVWHSRDDVEDLRTAAYLVSIGKVAASYRAKGL

SEQ ID NO: 57056 - DNA, 1386 bp, Roseovarius nubinhibens ISM
  CDS (1)..(1386): transl_table=11
atgttcaaccgcgcggtcgcgctgatggatcttccccccggtctcgaagagaaaatccgcgtctgtaacgccacctatacggtgcggttcggcgtgcggctgcggggccagatccacacgttcaccggctatcgcagcgtgcattcggaacatatggagcctgtgaagggcggcatccgctatgcgatgggcgtcaaccaggacgaggtcgaggcgctggcggcgctgatgacctataaatgtgcgctggtggaggcgccgttcggcggctccaagggcgggctgcgcatcgatccgcgcgaatgggacgaggatgagctggaacggatcacccggcgctttgcctatgagctgatcaagcgcgacctgatcaacccgagccagaacgtgccggcccccgacatgggcaccggcgagcgcgagatggcctggatcgcggatcagtacaagcggatgaacaccaccgacatcaacggccgcgcctgtgtcaccggcaagccgatcaatggcggcggtatccagggccggaccgaagcaaccgggcgcggcgtgcaatatgcgctgcaggagttcttccgccatcccgaggacatgaaggccgccggtctgagcggcacgctcgacggcaagaaggtcatcgtgcaggggctcggcaacgtgggctatcacgcggccaagttcctgtcggaggaggacggctgtatcatcaccggcatcatcgaacgtgatggggcgctggtctctgaagacgggctgcatgtggaagaggtgcgccactggatcgccaaacatggcggggtcaagggctatccggatgccgaatatgtcgaggatggcagcaaggttctggaaaacgcctgtgacatcctcgtgcctgcagcgctcgaaggggtgatccacatgggcaacgccgccaatattcaggcgccgctcatcatcgaggcggcgaacgggccggtgacggccggggccgatgagatcctgcgcaagaagggcgcggtgatcatccccgacatgtatgccaacgcgggcggtgtgacggtgagttacttcgaatgggtcaagaacctcagccatatccgctttggccggatgggccgccgtcaggaagaggcgcggcatcagctcatcgtggatgagctcgaacagctcagcgcggatcgcgggctgggctggaccctgacgccggggttcaagcagcagtatctgcgcggcgcgggcgagctcgagctggtgcgctcggggctcgatgacacgatgcgcgcagcctatcagtcgatgcgcgaagtctggcacggccggcaggatgtgaccgacctgcgcaccgccgcctatctcgtgtcgatcgacaaggtcgcggcgagctaccgcgcggcgggtctctga

SEQ ID NO: 57057 - protein, 461 aa, Roseovarius nubinhibens ISM
MFNRAVALMDLPPGLEEKIRVCNATYTVRFGVRLRGQIHTFTGYRSVHSEHMEPVKGGIRYAMGVNQDEVEALAALMTYKCALVEAPFGGSKGGLRIDPREWDEDELERITRRFAYELIKRDLINPSQNVPAPDMGTGEREMAWIADQYKRMNTTDINGRACVTGKPINGGGIQGRTEATGRGVQYALQEFFRHPEDMKAAGLSGTLDGKKVIVQGLGNVGYHAAKFLSEEDGCIITGIIERDGALVSEDGLHVEEVRHWIAKHGGVKGYPDAEYVEDGSKVLENACDILVPAALEGVIHMGNAANIQAPLIIEAANGPVTAGADEILRKKGAVIIPDMYANAGGVTVSYFEWVKNLSHIRFGRMGRRQEEARHQLIVDELEQLSADRGLGWTLTPGFKQQYLRGAGELELVRSGLDDTMRAAYQSMREVWHGRQDVTDLRTAAYLVSIDKVAASYRAAGL

SEQ ID NO: 57058 - DNA, 1278 bp, Oceanicola batsensis HTCC2597
  CDS (1)..(1278): transl_table=11
atgaaccctttcgaactccccgccctggtccagaggattttcgacgaccgcgatgtctcgcccgacgtgcaggccatattgcgccagcccgacaaatccctcggcgtctcggtgccgctgcggcgggacgacgggtcgctggcggtctttccgggatggcgggtgcagtacgacaagacactcggaccggccaagggcggcgtccggtttcatccggccgtggacgaaggggaatgcaccctgctggccttctggatgaccgtcaaatgcgcgctgcacgcgctgcccttcggcggcggcaagggcggtatccgcgtcgacccgaagaagctctcgccgctcgaggtcgaacgtctgtcgcggaactacatcaccgccgtcgccgacatcatcggccccgacagggacatcccggcgccggacgtcaacaccgacgcgcgggtgatgggctggatggcggacgaatacgccgacatcaggcgcagccaccagccggccgccgtgaccggcaagccggtctgcctaggcggctcggaagggcgggctcaggcgaccggccgcggcgcgctgatcgttctggacaactggatgaagcggcagggccgcacgccgcgccagaccaggatcgccgttcaggggttcggcaatgccgggtcgcatttcgcctgcctcgcccacgaggcggggtatcgcgtcgtggcggtctcggacagccaggcggcgatccacgatcccgacggcctcgaaccgcgcaggctcttcgactacaaggagagggaaaaggagctttcgggcgcgctctatgccggccgttcggtaaaggagggcgatggcggcaaggaaatagaccaggccgctctcctgtcgctcgatgtggacgtcctcgttctcgcggcgatggagaacgcgatcaccggggacaatgccgcggccgtccgggcgccgctgctgctcgagattgccaacgggccggtctcgcccgacggggatgcggccctgaccggggcgggcaagaccgtcctgccggacgtgctcgtcaacgcgggcggcgtcaccgtcagctactatgaatggatacagggccgcaccggcgaacggtggagcgaggggaaggtcatcgaccagctgacacagcgcatgcaggataccgccggccggtgcttcgaccgggccgaggaagagcggctccaggtgcgcgaagccgcctacgtgctggccatcgagcggatcgcccacgcgatcagaagccgcggagaccgcagctatttcggcggctag

SEQ ID NO: 57059 - protein, 425 aa, Oceanicola batsensis HTCC2597
MNPFELPALVQRIFDDRDVSPDVQAILRQPDKSLGVSVPLRRDDGSLAVFPGWRVQYDKTLGPAKGGVRFHPAVDEGECTLLAFWMTVKCALHALPFGGGKGGIRVDPKKLSPLEVERLSRNYITAVADIIGPDRDIPAPDVNTDARVMGWMADEYADIRRSHQPAAVTGKPVCLGGSEGRAQATGRGALIVLDNWMKRQGRTPRQTRIAVQGFGNAGSHFACLAHEAGYRVVAVSDSQAAIHDPDGLEPRRLFDYKEREKELSGALYAGRSVKEGDGGKEIDQAALLSLDVDVLVLAAMENAITGDNAAAVRAPLLLEIANGPVSPDGDAALTGAGKTVLPDVLVNAGGVTVSYYEWIQGRTGERWSEGKVIDQLTQRMQDTAGRCFDRAEEERLQVREAAYVLAIERIAHAIRSRGDRSYFGG

SEQ ID NO: 57060 - DNA, 1296 bp, Flavobacteria bacterium BBFL7
  CDS (1)..(1296): transl_table=11
atgactgtaatagcaaagggtaagacaaaaaaattacctttaagaggtatgatggataatgtgatggagcaatttaatagtgctgcagatcatattaatctacatctcaacattagaaaaatactgagtataactaacaatgaaataatagttcattttccagtaaaaatggataatggcgatgtagaaatatttactggttatcgagtgcaacataataatgctttaggtccatataaaggtggattgcgctaccatcctaccgttgatatagatgcagctagagcacttgcgatgtggatgacgtggaaaacctctttggctgggctaccttatggtggtggtaaaggtggtatacaattagatccgtctaagtattcaccatctgaactagaacgtattactcgtagattcacatttgccctagcagataatatagggccagagcatgatatacctgcaccagatgtcaatacaaacagtcagactatggcatggatggcagatacttatatgagtacgcgtccaccagcagaacgtaccgcaaatcaacatgtggtaaccggaaaaccagatggtagtggtggattagaaggtcgtgatcgtgcgactggttatggagtctttttaacgattaagttttgggcacacaaaagtgctgaatcattaaaagataaaagatttatagttcaaggttttgggaatgtaggttattgggctgcgcattttcttgaaaaagaaggtgcacatcttgttgcagttcaagacgcttacggaacgttacacaatgatgatggtataaaggtagaggacttatataattacagtatagcaaataaaggaagcattgttgattttcctgaagccaaggctatcccaaaggctgatttttatactactgattgtgatatatgtattccagcagccttaggaaatcaaattacaagtgaaaatgcaccttatataaaagcacgtttaattgctgaaggtgcaaatggtccaactaatgttgatggagagaaaatcttacttgaaaaaggagtcacaattatacctgatattttatgtaattctggaggagtgataggtagttattttgagtggctgcaaaatagaaatggtgagttatggcaacttgatgaagtaatgattaagctggagaagaaaatgagagaatcctttaataaggtttatacgttctctgaaagtgaagctatggatatgagaacagcggcatattgtatcgctattaaacgtatagagaaagcttatgtacaacgcggtatttttccataa

SEQ ID NO: 57061 - protein, 431 aa, Flavobacteria bacterium BBFL7
MTVIAKGKTKKLPLRGMMDNVMEQFNSAADHINLHLNIRKILSITNNEIIVHFPVKMDNGDVEIFTGYRVQHNNALGPYKGGLRYHPTVDIDAARALAMWMTWKTSLAGLPYGGGKGGIQLDPSKYSPSELERITRRFTFALADNIGPEHDIPAPDVNTNSQTMAWMADTYMSTRPPAERTANQHVVTGKPDGSGGLEGRDRATGYGVFLTIKFWAHKSAESLKDKRFIVQGFGNVGYWAAHFLEKEGAHLVAVQDAYGTLHNDDGIKVEDLYNYSIANKGSIVDFPEAKAIPKADFYTTDCDICIPAALGNQITSENAPYIKARLIAEGANGPTNVDGEKILLEKGVTIIPDILCNSGGVIGSYFEWLQNRNGELWQLDEVMIKLEKKMRESFNKVYTFSESEAMDMRTAAYCIAIKRIEKAYVQRGIFP

SEQ ID NO: 57062 - DNA, 1341 bp, Pseudomonas putida GB-1
  CDS (1)..(1341): transl_table=11
atgatcgaatctgtcgacaatttccttgcacgcctgcaacagcgtgaccctggccaaccggaattccaccaggcggtggaagaggtgttgcgcaccctgtggccattccttgaagccaaccctcactacctgcaatccggcatcctcgagcgcatggtcgagcccgagcgcgctgtactgttccgcgtgtcctgggtcgatgaccagggcaaggtgcaggtcaatcgcggttaccgcatccagatgagcagcgccattggcccgtacaagggcgggctgcgtttccacccgtcggttaacctcagcgtgctgaagttcctggccttcgagcaagtgttcaagaactccctgacctcgctgcccatgggcggcggcaagggcggctcggacttcgaccctaaaggcaagagcgacgctgaagtgatgcgcttctgccaggccttcatgagcgagctgtaccgccacatcggcgccgactgcgacgtaccggcgggtgacatcggtgtgggggcccgcgaaattggcttcatgttcggccagtacaaacgcctggccaaccagttcacctcggtgttgaccggtaaaggcatgacctacggcggcagcctgatccgtccggaagccaccggctatggttgcgtgtacttcgccgaagaaatgctcaaacgccaggacaagcgtatcgacggccgccgcgtggcggtgtccggttcgggcaacgttgcccagtatgccgcgcgcaaggtcatggacctgggcggcaaggtgatttcgctgtctgactccgaaggcaccttgtacgctgaagccggcttgaccgatgcccagtgggacgccttgatggagctgaagaacgtcaagcgcggccgcatcagcgagctggccgggcagttcggcctggagttccgcaaaggccagaccccatggagcctgccgtgcgacatcgccctgccgtgcgccacgcagaacgaactgggcgccgaggacgcccgcacgctgctgcgtaacggctgcatctgcgtggctgaaggcgccaacatgccgaccaccctggaagctgtggatatcttcctggacgccggcatcctgtacgccccgggcaaggcctccaacgccggtggcgtggccgtatcgggcctggaaatgtcgcagaacgccatgcgcctgctgtggactgccggtgaagtggacagcaagctgcacaacatcatgcagtcgattcaccatgcatgcgtgcactacggtgaagaagccgatggccgtatcaactacgtcaaaggtgcgaacatcgcaggctttgtgaaagtggccgatgcgatgctggctcagggcgtcgtctga

SEQ ID NO: 57063 - protein, 446 aa, Pseudomonas putida GB-1
MIESVDNFLARLQQRDPGQPEFHQAVEEVLRTLWPFLEANPHYLQSGILERMVEPERAVLFRVSWVDDQGKVQVNRGYRIQMSSAIGPYKGGLRFHPSVNLSVLKFLAFEQVFKNSLTSLPMGGGKGGSDFDPKGKSDAEVMRFCQAFMSELYRHIGADCDVPAGDIGVGAREIGFMFGQYKRLANQFTSVLTGKGMTYGGSLIRPEATGYGCVYFAEEMLKRQDKRIDGRRVAVSGSGNVAQYAARKVMDLGGKVISLSDSEGTLYAEAGLTDAQWDALMELKNVKRGRISELAGQFGLEFRKGQTPWSLPCDIALPCATQNELGAEDARTLLRNGCICVAEGANMPTTLEAVDIFLDAGILYAPGKASNAGGVAVSGLEMSQNAMRLLWTAGEVDSKLHNIMQSIHHACVHYGEEADGRINYVKGANIAGFVKVADAMLAQGVV

SEQ ID NO: 57064 - DNA, 1311 bp, Marinobacter sp. ELB17
  CDS (1)..(1311): transl_table=11
atgagcaataataccaaccacttacttgacgatgcacaatcccgaatggccgacatttatgagcggctggaggtggctgatgatagtcgtcaccgtttggggcagcccaaacgcatccatcaggcaagtttatcggtgcgcatggatgacggctcattgcgtgtctttccggcctggcgagtgcaatacgacgatacccgtggaccaaccaagggcggtattcgtttccatccgaacgtaaccgaggatgaggtcgcgacactgagcctatggatgacgttaaagtgcgctgcagtcgatctcccgtttggtggtgccaaaggcggtatttgtgttgatccgaagaccctctcccgcttggaactggagcggttatcacgtggctacatccgcgcatttcacgatgtgatcggacccgaccgcgatattcccgcacccgacgtcaataccaacgccattgtcatgggctggatggtggatgaatacgcccagatcgcccggcggcacgtccccggtgtcattaccggtaaacccctcgggctggggggctccatcggccgtgaggaggccaccggtgcaggcgcgttgcaggtgttggatctgtgggcgaagcggcagaacaaagagcctcacgaattgagtgtggccattcagggattcggcaatgccggccagaattttgctcgtctggcacaccatgccggttataaaattgttgcattgtccgactcccagggtgccatttacaatgaggacgggttggatcctgagccaatcctgcgtcacaaaaatcgtacccgcgaactcaaaggcatggtctattgtggcgattccgtttgcgacgccgcggagacggagacgcagaccctgagtggtgacgagttgctgcaactggatgtcgacgtcctggtcttggccgcgctggaaaaccagataacggacgccaatgcggaccatatccgggccaagaccattgtcgagatcgctaatggccccatcagcactggcggtgaccagattctgcaaggccgagacatcacggtgatccctgacatcgttgctaatgccggcggcgttattgtcagtcatctggaatgggttcaaaaccgaatgggtgattactggtcgggggatacagtcgaaaagcaactcagacagcgtcttgagcgtgaagcgaatgcatgctttgacttggcggacgagaaagccgtacctctacgcacggcagcctatctccaaggcgtccggcggattgtcgatgccatggcgcaacagggcacccagggctatttcaacgatcgccgaggataa

SEQ ID NO: 57065 - protein, 436 aa, Marinobacter sp. ELB17
MSNNTNHLLDDAQSRMADIYERLEVADDSRHRLGQPKRIHQASLSVRMDDGSLRVFPAWRVQYDDTRGPTKGGIRFHPNVTEDEVATLSLWMTLKCAAVDLPFGGAKGGICVDPKTLSRLELERLSRGYIRAFHDVIGPDRDIPAPDVNTNAIVMGWMVDEYAQIARRHVPGVITGKPLGLGGSIGREEATGAGALQVLDLWAKRQNKEPHELSVAIQGFGNAGQNFARLAHHAGYKIVALSDSQGAIYNEDGLDPEPILRHKNRTRELKGMVYCGDSVCDAAETETQTLSGDELLQLDVDVLVLAALENQITDANADHIRAKTIVEIANGPISTGGDQILQGRDITVIPDIVANAGGVIVSHLEWVQNRMGDYWSGDTVEKQLRQRLEREANACFDLADEKAVPLRTAAYLQGVRRIVDAMAQQGTQGYFNDRRG

SEQ ID NO: 57066 - DNA, 1317 bp, Erythrobacter sp. SD-21
  CDS (1)..(1317): transl_table=11
atggaaggcgtgaagaagcgcaatccggggcaggacgagttcattcaggccgtccacgaggtggcacaggacatcttcgagttcatcgaggacaaggaggaataccacgaggcgcagatcctgcggcgtatcgccgagcctgatcgcgtggtgtccttccgcgtgtgctgggaagacgacaaccacaacatccgcgtccagcgcgggtggcgggttcagaacaacaacgcgatcggcccttacaagggcggcatccgcttccaccccagcgttaatgagagcgtcctcaagttcctcgccttcgagcagaccttcaagaactcgctcaccggcctgccaatgggcggcgggaagggcggcgcgaacttcaaccccaagggcaaaagcgatagcgaagtcatgcgcttctgccagtccttcatgaccgaactgtatcgccacatcggacccgataccgacgtgcctgcgggcgatatcggcgtcggcgcgcgcgagatcggctatatgttcggccagtacaagcggatcaccaatcgctgggaaggcgtgctcacgggcaagggcaccgaatacggcggatcgaaaatgcggcccgaggcgaccggttatggtgcggtctatttcctgcgcaacatgttggaaaaggacgggcaggatatcgagggcaagcaggcggtcatttccggctccggcaatgtcgcgacacatgctgccgagaagctctgccagctaggcgccaaggtcctcaccctctccgatagtgacggcttcatccacgatcccgacggcatcgaccaggagaagatcgactgggtcaagcgcctcaagaacgagaggcgcggacgcatcagcgaatacgccgaccacttcaccaacgcgaccttccacgaaggcaagaagccctggaatgtcgagtgcgacatcgccctgccgtgcgcgacgcagaacgagctgtgcgaggatgatgcgaaggcgctggtcgagaacggctgcatggccgtgtccgaaggggcgaacatgccgacgacgctcgaaggggtgaaggtcttccacgaggcgaagatcctctacggtcccggcaaggccgcaaacgccggcggggtcgccgtgtccggtctggaaatgagccagaacgccgagcggatcagctggaaccacgacaagctgggtgaaatgctcaccgaactcatgcaggacattcacgacaaatgcgtcgagcatggtgagcaggacggatacatcgactatgtccgcggagccaatatcgccggcttcaagaaagtcgccgacgcgatgctcgccttcggggtggtttaa

SEQ ID NO: 57067 - protein, 438 aa, Erythrobacter sp. SD-21
MEGVKKRNPGQDEFIQAVHEVAQDIFEFIEDKEEYHEAQILRRIAEPDRVVSFRVCWEDDNHNIRVQRGWRVQNNNAIGPYKGGIRFHPSVNESVLKFLAFEQTFKNSLTGLPMGGGKGGANFNPKGKSDSEVMRFCQSFMTELYRHIGPDTDVPAGDIGVGAREIGYMFGQYKRITNRWEGVLTGKGTEYGGSKMRPEATGYGAVYFLRNMLEKDGQDIEGKQAVISGSGNVATHAAEKLCQLGAKVLTLSDSDGFIHDPDGIDQEKIDWVKRLKNERRGRISEYADHFTNATFHEGKKPWNVECDIALPCATQNELCEDDAKALVENGCMAVSEGANMPTTLEGVKVFHEAKILYGPGKAANAGGVAVSGLEMSQNAERISWNHDKLGEMLTELMQDIHDKCVEHGEQDGYIDYVRGANIAGFKKVADAMLAFGVV

SEQ ID NO: 57068 - DNA, 1305 bp, unidentified eubacterium SCB49
  CDS (1)..(1305): transl_table=11
atggcaacaataacagtagaaaaaagtaaaaaagtaaaaaaagtacccttaaaaggtatgatggataatgtgctagaacaatttaatagcgcagcagatcagatagatatacatcctagcattcgtaaaatattatcaataacaaataatgagataattgtaaattttcctgtaaaaatggacaatggagatgttgagatatttacgggttaccgtgtgcaacataacaatgcattaggaccatataaaggaggcttacgttatcacccaacggtagatatagacgcagcaagggctttggcaatgtggatgacttggaaaacatctttggcaggtttgccatacggtggaggtaaaggagggattaaattagacccttcaaaatattcacaagcagaattagagcgtattacacgtaggtttacgtttgcactagcagataatatagggccagaacacgatattcctgctccagatgtaaatacgaatagtcaaacaatggcttggattgcagacacttacatgagtacgcgtccgccagcagaacgatctgcaaatcaacacgtggttacaggaaaaccagatggatctggggggcttgaagggcgtgatcgcgctacgggttatggtgtttatttaaatataaaattttgggcagaacgtaaaaatgtaaatttaaaagacaagaaatttattgttcaaggttttggtaatgttgggtattgggcagctcattttcttgagaaagatggtgcaaaaatggttgcagtacaagatgcgtatggaagtatagaaaaccctgaaggaatcgtcatagaagatctttttaattatagcaaatctaatacgggaagcatcgttgattatcctcaagctaaaaagataaataaagaagatttttttagtacggagtgtgatatctgtatcccagctgctttaggaaatcagattacaaaagaaaatgcaggaaagattaaagcaactttaattgcagaaggggcaaatggacctacaaatgtagaaggggaaaatatattgttagaacgaggaattacaattataccagatatactctgtaattctggaggtgttgtggctagttattttgaatggctacaaaacagaaacggagagctatggcagttagatgaagtgatagctagacttgataaaaagatgaaagaaacttttaataaagtatacgagtattctgagagtgaagcaatggactttagaacagctgctttttgtattgcaattaagagagtagagagagcgtatgtgcaaagaggtatttttccttga

SEQ ID NO: 57069 - protein, 434 aa, unidentified eubacterium SCB49
MATITVEKSKKVKKVPLKGMMDNVLEQFNSAADQIDIHPSIRKILSITNNEIIVNFPVKMDNGDVEIFTGYRVQHNNALGPYKGGLRYHPTVDIDAARALAMWMTWKTSLAGLPYGGGKGGIKLDPSKYSQAELERITRRFTFALADNIGPEHDIPAPDVNTNSQTMAWIADTYMSTRPPAERSANQHVVTGKPDGSGGLEGRDRATGYGVYLNIKFWAERKNVNLKDKKFIVQGFGNVGYWAAHFLEKDGAKMVAVQDAYGSIENPEGIVIEDLFNYSKSNTGSIVDYPQAKKINKEDFFSTECDICIPAALGNQITKENAGKIKATLIAEGANGPTNVEGENILLERGITIIPDILCNSGGVVASYFEWLQNRNGELWQLDEVIARLDKKMKETFNKVYEYSESEAMDFRTAAFCIAIKRVERAYVQRGIFP

SEQ ID NO: 57070 - DNA, 1347 bp, Streptococcus suis
  CDS (1)..(1347): transl_table=11
atgtcaaatgccaaagcttacatccaagcttcttttgaagcagtcaaagcccgcaacccacatgaaacagaattcctccaagctgtagaagagctcttctctacacttgagcctgtttttgaagcacacccagaatacatcgaagaaaacatcttggcccgtattgttgagcctgagcgtatcatcagcttccgtgttccatggacagataaagatggaaatgtccaagtcaaccgtggctaccgtgttcagttcaactcagctgtaggtccttacaaaggcggtcttcgcttccacccaactgtaaaccaatccatcttgaagttcctcggttttgagcaaatcttcaaaaacgtcttgactggtcttccaatcggcggtggtaaaggtggttcagactttgatccaaaaggaaaaactgatgctgaaatcatgcgcttctgccaaagcttcatgactgaattgcaaaaacacatcggaccttcacttgacgtccctgctggtgacatcggtgtcggtggtcgtgagattggttacatgtacggtcaatacaaacgcctccgccagtttgatgcaggtgtcttgactggtaaacctcttggctttggtggttcattgatccgcccagaagcaactggttacggtttggtttacttcactgataacatgttggcagcaaacggtaaatccttcaaagaccaaactgtccttatctctggttctggtaacgttgcccaatatgctgttcaaaaagcgactgaacttggtgcaaaagtcatctctgtttcagactcaaatggttacatcattgacgaaactggtatcgacttcgacctcttggtggacatcaaagaaaaacgccgcgctcgtttgacagaatacgctgcagaaaaagcaactgctaagtacttcgaaggttctgtatggaactacgacggcaaggctgatattgcccttccatgtgcgactcaaaacgaaatcaacggtgagcaagctgctgcccttgtgaaaaatggcgtttactgtgtggctgaaggtgccaacatgccatctgacctggatgctatcaaagtttacaaagaaaatggcgttctttacggtcttgcaaaagctgccaacgctggtggtgtagccgtatctgcccttgaaatgagccaaaacagccttcgcttgtcatggactcgtgaagaagtagacggccgtcttaaagacatcatggcaaatatcttcaacacagccaaagaaactgctgaaaaatacgaccttggtacagactaccttgccggtgctaacatcgcagcctttgaacaaattgcggatagcatgattgcccaaggtttggtataa

SEQ ID NO: 57071 - protein, 448 aa, Streptococcus suis
MSNAKAYIQASFEAVKARNPHETEFLQAVEELFSTLEPVFEAHPEYIEENILARIVEPERIISFRVPWTDKDGNVQVNRGYRVQFNSAVGPYKGGLRFHPTVNQSILKFLGFEQIFKNVLTGLPIGGGKGGSDFDPKGKTDAEIMRFCQSFMTELQKHIGPSLDVPAGDIGVGGREIGYMYGQYKRLRQFDAGVLTGKPLGFGGSLIRPEATGYGLVYFTDNMLAANGKSFKDQTVLISGSGNVAQYAVQKATELGAKVISVSDSNGYIIDETGIDFDLLVDIKEKRRARLTEYAAEKATAKYFEGSVWNYDGKADIALPCATQNEINGEQAAALVKNGVYCVAEGANMPSDLDAIKVYKENGVLYGLAKAANAGGVAVSALEMSQNSLRLSWTREEVDGRLKDIMANIFNTAKETAEKYDLGTDYLAGANIAAFEQIADSMIAQGLV

SEQ ID NO: 57072 - DNA, 1236 bp, Medicago truncatula
  CDS (1)..(1236)
atgaatgctcttgttgccaccaaccgtaatttccaacgtgcatctcgaatccttggtttggattccaaacttgagaaaagccttctcattccttacagagaaatcaaggtcgaatgtacgatcccaaaagatgatggaagtttggtttcatacgtcggttttcggatccaacatgacaatgcacgtggtcctatgaaaggaggaattcgttatcaccccgaggttgaccctgatgaagttaatgctcttgctcagctaatgacatggaagacagctgtggtagacattccatacggaggagcaaagggcggaattggctgcaacccaaaggatctgagcatcagtgagctagaacgtctcactcgtgttttcacccaaaagattcatgacctcattggcattcatagggatgttcctgcccctgatatgggaactaattcacagacaatggcttggattcttgatgaatattcaaagtttcatggtcattcaccagcagttgtgactggcaagcctattgatcttggaggttcattgggaagagaggctgcaacaggactgggagtggtttttgcaacagaggctttatttgctgaatatgggaagtcgatttctgatatgacatttgccatccaggggtttggcaatgtgggcacctgggctgcaaaggcaatttttgagagaggtggtaaggtggttgcagtgagtgacatcaatggtgctattagtaatccaaatgggattgatattgctgctcttctgaaacacaaggcaggcaacggaagtttgaaggatttctcaggaggagatgctatgaatccaaatgatttgcttgtccatgactgtgatgttctcattccatgtgctttgggaggtgttctcaacaaggaaaatgctaatgatgtgaaagcaaaatttattatagaggctgcaaatcatccaactgaccctgatgctgatgagatactgtctaagaaaggagtaattatattaccagacgtttatgccaatgctggtggagtgacagtaagctactttgaatgggttcagaatattcaaggatttatgtgggatgaagagaaagtgaaccaggagctgaaaaggtacatgaccaaagctttcaatgacataaaagcaaactgtaaaactcacaattgcgacttgcgaatgggagctttcactcttggactcaaccgtgtcgctcgcgctacacttttgagaggttgggaagcttag

SEQ ID NO: 57073 - protein, 411 aa, Medicago truncatula
MNALVATNRNFQRASRILGLDSKLEKSLLIPYREIKVECTIPKDDGSLVSYVGFRIQHDNARGPMKGGIRYHPEVDPDEVNALAQLMTWKTAVVDIPYGGAKGGIGCNPKDLSISELERLTRVFTQKIHDLIGIHRDVPAPDMGTNSQTMAWILDEYSKFHGHSPAVVTGKPIDLGGSLGREAATGLGVVFATEALFAEYGKSISDMTFAIQGFGNVGTWAAKAIFERGGKVVAVSDINGAISNPNGIDIAALLKHKAGNGSLKDFSGGDAMNPNDLLVHDCDVLIPCALGGVLNKENANDVKAKFIIEAANHPTDPDADEILSKKGVIILPDVYANAGGVTVSYFEWVQNIQGFMWDEEKVNQELKRYMTKAFNDIKANCKTHNCDLRMGAFTLGLNRVARATLLRGWEA

SEQ ID NO: 57074 - DNA, 1236 bp, Vitis vinifera
  CDS (1)..(1236)
  misc_feature (90)..(90): w is a or t
  misc_feature (118)..(118): r is g or a
  misc_feature (220)..(220): k is g or t
  misc_feature (345)..(345): y is t or c
  misc_feature (407)..(407): y is t or c
  misc_feature (560)..(560): r is g or a
  misc_feature (702)..(702): r is g or a
  misc_feature (792)..(792): r is g or a
  misc_feature (1214)..(1214): y is t or c
atgaatgctctagcagccactaaccgcaattttcgccatgcttcccgcattcttgggttggactccaagctggagaagagtcttctgatwtctttcagagagatcaaggtggagtgcrcgatcccgaaggatgatggaagtttggcaacgtatgtggggttccgtgtgcagcatgataatgctcgtgggcccatgaagggagggatcagatatcaccctkaggtggatcctgatgaggtaaatgcgctggctcaattgatgacgtggaagaccgctgtagttgacattccctatggtggtgcaaagggtggcattgggtgcaccccaagggacttgagtatgagygagttggaacgtcttactcgtgtctttactcaaaagattcatgatcttattggaactcataycgatatacctgcaccagacatgggaactaatgctcagactatggcatggattttcgacgagtactcaaaattccatggtcactcaccggctgtagtgactggaaagccaatagatcttggtggatccctcggtagggaggctgcaactggtcraggtgttgttttcgcaactgaagctttacttgcgcaacatgggaagtcaatcaagggtttgacatttgttattcagggttttggcaatgttggatcttgggtagcaagactcatccatgagagaggtggtaaaatcatagcrgtgagtgacatcactggagctgttaagaaccaaaatgggcttgatatagtggatttgcttaggcacaaagaagagactggttgtctaacraatttcagtggcggagatcacatggatccgaatgaactgctcacacatgaatgtgatgttctcatcccatgtgctctaggtggagttcttaacaaagaaaatgctgcggatgttaaggcaaagttcataatagaagcagcaaatcatcctactgatccagaagctgatgagattctatccaagaaaggagtcgtaatcctgcctgacatctatgctaatgctggaggtgtgaccgtgagctattttgagtgggttcagaatattcaaggttttatgtgggaagaagagaaggtgaattatgagcttcagaagtacatgaccaaagcttttcataacattaaggcaatgtgtcaatcacacaactgcagtcttcgaatgggagccttcacattgggagtgaagcgagttgctcgtgccacgaygctaaggggttgggaagcttag

SEQ ID NO: 57075 - protein, 411 aa, Vitis vinifera
  misc_feature (40)..(40): The Xaa at location 40 stands for Ala, or Thr.
  misc_feature (74)..(74): The Xaa at location 74 stands for Stop, or Glu.
  misc_feature (136)..(136): The Xaa at location 136 stands for Ile, or Thr.
  misc_feature (187)..(187): The Xaa at location 187 stands for Arg, or Gln.
  misc_feature (405)..(405): The Xaa at location 405 stands for Met, or Thr.
MNALAATNRNFRHASRILGLDSKLEKSLLISFREIKVECXIPKDDGSLATYVGFRVQHDNARGPMKGGIRYHPXVDPDEVNALAQLMTWKTAVVDIPYGGAKGGIGCTPRDLSMSELERLTRVFTQKIHDLIGTHXDIPAPDMGTNAQTMAWIFDEYSKFHGHSPAVVTGKPIDLGGSLGREAATGXGVVFATEALLAQHGKSIKGLTFVIQGFGNVGSWVARLIHERGGKIIAVSDITGAVKNQNGLDIVDLLRHKEETGCLTNFSGGDHMDPNELLTHECDVLIPCALGGVLNKENAADVKAKFIIEAANHPTDPEADEILSKKGVVILPDIYANAGGVTVSYFEWVQNIQGFMWEEEKVNYELQKYMTKAFHNIKAMCQSHNCSLRMGAFTLGVKRVARATXLRGWEA

SEQ ID NO: 57076 - DNA, 1383 bp, Bacillus licheniformis
  CDS (1)..(1383): transl_table=11
atgcatacgctagaaaaaatggagcaaacaaatgttcagatggcgagagattatgtgacaaaagcatacgagacagtgcggcagcgaaatcttcacgaaagcgaatttcttcaagctgtaaaagaaattttcgattccctcgtccctgtattggcaagacatccaaagtatatcgaacaccgcattcttgaaaggattgcagagcctgaacggatgatcaccttcagggtgccgtgggtcgatgatgaaggcaatatccaggttaacaggggataccgggttcaatttaacagcgcaatcggtccgtataaaggcggcatccgttttcatccttctgtaaatgcgagcattattaaatttttgggcttcgaacaaatttttaaaaattctttgaccggccagccaatcggcggcggaaaaggcggggctgattttgatccgaagggcaagtctgacagggagatcatgagttttacgcaaagcttcatgaatgaactgtacagacatatcggaccggacacggatatccctgccggtgatattggtgtcggagctagggaagtcgggtttatgttcggacagtataaaaagattcggggccgctatgatgcaggtgtgttaacaggcaaaggccttgaatacgggggcagtttgacgaggaaagaagcgacagggtacggtctggtttatttcgtagaagaaatgctgaaggatcaggggctgcgttttgaaaacagcaccgttgtcgtctccggttcaggcaatgtcgcgctgtatgcgatggaaaaagccgctcaattcggcggaaaagtagtggcctgcagtgattctgacggctatgtctatgacgaaaaaggcatcagccttgagacggtgaagcggcttaaagaaagcgggaacggaaggattcgcgagtatgtcagcgagcatccggaagcacactatttcgaaggatgctccggcatttggtctattccgtgcgatatcgcgcttccgtgcgcgacccagaacgaaattgacgaagaggctgccggagtgctcatttcaaatggggtcaaagccgtcggagaaggggcgaatatgccgtctgaagagggcgccgtcaaacgctttttggatgcgggggttcttttcgggccggctaaggctgcaaatgccggcggtgtggccgtttcagcgctcgaaatggcgcagaacagcgcacggctccactggacggcggaagaaacggatgagaagctcagaatgatcatgaccgatatttacaagagaagcgttgaagcggcttcagaatacggacgtcccggcaatctgcttgacggctgcaatatagccggatttattaaagtggcggatgcgatgatcgctcagggagtcgtttaa

SEQ ID NO: 57077 - protein, 460 aa, Bacillus licheniformis
MHTLEKMEQTNVQMARDYVTKAYETVRQRNLHESEFLQAVKEIFDSLVPVLARHPKYIEHRILERIAEPERMITFRVPWVDDEGNIQVNRGYRVQFNSAIGPYKGGIRFHPSVNASIIKFLGFEQIFKNSLTGQPIGGGKGGADFDPKGKSDREIMSFTQSFMNELYRHIGPDTDIPAGDIGVGAREVGFMFGQYKKIRGRYDAGVLTGKGLEYGGSLTRKEATGYGLVYFVEEMLKDQGLRFENSTVVVSGSGNVALYAMEKAAQFGGKVVACSDSDGYVYDEKGISLETVKRLKESGNGRIREYVSEHPEAHYFEGCSGIWSIPCDIALPCATQNEIDEEAAGVLISNGVKAVGEGANMPSEEGAVKRFLDAGVLFGPAKAANAGGVAVSALEMAQNSARLHWTAEETDEKLRMIMTDIYKRSVEAASEYGRPGNLLDGCNIAGFIKVADAMIAQGVV

SEQ ID NO: 57078 - DNA, 1281 bp, Sporosarcina halophila
  CDS (1)..(1281): transl_table=11
atggtagcggataagccgacagatgctgcaaacgaaaacaatgataaactcgatgttttaaaatccacacagacggtggttaaaaaagcacttgataaattaggttatcctaacgaagtttacgaactcttgaaagaaccggtgcggatgatgacggtaaggattcctgtacggatggataatgatcatattaaaatattcacaggctatcgttcccagcataatgacgcggttggtcctaccaaaggcggggtgcgtttccacccgaacgtctcagaaaaagaagtcaaagctttatccatctggatgagtttaaaagctggaattgtagatctgccttatggtggaggaaaaggcgggatcgtttgtgaccctcgtgagatgtctttccgggaacttgaaggcgtgagccgcggttatgttagggctatcagtcaaattgtaggtcctacaaaggatattccagcacctgatgtatttacaaattctcagatcatggcatggatgatggatgaatacagccgtatagatgaatttaataaccctggttttatcactggtaaaccacttgtcttaggcggatcacatggccgggaaacagccacggctaaaggtgtaactatctgtattgaagaggcagctaaaaagaaaggcataagtgtagaaggtgccagagtggtggttcagggctttggtaacgccggaagctttctagctaaatttatgcacgatcgtggagctaaggttattgggatttccgatgcctatggaggattgcatgatcctgatggtctggatatcgattacttacttgaccgccgggatagttttggcacggtcacaaatcttttcaaaaatacaatatccaatgaagaactgttggagttggattgtgacatattagttcctgctgctatcgaaaatcaaattcgcgaagaaaatgctcacaacataaaggcaagtatcgtggtagaagcagcaaacggcccgaccactttagatgccactcgaatattatctgaaagagggatattgcttgtacccgatgttttggcgtcttcgggaggagtaacggtttcttatttcgaatgggtccagaataatcaaggatattattggacagaagaagaagtggaagagaaactccataaagtgatcgttaaagggtttgataacgtttacaaaacagcagagacccggcgggtagatatgcgtttagctgcttacatggttggtgtaagaaagatggcagaagcttctcgttttagaggatggatatag

SEQ ID NO: 57079 - protein, 426 aa, Sporosarcina halophila
MVADKPTDAANENNDKLDVLKSTQTVVKKALDKLGYPNEVYELLKEPVRMMTVRIPVRMDNDHIKIFTGYRSQHNDAVGPTKGGVRFHPNVSEKEVKALSIWMSLKAGIVDLPYGGGKGGIVCDPREMSFRELEGVSRGYVRAISQIVGPTKDIPAPDVFTNSQIMAWMMDEYSRIDEFNNPGFITGKPLVLGGSHGRETATAKGVTICIEEAAKKKGISVEGARVVVQGFGNAGSFLAKFMHDRGAKVIGISDAYGGLHDPDGLDIDYLLDRRDSFGTVTNLFKNTISNEELLELDCDILVPAAIENQIREENAHNIKASIVVEAANGPTTLDATRILSERGILLVPDVLASSGGVTVSYFEWVQNNQGYYWTEEEVEEKLHKVIVKGFDNVYKTAETRRVDMRLAAYMVGVRKMAEASRFRGWI

SEQ ID NO: 57080 - DNA, 1236 bp, Vitis vinifera
  CDS (1)..(1236)
atgaatgcgctggcggcaaccaaccgaaactttaagctggcagctcgccttttggggttggactcaaagcttgaaaagagtttactcatcccgtttagggaaatcaaggttgagtgcaccatacccaaagacgatggtactttggcatcatttgttggattcagggttcaacatgaccaatggagaggtcctatgaagggggggatcagataccagccagaggttgatccagatgaggtaaatgctttggcacaactaatgacatggaagacagcagtagcaaatattccatacggtggggccaaaggagggataggatgtaatccaggggagctaagcttgtctgagctggagcgactgacaagagtcttcacccaaaagatacatgatctaattggggtctccacagatgttccagcacctgatatgggaacaaactcacagaccatggcatggatactagatgagtactcgaaatttcatggctactcacctgctgtggtgactggaaagcctactgatctcggtggatctctgggcagagatgcagctacaggaaggggagtactctttgcaacagaggcccttcttcatgaacatgggaagagcattgccggacaacggtttgttgtacaggggtttgggaatgtgggttcctgggctgcccaactcatcagtggacatggtggaaagattgttgctgtaagtgacattactggagccattaagaatagcaaaggaattgacgttccaagccttctcaagcattctgtggaacaccgtggagtcaaaggtttcaatggggcagatccaatagatccaaagtcgatattggttgaagattgtgacgtcctcatcccagcagcccttgggggtgtgatcaacagggaaaatgcaaatgaaattaaagccaaatttattattgaagcagccaaccatccaacagaccctgaagcagatgagatcctatcaaagaaaggtgttatcattcttccagacatatatgcaaactcggggggagtcactgtcagttattttgagtgggttcagaacattcaaggtttcatgtgggatgaggagaaagtaaacaatgaactgcggacgtacatgaccagagggttcaaagatgtgaaggagatgtgcagaacccacaattgcgatctgcgcatgggagcattcacccttggagttaatcgtgttgccagggcaaccgtccttaggggttgggaagcctaa

SEQ ID NO: 57081 - protein, 411 aa, Vitis vinifera
MNALAATNRNFKLAARLLGLDSKLEKSLLIPFREIKVECTIPKDDGTLASFVGFRVQHDQWRGPMKGGIRYQPEVDPDEVNALAQLMTWKTAVANIPYGGAKGGIGCNPGELSLSELERLTRVFTQKIHDLIGVSTDVPAPDMGTNSQTMAWILDEYSKFHGYSPAVVTGKPTDLGGSLGRDAATGRGVLFATEALLHEHGKSIAGQRFVVQGFGNVGSWAAQLISGHGGKIVAVSDITGAIKNSKGIDVPSLLKHSVEHRGVKGFNGADPIDPKSILVEDCDVLIPAALGGVINRENANEIKAKFIIEAANHPTDPEADEILSKKGVIILPDIYANSGGVTVSYFEWVQNIQGFMWDEEKVNNELRTYMTRGFKDVKEMCRTHNCDLRMGAFTLGVNRVARATVLRGWEA

SEQ ID NO: 57082 - DNA, 1362 bp, Trichophyton rubrum
  CDS (1)..(1362)
atgtctaacctcccatctgagcccgagttcgagcaggcctacaaggagttggcctacactctcgagaacagctccctcttccagaagcaccccgagtaccgcaccgccctcaccgttgcctctatccccgagcgtgtcattcagttccgtgttgtctgggaggacgacaacggcaacgtccaggtcaaccgcggttaccgtgtccagttcaactccgccctcggtccctacaagggtggtcttcgtctccacccctccgtcaacctttccattctcaagttcctcggtttcgagcagatcttcaagaatgccctcactggtctcaacatgggcggcggcaagggcggcgcggacttcgaccccaagggcaagagcgacaacgagattcgtcgcttctgccaggctttcatggcggagcttcacaagcacattggtgccgatactgatgtccccgctggtgatatcggtgtcggtggccgtgagatcggttacatcttcggcgcctaccgcaaggccgcgaaccgtttcgagggtgtccttactggcaagggcctctcctggggtggttcgctcattcgccctgaggccactggttacggtcttgtttactacgtcggccacatgctcgagtactctggcgccggctcctacgctggcaagcgcgttgccctctccggttccggcaacgtcgcccagtacgccgccctcaagctcattgagctaggcgccaccgttgtctccctctccgactccaagggtgcccttgtcgccactggcgagtccggcatcaccgttgaggacatcaacgccgtcatggccatcaaggaggcccgtcagtcccttaccagcttccagcacgctggccacctcaagtggatcgagggtgcaagaccatgggttcacgttggcaaagtggatgttgtgcttccatgtgcaactcagaacgaagtctctggtgaagaggccaaagtacttgtggctaacggcgcacgctttgtcgccgaaggttccaacatgggctgcacgttggacgccattgaactcttcgaggcgcacagaaatgaacataagcgtgaccagggcgcagtgtggtacgcgcctggaaaagcagcaaatgcgggaggagttgcagtcagtgggttggagatggctcaaaactcccagagactgacgtggagtgcagaggaagtggacgggaagttgcaggctatcatgaaggaatgctttgagactggactgaggacggcgaatgagtacacggaggtagaggatgacaaactgccgtctcttgtggcaggaagcaacattgcaggtttcatcaaggtatctgaagccatgcgagaccatggtgattggttctga

SEQ ID NO: 57083 - protein, 453 aa, Trichophyton rubrum
MSNLPSEPEFEQAYKELAYTLENSSLFQKHPEYRTALTVASIPERVIQFRVVWEDDNGNVQVNRGYRVQFNSALGPYKGGLRLHPSVNLSILKFLGFEQIFKNALTGLNMGGGKGGADFDPKGKSDNEIRRFCQAFMAELHKHIGADTDVPAGDIGVGGREIGYIFGAYRKAANRFEGVLTGKGLSWGGSLIRPEATGYGLVYYVGHMLEYSGAGSYAGKRVALSGSGNVAQYAALKLIELGATVVSLSDSKGALVATGESGITVEDINAVMAIKEARQSLTSFQHAGHLKWIEGARPWVHVGKVDVVLPCATQNEVSGEEAKVLVANGARFVAEGSNMGCTLDAIELFEAHRNEHKRDQGAVWYAPGKAANAGGVAVSGLEMAQNSQRLTWSAEEVDGKLQAIMKECFETGLRTANEYTEVEDDKLPSLVAGSNIAGFIKVSEAMRDHGDWF

SEQ ID NO: 57084 - DNA, 1377 bp, Aspergillus oryzae
  CDS (1)..(1377)
atgtccaaccttcccattgagcccgagttcgagcaggcctacaaggagctcgcctctacccttgagaactccactctcttccagaagaaccctgagtaccgcaaggctctcgccgttgtctccgtccccgagcgtgtcatccagttccgtgtcgtctgggaggatgacaaccaccaggttcaggtgaaccgtggtttccgtgttcagttcaactccgctctcggtccctacaagggtggtcttcgtttccacccctccgtcaacctttctatcctcaagttcttgggtttcgagcagatcttcaagaatgctctcaccggtctgaacatgggtggtggtaagggtggttctgacttcgaccccaagggcaagtccgacaacgaaatccgccgcttctgtgttgctttcatgaccgagctctgcaagcacatcggtgccgacactgatgttcctgctggtgatatcggtgtcaccggccgtgaggtcggtttccttttcggccagtaccgcaagatccgcaaccagtgggagggtgtcctcaccggtaagggtggcagctggggtggttctctgatccgtcccgaggccactggctacggtgttgtctactacgtggagcacatgatcaagcacgctaccgacggcaaggagtccttcgccggcaagcgcgtcgccatctctggttccggtaacgtcgcccagtacgccgctctcaaggtcatcgagcttggcggttccgtcgtctccctctccgacagcaagggcgccctgatcgtcaacggtgagggtagcttcacccccgaggagatcaacaccatcgcccagatcaaggtcgaccgcaagcagatctccgagattgccagcactgaggctttcgcttccaagttcaagtacatccccggtgcccgtccctggacccacgtcggcaaggtcgacatcgctctcccctctgctacccagaacgaagtttccggcgaggaagcccaggccctcatcgacgctggctgcaagttcatcgccgaaggttccaacatgggttccactcaggacgccatcgacatcttcgaggcccaccgtgaggccaacaagggtgcttccgctatctggtacgcccccggtaaggccgccaacgccggtggtgtcgccgtctccggtctcgagatggcccagaactctgctcgcatcaactggacctccgaggaggtcgatgctcgcctcaagggtatcatggaggactgcttcaagaacggtctcgagactgctatcgagtacgctactcctgctgagggcgtccttccttcccttgtcaccggtagcaacattgctggtttcaccaaggttgctgctgccatgaaggaccagggtgactggtggtaa

SEQ ID NO: 57085 - protein, 458 aa, Aspergillus oryzae
MSNLPIEPEFEQAYKELASTLENSTLFQKNPEYRKALAVVSVPERVIQFRVVWEDDNHQVQVNRGFRVQFNSALGPYKGGLRFHPSVNLSILKFLGFEQIFKNALTGLNMGGGKGGSDFDPKGKSDNEIRRFCVAFMTELCKHIGADTDVPAGDIGVTGREVGFLFGQYRKIRNQWEGVLTGKGGSWGGSLIRPEATGYGVVYYVEHMIKHATDGKESFAGKRVAISGSGNVAQYAALKVIELGGSVVSLSDSKGALIVNGEGSFTPEEINTIAQIKVDRKQISEIASTEAFASKFKYIPGARPWTHVGKVDIALPSATQNEVSGEEAQALIDAGCKFIAEGSNMGSTQDAIDIFEAHREANKGASAIWYAPGKAANAGGVAVSGLEMAQNSARINWTSEEVDARLKGIMEDCFKNGLETAIEYATPAEGVLPSLVTGSNIAGFTKVAAAMKDQGDWW

SEQ ID NO: 57086 - DNA, 1239 bp, Glycine max
  CDS (1)..(1239)
atgaacgctcttgcagccaccaaccgcaactttcaacgtgcagctcgcattcttggtttggattccaagcttgagaagagcctcctcatacccttcagagaagtcaaagttgaatgcacgattccaaaggatgatggaactctggtttcctatgtgggattcaggatccaacatgataatgctcgtggtcctatgaagggagggattcgttatcatcccgaggttgaccctgatgaagtgaatgctctagctcagctgatgacctggaagactgctgtagcagacattccctatggaggagcaaagggtgggattggctgcaacccaagggatctgagtatcagtgagttagaacgtctaactcgggttttcacccaaaagattcatgatctcattggcattcaaaaggatgttcccgcccctgatatgggaactaatgctcagaccatggcatggattcttgatgaatattcaaagtttcatgggcattcacctgcagttgtgacagggaagcctattgatcttggaggttcgttggggagggaggctgcaacaggtctcggagtggtttttgcaactgaggctttatttgctgaatatgggaagtcaatttcggatcacacatttgtcatccagggctttggaaatgtgggcacgtgggctgctaagtctatttttgagagggggggaaaggtgattgctgtgagtgacatcagtggtgctatcaaaaacctaaatggaatcgacatccttgcccttctgaaacacaaggatggcaatggtggagtcttgaaggacttcccaggtgcagaagccatggatccagatgaattgcttgttcatgaatgcgatgttcttgtcccttgtgccttgggtggagttctaaacaaggaaaatgctgctgatgtgaaggcaaaatttataatagaagcagcaaatcaccccactgaccctgatgcggatgggatcttgtctaagaaaggagtcattatattacctgatatttatgccaatgctggcggagtgactgtgagctactttgaatgggttcagaatattcaaggtttcatgtgggatgaagagaaagtgaaccgtgagctgaagaagtacatgaccaaagctttccaggatatcaaggcaatgtgtaaaattcacaactgtgacctgcgaatgggggcattcactctaggagtgaaccgtgttgcccgtgctacccttttgaggggttgggaagcatag

SEQ ID NO: 57087 - protein, 412 aa, Glycine max
MNALAATNRNFQRAARILGLDSKLEKSLLIPFREVKVECTIPKDDGTLVSYVGFRIQHDNARGPMKGGIRYHPEVDPDEVNALAQLMTWKTAVADIPYGGAKGGIGCNPRDLSISELERLTRVFTQKIHDLIGIQKDVPAPDMGTNAQTMAWILDEYSKFHGHSPAVVTGKPIDLGGSLGREAATGLGVVFATEALFAEYGKSISDHTFVIQGFGNVGTWAAKSIFERGGKVIAVSDISGAIKNLNGIDILALLKHKDGNGGVLKDFPGAEAMDPDELLVHECDVLVPCALGGVLNKENAADVKAKFIIEAANHPTDPDADGILSKKGVIILPDIYANAGGVTVSYFEWVQNIQGFMWDEEKVNRELKKYMTKAFQDIKAMCKIHNCDLRMGAFTLGVNRVARATLLRGWEA

SEQ ID NO: 57088 - DNA, 1236 bp, Glycine max
  CDS (1)..(1236)
atgaatgcactagcagccaccaacaggaactttaagttggcctctaggcttctgggattggattcaaagcttgagaaaagtttactgattccattcagggaaatcaaggttgaatgtaccatacctaaagatgatggcaccttgcaatcctatgtagggttcagggttcaacatgataatgccagaggccccatgaaaggaggaatcagataccatcctgaggttgaccctgatgaagtgaatgctttagcacaactaatgacatggaaaacagctgtagcaaatataccatatggtggtgccaaaggagggatagggtgtgacccagcagaattaagtatatctgagttagaaagacttactagagtttttacacaaaaaattcatgatttgattggaactcacacagatgtgccagcacctgatatgggaacagggccacagaccatggcatggatactagatgagtattccaaattccacggttactctcctgcagtagtgactggaaaacctatagatcttggtggatctctcggtagagacgcggctacaggacgaggagtcctctttgcaacagaggctttgcttaatgagtatgggaagagtgtatctggacaacggtttgtcatacagggttttggaaatgtagggtcatgggctgcccaattaattagtaataaaggtggaaaagttgttgctgtgagtgacataactggagccataaagaacagcaatggtcttgacatcccaagcctacttgagcattccaaagtgcacaggggagtaaaaggattcaatggtagtgatccaatagaccctaactcaatattggttgaagattgtgatgttctagtcccagcagctcttgggggtgtcatcaatagggaaaatgcaaatgaaatcaaggccaaatttattgtggaagcagctaatcacccaactgacccagaagctgatgagattttgaagaagaaaggggttgtgatcctcccagacatatttgcaaattcaggaggcgttacagttagctactttgagtgggttcagaacatccaaggtttcatgtgggatgaggagaaagtgaacaatgagctaaagacctacatgaccaaaggtttcaaagatgtgaaggaaatgtgcaaaacccatgaatgtgatcttcgtatgggagccttcaccctggcagttaaccgtgtcgcacgtgctactgtccttaggggctgggaagcttga

SEQ ID NO: 57089 - protein, 411 aa, Glycine max
MNALAATNRNFKLASRLLGLDSKLEKSLLIPFREIKVECTIPKDDGTLQSYVGFRVQHDNARGPMKGGIRYHPEVDPDEVNALAQLMTWKTAVANIPYGGAKGGIGCDPAELSISELERLTRVFTQKIHDLIGTHTDVPAPDMGTGPQTMAWILDEYSKFHGYSPAVVTGKPIDLGGSLGRDAATGRGVLFATEALLNEYGKSVSGQRFVIQGFGNVGSWAAQLISNKGGKVVAVSDITGAIKNSNGLDIPSLLEHSKVHRGVKGFNGSDPIDPNSILVEDCDVLVPAALGGVINRENANEIKAKFIVEAANHPTDPEADEILKKKGVVILPDIFANSGGVTVSYFEWVQNIQGFMWDEEKVNNELKTYMTKGFKDVKEMCKTHECDLRMGAFTLAVNRVARATVLRGWEA

SEQ ID NO: 57090 - DNA, 1236 bp, Lupinus luteus
  CDS (1)..(1236)
atgaatgcattagcagccaccaataggaactttaagttagcctctaggcttctgagattggattccaagcttgagaaaagtttgctcattccattcagagaaatcaaggttgagtgttccatacctaaagatgatggcaccttggcaacttatgttggattcaggattcaacatgataatgccagaggccctatgaaaggagggatcagataccaccctgaggtaaatacagatgaagtgaatgctttggcacaactaatgacatggaaaacagctgtagcaaatataccatatggtggtgccaaaggagggatagggtgtgacccagcagaactaagtaattctgagttagaaaggcttactagagtttttacacaaaaaattcatgaccttattggagtccaaatagatgtacctgcacctgatatgggaacaggaccacagaccatggcatggatactagatgaatattccaaatttcatggccattctccggcagtagtgactgggaaacctatagaacttggtggatctcttggcagagatgcagctacaggaagaggagtactctttgcaactgagactttgcttaatgagcatggaaagagtatatcaggacaacggtttgtcatacagggttttggaaatgtggggtcttgggctgcccaattaataagtgaaaaaggtggtatagttgttgcagtgagtgacataacaggagccataaaaaatagcaaaggtcttgatatcccaagcctaatcaaacattcaaaagagcacaagggtgtaaaaggattccatggtggtgacccaattgacccaaaatcaatattcagtgaagactgtgatgttcttgtccctgcagctcttggtggagtcatcaatagggaaaatgcaaatgatatcaaagccaaatttatagttgaagcagctaatcatccaactgacccagaggctgatgagattttgaaaaagaaaggggttgtgatcctaccagatatatttgcaaattctggaggtgttacagttagttactttgagtgggtgcagaacatacaagggttcatgtgggatgaagagaaggtgaacaatgagctaaagagatacatgaccaaaggtttcaaagatgtgaaagaaatgtgtaaaactcatgattgtgatcttcgtatgggagctttcacccttgcagttaaccgtgtggcaagggctactgtccttaggggttgggaggcctaa

SEQ ID NO: 57091 - protein, 411 aa, Lupinus luteus
MNALAATNRNFKLASRLLRLDSKLEKSLLIPFREIKVECSIPKDDGTLATYVGFRIQHDNARGPMKGGIRYHPEVNTDEVNALAQLMTWKTAVANIPYGGAKGGIGCDPAELSNSELERLTRVFTQKIHDLIGVQIDVPAPDMGTGPQTMAWILDEYSKFHGHSPAVVTGKPIELGGSLGRDAATGRGVLFATETLLNEHGKSISGQRFVIQGFGNVGSWAAQLISEKGGIVVAVSDITGAIKNSKGLDIPSLIKHSKEHKGVKGFHGGDPIDPKSIFSEDCDVLVPAALGGVINRENANDIKAKFIVEAANHPTDPEADEILKKKGVVILPDIFANSGGVTVSYFEWVQNIQGFMWDEEKVNNELKRYMTKGFKDVKEMCKTHDCDLRMGAFTLAVNRVARATVLRGWEA

SEQ ID NO: 57092 - DNA, 1365 bp, Saccharomyces monacensis
  CDS (1)..(1365)
atgtccgagccagaatttcaacaagcttatgatgaagttgtctcttcgctagaagactctactcttttcgagcaacatccaaagtacaaaaaggtcttgccaattgtctctgttccagaaagaattatacaattcagagtcacttgggaaaatgacaagggcgaacaagaagttgctcaaggttacagagtgcaatacaactccgctaagggtccatacaagggtggtttgcgtttccatccatctgttaacttgtctattttgaagttcttgggtttcgaacaaattttcaagaactctttgaccggcctagacatgggtggtggtaaaggtggtttgtgtgttgacttgaaaggaagatccaacaacgaaatcagaagaatctgttacgcctttatgagagaactaagcagacacattggtcaagacaccgatgtgccagccggtgatattggtgttggtggccgtgaaatcggttacttgttcggtgcctacagatcatacaagaactcctgggaaggtgtcttgaccggtaaaggtttgaactggggtggttctttgatcagaccagaagccactggttacggtttggtctactacacccaagccatgattgactacgccaccaacggtaaggaatccttcgaaggtaagcgtgtcaccatctctggtagcggtaacgttgctcaattcgccgctttgaaggttatcgaactaggcggtaccgttgtttctctatccgactccaagggttgtatcatctctgagaccggtatcacttccgagcaaattgctgatatctctagtgccaaggtcaatttcaagtccttggagcaaattgttggtgagtattccaccttcactgaaaacaaagtccaatacatttccggtgcccgtccatggacccacgttcaaaaggtcgacattgccttgccatgtgccactcaaaacgaagtcagcggtgacgaagccaaggccttggtcgcccaaggcgtcaagtttgttgccgaaggttccaacatgggttccaccccagaagccattgccgtttttgaaactgctcgtgccacagcctccacactaaaggaatctgtctggtacggtccaccaaaggctgctaacctgggtggtgttgctgtttctggtttggaaatggcccaaaactcccaaagaatcacatggagcagcgaaagagtcgaccaagaattgaagaaaatcatggtcaactgtttcaacgaatgtattgattccgccaaaaagtacactaaggaaggtaacgctttgccatccttagtcaagggtgctaacattgcaagtttcattaaggtctctgatgctatgttcgaccaaggtgatgtattttaa

SEQ ID NO: 57093 - protein, 454 aa, Saccharomyces monacensis
MSEPEFQQAYDEVVSSLEDSTLFEQHPKYKKVLPIVSVPERIIQFRVTWENDKGEQEVAQGYRVQYNSAKGPYKGGLRFHPSVNLSILKFLGFEQIFKNSLTGLDMGGGKGGLCVDLKGRSNNEIRRICYAFMRELSRHIGQDTDVPAGDIGVGGREIGYLFGAYRSYKNSWEGVLTGKGLNWGGSLIRPEATGYGLVYYTQAMIDYATNGKESFEGKRVTISGSGNVAQFAALKVIELGGTVVSLSDSKGCIISETGITSEQIADISSAKVNFKSLEQIVGEYSTFTENKVQYISGARPWTHVQKVDIALPCATQNEVSGDEAKALVAQGVKFVAEGSNMGSTPEAIAVFETARATASTLKESVWYGPPKAANLGGVAVSGLEMAQNSQRITWSSERVDQELKKIMVNCFNECIDSAKKYTKEGNALPSLVKGANIASFIKVSDAMFDQGDVF

SEQ ID NO: 57094 - DNA, 1365 bp, Saccharomyces pastorianus
  CDS (1)..(1365)
atgtccgagccagaatttcaacaagcttatgatgaagttgtctcttcgctagaagactctactcttttcgagcaacatccaaagtacagaaaggtcttgccaattgtctctgttccagaaagaattatacaattcagagtcacttgggaaaatgacaagggcgaacaagaagttgctcaaggttacagagtgcaatacaactccgctaagggtccatacaagggtggtttgcgtttccatccatctgttaacttgtctattttgaagttcttgggtttcgaacaaattttcaagaactctttgactggcctagacatgggtggtggtaaaggtggtttgtgtgttgacttgaaaggaagatccaacaacgaaatcagaagaatctgttacgcctttatgagagaactaagcagacacattggtcaagacaccgatgtgccagccggtgatattggtgttggtggccgtgaaatcggttacttgttcggtgcctacagatcatacaagaactcctgggaaggtgtcttgaccggtaaaggtttgaactggggtggttctttgatcagaccagaagccactggttacggtttggtctactacacccaagccatgattgactacgccaccaacggtaaggaatccttcgaaggtaagcgtgtcaccatctctggtagcggtaacgttgctcaattcgccgctttgaaggttatcgaactaggcggtaccgttgtttctctatccgactccaagggttgtatcatctctgagaccggtatcacttccgagcaaattgctgatatctctagtgccaaggtcaatttcaagtccttggagcaaattgttggtgagtattccaccttcactgaaaacaaagtccaatacatttccggtgcccgtccatggacccacgttcaaaaggtcgacattgccttgccatgtgccactcaaaacgaagtcagcggtgacgaagccaaggccttggtcgcccaaggcgtcaagtttgttgccgaaggttccaacatgggttccaccccagaagccattgccgtttttgaaactgctcgtgccacagcctccacactaaaggaatctgtctggtacggtccaccaaaggctgctaacctgggtggtgttgctgtttctggtttggaaatggcccaaaactcccaaagaatcacatggagcagcgaaagagtcgaccaagaattgaagaaaatcatggtcaactgtttcaacgaatgtattgattccgccaaaaagtacactaaggaaggtaacgctttgccatccttagtcaagggtgctaacattgcaagtttcattaaggtctctgatgctatgttcgaccaaggtgatgtattttaa

SEQ ID NO: 57095 - protein, 454 aa, Saccharomyces pastorianus
MSEPEFQQAYDEVVSSLEDSTLFEQHPKYRKVLPIVSVPERIIQFRVTWENDKGEQEVAQGYRVQYNSAKGPYKGGLRFHPSVNLSILKFLGFEQIFKNSLTGLDMGGGKGGLCVDLKGRSNNEIRRICYAFMRELSRHIGQDTDVPAGDIGVGGREIGYLFGAYRSYKNSWEGVLTGKGLNWGGSLIRPEATGYGLVYYTQAMIDYATNGKESFEGKRVTISGSGNVAQFAALKVIELGGTVVSLSDSKGCIISETGITSEQIADISSAKVNFKSLEQIVGEYSTFTENKVQYISGARPWTHVQKVDIALPCATQNEVSGDEAKALVAQGVKFVAEGSNMGSTPEAIAVFETARATASTLKESVWYGPPKAANLGGVAVSGLEMAQNSQRITWSSERVDQELKKIMVNCFNECIDSAKKYTKEGNALPSLVKGANIASFIKVSDAMFDQGDVF

SEQ ID NO: 57096 - DNA, 1287 bp, Collimonas fungivorans
  CDS (1)..(1287): transl_table=11
atgactatcaagcacgaagttccatcctatctcacgcaacatggcatcggcccatggggcgactacctcgaacaaatcgatcgcgtaacaccttacctcggcaacttggcccgctgggtcgagaccatgaaacgtccgaagcggatgctgatcgtcgacgtccctatcgaacgcgacgacggcaccattgcccacttcgaaggctatcgcgtgcagcacaacacctcgcgcggcccaggcaagggcggcgtgcgtttccaccaggacgtgacgctgtctgaagtgatggccctgtcggcctggatgacggtcaagaacgcggccgtgaacgtgccgtacggcggcgccaagggcggcatccgggttgacccgaagaccttgtcgcaaggcgagctgcagcgcatgacgcgccgttacaccagcgagatcggcatcatcatcggccccaacaaggacatcccggcaccggatgtcaacaccaacgaacagatcatggcctggatgatggatacctattccatgaaccagggcagcaccgcgtcgggcgtggtcaccggcaagccgatttcactgggcggcagcctgggacggcgcgaagccaccggccgcggcgtgttcgtggtgggttgcgaagcagcggtcaagcgcggcctggatatccacggcgccaagattgcggtgcagggtttcgggaatgtcggcggcattgctgcgcggctgttctcggaagccggcgccaaggtggtggcggtgcaagaccatatctcgaccgtggtgcgttccagcggcctcgacgtggcggcgttgcaagcccacgtcaatgaaaccggcagcgtcgccggtttcaagggcggcgaagaaatcagcgaccgtgcgcagttttgggctgtcgattgcgatattttggtgccagctgctctggagcaacaaattaccgtggagaatgcgccgaccatccgcgccaagatcatcctggaaggcgccaacggcccgaccagcccggccgcggacgacatcctgcatgaaaagggcgtgctggtggtgcctgacgtgatcgccaatgccggcggcgtgacggtgagttatttcgaatgggtgcaggatttctccagtttcttctggactgaagatgaaatcaacctgcgcctgacccgcatcatgcgcgaagcgtttaccgcggtctggcaactggccgaagagaagaaggtatcgctgcgcaccgctgcgtttatcgttgcctgtacccgtgtcctgcaggcgcgtgaaatgcgtggtttgtatccttga

SEQ ID NO: 57097 - protein, 428 aa, Collimonas fungivorans
MTIKHEVPSYLTQHGIGPWGDYLEQIDRVTPYLGNLARWVETMKRPKRMLIVDVPIERDDGTIAHFEGYRVQHNTSRGPGKGGVRFHQDVTLSEVMALSAWMTVKNAAVNVPYGGAKGGIRVDPKTLSQGELQRMTRRYTSEIGIIIGPNKDIPAPDVNTNEQIMAWMMDTYSMNQGSTASGVVTGKPISLGGSLGRREATGRGVFVVGCEAAVKRGLDIHGAKIAVQGFGNVGGIAARLFSEAGAKVVAVQDHISTVVRSSGLDVAALQAHVNETGSVAGFKGGEEISDRAQFWAVDCDILVPAALEQQITVENAPTIRAKIILEGANGPTSPAADDILHEKGVLVVPDVIANAGGVTVSYFEWVQDFSSFFWTEDEINLRLTRIMREAFTAVWQLAEEKKVSLRTAAFIVACTRVLQAREMRGLYP

SEQ ID NO: 57098 - DNA, 1239 bp, Oryza sativa subsp
  CDS (1)..(1239)
atgaacgcgctcgccgccaccagccgtaacttccggcaggccgccaggctgctcggcctcgactccaagctcgagaagagcctcctgatcccgttccgcgagatcaaggtggaatgcaccatccccaaagacgatggaaccttggcgtccttcattgggttccgcgtgcagcacgacaatgcccgcgggccaatgaaaggtggcattcgctatcaccctgaggttgatccagatgaagtaaatgcacttgctcaactaatgacatggaagactgctgttgcagcaattccatatggtggagcaaagggtgggattggatgcgctcctggtgaattaagcacgagtgagctggagcgtttgacacgtgtatttacacagaaaattcatgatcttattggagctcatactgacgtgccagctcctgacatgggaactaattcacagaccatggcttggattttggatgagtactcgaaattccatggtcattcaccggcagttgtcactgggaagccaatagtaagtcttggtggatcattaggtagagatgctgctacaggaagaggtgtgatgtacgctactgaggctcttttggctgaacatggaaagtccatttctggatcaacctttgttatccagggttttggtaatgttggttcatgggctgcacgaatcatccatgagaagggtggcaaggtgattgcacttggagatgtgacaggctcaatcagaaacaagaatgggttagacatacctgctctgatgaagcacagaaatgagggtggtgctttgaaagattttcatgatgcggaagtcatggattcttcagagctactagtgcatgaatgcgatgttctcatcccatgcgctttaggtggagtgctcaacagggaaaatgcacctgatgtgaaggccaaatttataattgaagctgctaatcatccaactgatccagaagctgacgagattcttgccaagaagggagtgaccatattacctgacatttacgccaactccggtggtgtgatcgttagctattttgagtgggttcagaacattcaagggttcatgtgggatgaggagaaggtgaacatggagctccacaagtacatgaacaattctttccagcacatcaaggccatgtgtaaatctcatgattgcaacctgaggatgggggcgttcaccctgggagtcaaccgggttgcacgtgccaccctcttgaggggatgggaggcatga

SEQ ID NO: 57099 - protein, 412 aa, Oryza sativa subsp
MNALAATSRNFRQAARLLGLDSKLEKSLLIPFREIKVECTIPKDDGTLASFIGFRVQHDNARGPMKGGIRYHPEVDPDEVNALAQLMTWKTAVAAIPYGGAKGGIGCAPGELSTSELERLTRVFTQKIHDLIGAHTDVPAPDMGTNSQTMAWILDEYSKFHGHSPAVVTGKPIVSLGGSLGRDAATGRGVMYATEALLAEHGKSISGSTFVIQGFGNVGSWAARIIHEKGGKVIALGDVTGSIRNKNGLDIPALMKHRNEGGALKDFHDAEVMDSSELLVHECDVLIPCALGGVLNRENAPDVKAKFIIEAANHPTDPEADEILAKKGVTILPDIYANSGGVIVSYFEWVQNIQGFMWDEEKVNMELHKYMNNSFQHIKAMCKSHDCNLRMGAFTLGVNRVARATLLRGWEA

SEQ ID NO: 57100 - DNA, 1347 bp, Chlamydomonas reinhardtii
  CDS (1)..(1347)
atggaggcaaggacagtgtcagtgcttgcggggctcgcgcaccgagtcgcgagtgcagcatggaggagtgccagcggtctgcggacttgcaccactacgacgccaacgtacgggagaacgtccgtctacgtcaaggaggctctggaccttctggacttcgaccctcaggttgagaaggccatcctcaaccccgaccgcgaagtaacggtgaacctggtggtgcccatggacaatggcgaggtcaacatgttccccgcctaccgggtgcagcacaacaacgcgctggggcccttcaagggcggcatcatctaccaccccggtgtcaccctggagaacatgcgcaacctggcctcgctcaacacgtggaagttcagcctgctcaatgtgcagttcggcggcgccaagggcggcgtgggggtggacccgcgcagcctcagcgagcgcgagacggagaaactgacacgcaagtacgtgcaggccctgcaggaggtgattgggccgcacactgacatccccgcgcccgacatcaacacggacgagcaccacatggcctggatctttgaccaatactcccgactgcgcggcttcgcgcccgccgccgtcacaggcaagccgacgtggctgcacggcattgtgggtcgcgacaaggccggcggccgcggcgccgccatcgccacccgggagttcctgacccgctccctgaggcgcaaggtggcgggcacgtccttcctcatccagggcttcggcaagctgggcagctggacggcgcagatcctgcagcaggagatgggcgccaagattgtgggcgtatcctgctccgagactgccgtgtacaacgaggaggggctggacatcccggcgctgagggcgcacgtggcggcgggggggctgctcaaagacttccccggcggcacgggtgtgctcaacgacgactcattcctggacctgccggccgacgtgttcattccctgcgccgtggacggaaccattcacgccggcaacgtccaccgctgcgtcaacttcaaggcggtggtggaggcagccaacggcgccctgacgcccgaggcggacgcggcactgcgcaaggccggcgtgccggtgctgcccgacctgatcgccaacgggggcgccgtggtcgtgtcgttcttcgagtgggtgcagaacaaccaaaacatgcagtgggaggaggacgacgtgaagcgcgagctggaccgctacctgaccgacgcgttcgaggcgctgctgcgcgagcagtcgctgcacgccggctgcagcctgcgcacggccggctacctggtggcactgaggcggctgcagcaggccgattccgtgcgcggccactcctag

SEQ ID NO: 57101 - protein, 448 aa, Chlamydomonas reinhardtii
MEARTVSVLAGLAHRVASAAWRSASGLRTCTTTTPTYGRTSVYVKEALDLLDFDPQVEKAILNPDREVTVNLVVPMDNGEVNMFPAYRVQHNNALGPFKGGIIYHPGVTLENMRNLASLNTWKFSLLNVQFGGAKGGVGVDPRSLSERETEKLTRKYVQALQEVIGPHTDIPAPDINTDEHHMAWIFDQYSRLRGFAPAAVTGKPTWLHGIVGRDKAGGRGAAIATREFLTRSLRRKVAGTSFLIQGFGKLGSWTAQILQQEMGAKIVGVSCSETAVYNEEGLDIPALRAHVAAGGLLKDFPGGTGVLNDDSFLDLPADVFIPCAVDGTIHAGNVHRCVNFKAVVEAANGALTPEADAALRKAGVPVLPDLIANGGAVVVSFFEWVQNNQNMQWEEDDVKRELDRYLTDAFEALLREQSLHAGCSLRTAGYLVALRRLQQADSVRGHS

SEQ ID NO: 57102 - DNA, 1674 bp, Tigriopus californicus
  CDS (1)..(1674)
atgtcctcgatcttagctcaaggggccaaaatggcccttggcaagaccttgaccaacgggtctgtgggcgtggtggggcctgccatggcctcggctcatttccattccaaaagtgccgccctgcaaagatgggagatccccgagagacttctggacatccccaactcggagaatccgaatttcttcaatatggtggagtatttctttcacaaggcctgtattttggccgaagagcctttgatgaaagagttgtccagaatgagaggcacaagtgacgacgagaaacgccaaaaagtccatggtatcttgaagatcatcgagccttgctcccacgtcctcgagatgaacttccctcttcaacgagatgatggctcctatgaaatgatcaccggctaccgagcccagcattcgcatcatcgcaccccttgtaagggtggtatccgttactccatggatgtcaatgctgatgaggtcaaggccttgtccgccttgatgacctacaagtgcgcttgtgtggatgtgccatttgggggcggtaaagccggcgtcaagatcgatcccaaggcgtactctgacaacgaattggagaagatcactcgacgattcgccatggaacttgccaagaagggattcctcggacccggcattgacgtgcccgctcctgatatgggaaccggcgagagagaaatgtcctggattgcggacacttatgccaacacgatgggttatagcgatatcaatgcctcagcttgtgtcacgggcaagcctatccatcagggtggtattcacggaaggactgccgccactggccgtggtgttttccacggtttggaaaactttgtcaacgaggcccagtacatgtccatgattggcaacacccccggatggggcggtaagacctttattgtgcaaggtttcggtaatgtgggtcttcataccatgcgctacctcactcgcgctggggcccgatgcgttggtgtcctcgaatgggatggtgccatcatgaacaacgacggtatcgaccccaaggctttggaagactaccgaaacgaaaagggcaccatcgtgggttatccaggagctcaggcttatgagaacaaagatgatttgatgttcgagaaatgcgatattctcattcctgctgccatggaaaagtgtattcattccggaaatgctcatcgcatccaagctaagattatcgccgaggcagccaatggcccaatcacgcccagtgcggacaaagttctccgtgagaacggttgcctcatcatccccgacatgtatgtgaacgctggaggtgtgaccgtttcctactttgaatggctcaagaatctgaaccacgtctcttatggaagactgaccttcaagtacgaacgggagtcgaactatcatcttcttcaatccgtccaagactctttggagagacgtttcggtcgcgttggaggtcgaatcccagttactccctcaggcgagttcgaaacccgtatgtctggagcttccgagaaggacattgttcactctggattagactattccatggagagaactgcccgagctatcatgaataccgctatcaactacgatttgggcttggacctcaggacggctgcctatatcaatgcaattacgaagatctttaagacctatagggatgctggactcacgttcaactga

SEQ ID NO: 57103 - protein, 557 aa, Tigriopus californicus
MSSILAQGAKMALGKTLTNGSVGVVGPAMASAHFHSKSAALQRWEIPERLLDIPNSENPNFFNMVEYFFHKACILAEEPLMKELSRMRGTSDDEKRQKVHGILKIIEPCSHVLEMNFPLQRDDGSYEMITGYRAQHSHHRTPCKGGIRYSMDVNADEVKALSALMTYKCACVDVPFGGGKAGVKIDPKAYSDNELEKITRRFAMELAKKGFLGPGIDVPAPDMGTGEREMSWIADTYANTMGYSDINASACVTGKPIHQGGIHGRTAATGRGVFHGLENFVNEAQYMSMIGNTPGWGGKTFIVQGFGNVGLHTMRYLTRAGARCVGVLEWDGAIMNNDGIDPKALEDYRNEKGTIVGYPGAQAYENKDDLMFEKCDILIPAAMEKCIHSGNAHRIQAKIIAEAANGPITPSADKVLRENGCLIIPDMYVNAGGVTVSYFEWLKNLNHVSYGRLTFKYERESNYHLLQSVQDSLERRFGRVGGRIPVTPSGEFETRMSGASEKDIVHSGLDYSMERTARAIMNTAINYDLGLDLRTAAYINAITKIFKTYRDAGLTFN

SEQ ID NO: 57104 - DNA, 1368 bp, Ruminococcus flavefaciens
  CDS (1)..(1368): transl_table=11
atggcgttaaaaaatcagtatctcaaggaattattagaaagagtagaaaagagaaatccgggcgagcctgagttcatccaggctgttacagaagtcctcgaaacacttcagcccgtagctgaaaagagacaggatctcatcgacgcaggcgttttcgagcgtatcgtagagcctgagcgtcagatcattttccgtgtgccttgggttgacgacaacggcaaggttcaggtaaacagaggtttcagagtacagttcaattctgctatcggaccttacaagggcggtatcagacttcacccatcagtatatctcggtatcatcaagttcctcggcttcgagcaggtattcaagaacagccttacaactctgcctatgggcggcggcaagggcggttccgacttcgatcctaagggtaagagcgacggagagatcatgcgtttctgccagagcttcatgacagagctctcaaagcacatcggcgctgactgcgacgttcctgccggtgatatcggaacaggcgcaagagagatcggtttcatgttcggtcagtacaagagactccgcaacgagttcgttggcgttctcacaggtaagggccttacatacggcggttctctcgcaagaacagaggctacaggttacggtctctgctacttcacaaacgaaatgctccaggctaacggcaagagcttcgagggcaagacagttgttatctcaggttcaggcaacgttgctatctacgctacagaaaaggctacacagtacggtgctaaggtcgttactgtttcaggttcaaacggctacatctacgatcccgacggaatcgagcttgatctcgttaagcagatcaaggaggttgagcgtggccgtatcaaggagtacgcttcaagaacatctcacaagaacgctgagtaccacgagggcagcgtttggacactgaagtgcaatgcaggcggcatcaagctcgatatcgctcttccttgcgctacacagaacgagatcaacggtgacggtgctaaggctatcgttgctaacggcggtttcgctatcgctgagggcgcaaatatgccttcaactcctgaggctatcgagacatatctctcaaacggtctcctctatggtcctgctaaggctgctaacgcaggcggcgttgctacatcaggtcttgaaatgtcacagaacagcgagagactcagctggacatttgaagaagttgacgagaagctccacggcatcatgaagtctatcttcaaggcttgcgacgatgctgctaaggagtacggcatggctggcaactacatggcaggcgctaacatcgctggcttccttaaggttgctgaagctatgaaggctcagggctgcgtttga

SEQ ID NO: 57105 - protein, 455 aa, Ruminococcus flavefaciens
MALKNQYLKELLERVEKRNPGEPEFIQAVTEVLETLQPVAEKRQDLIDAGVFERIVEPERQIIFRVPWVDDNGKVQVNRGFRVQFNSAIGPYKGGIRLHPSVYLGIIKFLGFEQVFKNSLTTLPMGGGKGGSDFDPKGKSDGEIMRFCQSFMTELSKHIGADCDVPAGDIGTGAREIGFMFGQYKRLRNEFVGVLTGKGLTYGGSLARTEATGYGLCYFTNEMLQANGKSFEGKTVVISGSGNVAIYATEKATQYGAKVVTVSGSNGYIYDPDGIELDLVKQIKEVERGRIKEYASRTSHKNAEYHEGSVWTLKCNAGGIKLDIALPCATQNEINGDGAKAIVANGGFAIAEGANMPSTPEAIETYLSNGLLYGPAKAANAGGVATSGLEMSQNSERLSWTFEEVDEKLHGIMKSIFKACDDAAKEYGMAGNYMAGANIAGFLKVAEAMKAQGCV

SEQ ID NO: 57106 - DNA, 1236 bp, Nicotiana tabacum
  CDS (1)..(1236)
atgaatgctttagcagcaacaaatagaaactttaagctggcagctcgactgctcggtttagactctaagctggaaaagagtctgctaatcccctttagagaaattaaggtggagtgtacaataccaaaagatgatggctcattggcatcttttgttggattcagagtacaacatgacaatgctcgcgggcctatgaaaggcggaatcagataccatcctgaggttgacccggatgaggtaaatgccttagcacagctaatgacatggaaaacagcagtagccaatataccatatggtggggctaaagggggcataggatgtagtcctagtgacctgagtaactctgagctagaacgacttactcgagtatttactcaaaaaatacatgacctgatcggaattcacactgatgttccggcaccagatatgggaacaaatccacagacaatggcatggattctcgacgagtactcaaaatttcatggttattcacctgcagttgtcaccggaaaacctattgatcttggtggatccttaggcagagatgcagctaccggaaggggtgttctctttgttacggaagcactggtaaaagagcatggcaagagtattgctgggcagcgttttgttatacagggatttgggaatgttggttcctgggcagcaaaactcatcaatgagcaaggtgggaaaatcgttgcagtaagtgacataacaggcgccataaagaacgagaatggactcaacatagcaagcctactcaaacacgtgaaggaaaatcgtggagttaaaggtttcaatgatgcacgtccaatagatccacattcaatactagtagaagattgtgatgttcttataccagctgcccttggcggagtaatcaacagggataatgcaaatgatattaaagccaaatatattattgaggcagctaaccatccgactgatccagaagctgatgagattttggcaaagaaaggagttgtcatcctaccagacatatacgctaattcaggtggtgtcaccgttagttattttgagtgggttcagaacatccagggctttatgtgggatgaggataaagtgaatgctgagttgaagacatacatgacaagaggctttaaagatgtcaaggatatgtgcaagactcacaactgtgatctccgaatgggtgccttcacgctgggcgttaatcgtgtagctagagcgactgttctaaggggatgggaagcttga

SEQ ID NO: 57107 - protein, 411 aa, Nicotiana tabacum
MNALAATNRNFKLAARLLGLDSKLEKSLLIPFREIKVECTIPKDDGSLASFVGFRVQHDNARGPMKGGIRYHPEVDPDEVNALAQLMTWKTAVANIPYGGAKGGIGCSPSDLSNSELERLTRVFTQKIHDLIGIHTDVPAPDMGTNPQTMAWILDEYSKFHGYSPAVVTGKPIDLGGSLGRDAATGRGVLFVTEALVKEHGKSIAGQRFVIQGFGNVGSWAAKLINEQGGKIVAVSDITGAIKNENGLNIASLLKHVKENRGVKGFNDARPIDPHSILVEDCDVLIPAALGGVINRDNANDIKAKYIIEAANHPTDPEADEILAKKGVVILPDIYANSGGVTVSYFEWVQNIQGFMWDEDKVNAELKTYMTRGFKDVKDMCKTHNCDLRMGAFTLGVNRVARATVLRGWEA

SEQ ID NO: 57108 - DNA, 1236 bp, Solanum lycopersicum
  CDS (1)..(1236)
atgaatgctttagcagcaactaatagaaattttaagctggcagctaggcttcttggtttagactcaaagttggaactaagtctgctaatccctttcagagaaattaaggtggagtgtactataccgaaggatgatggcacattggcatcttttgttggattcagggtacagcacgacaatgcacgagggcctatgaaaggcggaatcagataccaccgggaggttgatcctgatgaggtgaatgcattagcacagctaatgacatggaagacagcggtcgccaatataccatatggtggggctaaaggaggaataggatgtagtcctagtgacctgagtatctctgagttggaacgacttactcgagtatttactcaaaaaatacatgacctaatcggaattcacaccgatgttcctgcaccagatatgggaacaaatcctcagacaatggcatggattttagacgagtactcaaaatttcatggttattcacctgctgtggtaactggaaaacctgttgatctcggtggatctctaggcagagatgcagctactggaaggggggctctctttgctacagaagccctgcttaatgagcatgggaagagtgttgctggtcagcgttttgttatacagggatttggtaatgttggttcctgggctgcaaaactcatccatgagcaaggtgggaaagttgtagcagtgagtgacataactggtgccataaagaatgagaagggaatcgacatagaaagcctattcaaacacgtgaaggaaactcgtggagttaaaggtttccatgatgcacaaccaattgatgcaaattcaatactggtagaagactgtgatgttcttatgccagctgccctcggtggagtaatcaacaaggataacgcaaatgaaattaaagccaaatatattattgaggctgctaaccatccaactgatccagaagctgatgagattttgtcaaagaaaggagtcaccatcctaccggatatttatgccaactcgggtggtgtcaccgtcagttattttgagtgggtccagaacatccaaggctttatgtgggatgagaaaaaagtgaatgatgagttgaagacatacatgacaagaggttttaaagatgtcaaggatatgtgcaagactcacaactgtgacctccgaatgggcgccttcaccttaggtgttaaccgtgtagctagagcaaccgttcttcgaggatgggaggcgtaa

SEQ ID NO: 57109 - protein, 411 aa, Solanum lycopersicum
MNALAATNRNFKLAARLLGLDSKLELSLLIPFREIKVECTIPKDDGTLASFVGFRVQHDNARGPMKGGIRYHREVDPDEVNALAQLMTWKTAVANIPYGGAKGGIGCSPSDLSISELERLTRVFTQKIHDLIGIHTDVPAPDMGTNPQTMAWILDEYSKFHGYSPAVVTGKPVDLGGSLGRDAATGRGALFATEALLNEHGKSVAGQRFVIQGFGNVGSWAAKLIHEQGGKVVAVSDITGAIKNEKGIDIESLFKHVKETRGVKGFHDAQPIDANSILVEDCDVLMPAALGGVINKDNANEIKAKYIIEAANHPTDPEADEILSKKGVTILPDIYANSGGVTVSYFEWVQNIQGFMWDEKKVNDELKTYMTRGFKDVKDMCKTHNCDLRMGAFTLGVNRVARATVLRGWEA

SEQ ID NO: 57110 - DNA, 1236 bp, Brassica napus
  CDS (1)..(1236)
atgaatgctttagccgcaacgaacaggaacttccgtcatgcctcacgaatcctcggtttggattccaagatcgagaagagtctcatgatcccattcagagaaatcaaggtggagtgcacgatccccaaagacgacggaacgcttgtctcctacgttggattcagggttcaacacgacaatgctcgtggacccatgaaaggaggaatcagataccaccccgaggttgatcccgatgaagtcaacgcattggctcagctcatgacttggaagacagctgtcgctgacattccgtacggtggagctaaaggtgggatcggatgcaaccctcgtgacttgagcttgagcgagctcgagagacttacacatgtcttcactcagaagatccatgatctcatcggtattcacaccgatgtccctgctcctgacatgggtactaatgctcagacaatggcttggattcttgatgagtactccaagtttcatggtcattcccctgctgttgtcaccggcaagcccattgatcttggtggttcacttggtagggaagctgccacaggacgtggtgtagtctatgcaaccgaagctctccttgctgaatacggcaaatcgattaagggattgacatttgttgttcagggttttgggaatgttggaacatgggcagccaagctgatccatgagaaaggtgggaaagtggttgcagtaagcgacatcacaggtgctgtcagaaaccctgaaggtctagacatcgacgctcttctgagtcacaaagaagcaactggaagtctagttgatttcagtggtggagacgctatggactcaaacgaactgcttatccatgagtgtgatgttctcattccttgtgctcttggtggtgtcctgaacaaggaaaatgctggagatgtgaaggcaaagttcataatagaggctgcaaaccatccaacagatccagatgctgatgagattctgtcgaagaaaggagtgattatactaccagatatatacgcaaacgcaggaggagtgacggtgagttactttgagtgggtccagaacattcaagggttcatgtgggaagaggaaaaagtgaacctggagctgcagaagtacatgactcgtgcctttcacaacatcaagtcaatgtgccatactcattcctgtaacctccgtatgggagctttcactcttggagttaaccgtgtcgctagagccacccagttgcgtggttgggaagcttaa

SEQ ID NO: 57111 - protein, 411 aa, Brassica napus
MNALAATNRNFRHASRILGLDSKIEKSLMIPFREIKVECTIPKDDGTLVSYVGFRVQHDNARGPMKGGIRYHPEVDPDEVNALAQLMTWKTAVADIPYGGAKGGIGCNPRDLSLSELERLTHVFTQKIHDLIGIHTDVPAPDMGTNAQTMAWILDEYSKFHGHSPAVVTGKPIDLGGSLGREAATGRGVVYATEALLAEYGKSIKGLTFVVQGFGNVGTWAAKLIHEKGGKVVAVSDITGAVRNPEGLDIDALLSHKEATGSLVDFSGGDAMDSNELLIHECDVLIPCALGGVLNKENAGDVKAKFIIEAANHPTDPDADEILSKKGVIILPDIYANAGGVTVSYFEWVQNIQGFMWEEEKVNLELQKYMTRAFHNIKSMCHTHSCNLRMGAFTLGVNRVARATQLRGWEA

SEQ ID NO: 57112 - DNA, 1266 bp, Ulva pertusa
  CDS (1)..(1266)
atgtttggggcactgtccaaagccgttggaagcgtctgctcccgtcagggccaggcagctgtaacaggactggggtccgtgacgggtcatcaggtcaggcgcgctggacatgcggagaacaccaatacattcatccgagaggcactggcggtgctggatcttccccctgcgatggaaaaaattgtgatcacacctcagcgggaaatgacggtggagcttatcattaatcgtgacgatggcaaaccagaaagtttcatgggatatcgtgtgcaacatgacaatgcacgggggccattcaaagggggtttgagatttcataaagatgcagatctggacgatgttcgaagccttgcttcactgatgagcttcaagacggcattgttggatgtgccgttcggaggggcaaaaggtggcattactgtggacacaaaggcgttatctgagcatgagatagaaaaactcacccgcaaatttgttcagatttttgacgagtattcaaagtttgaaggttactctcccggtgtcgtaactggcaagccaacgtggctgcatggtagccatggtcgagagtccgcaacagggcggggtacagtctttggaatcaaaaacatgttgcaagcgttcggtgagggccctccagcggacaaaacttttgcaattcagggctttggaaacgtgggtgcttgggctgggcgtctgctggcggagcaaggagggattgtaaaagctgtcagtgatgcaagcggttgcgtttatgatgacggacctagcggcattgatgttcccaagttgttgaggcatttgcaccggggcgatgacctaagcaagtacccacatggccagcagctgctacgggatgaaatttttgacgtgaagtgtgacgtgtttgtcccagctgctttgggaggggtaatcacagatcctgtcgcaaggaagatatcatgcaagtatattgtggaagcagcaaatggacctacaactccctcggcagaccttattctccgcgaccgtggtatcccagtgctgccggatatctataccaatgctggaggggtgactgtgagcttcttggaatgggtacagaatttgcagaatttcaagtggaccactgaacaagtcaatgatcaattaaagacccggatggatgaggcattccagagtatgtgggacagcagtcaagagcatggtgttcctttgcgtacgggagctttcactgtcagtctaaggcgtgttgtgcgagcaacggtgaacagaggctttaactaa

SEQ ID NO: 57113 - protein, 421 aa, Ulva pertusa
MFGALSKAVGSVCSRQGQAAVTGLGSVTGHQVRRAGHAENTNTFIREALAVLDLPPAMEKIVITPQREMTVELIINRDDGKPESFMGYRVQHDNARGPFKGGLRFHKDADLDDVRSLASLMSFKTALLDVPFGGAKGGITVDTKALSEHEIEKLTRKFVQIFDEYSKFEGYSPGVVTGKPTWLHGSHGRESATGRGTVFGIKNMLQAFGEGPPADKTFAIQGFGNVGAWAGRLLAEQGGIVKAVSDASGCVYDDGPSGIDVPKLLRHLHRGDDLSKYPHGQQLLRDEIFDVKCDVFVPAALGGVITDPVARKISCKYIVEAANGPTTPSADLILRDRGIPVLPDIYTNAGGVTVSFLEWVQNLQNFKWTTEQVNDQLKTRMDEAFQSMWDSSQEHGVPLRTGAFTVSLRRVVRATVNRGFN

SEQ ID NO: 57114 - DNA, 1344 bp, Ulva pertusa
  CDS (1)..(1344)
atgtttggggcactgtccaaagccgttggaagcgtctgctcccgtcagggccaggcagctgtaacaggactggggtccgtgacgggtcatcaggtcaggcgcgctggacatgcggagaacaccaatacattcatccgagaggcactggcggtgctggatcttccccctgcgatggaaaaaattgtgatcacacctcagcgggaaatgacggtggagcttatcattaatcgtgacgatggcaaaccagaaagtttcatgggatatcgtgtgcaacatgacaatgcacgggggccattcaaagggggtttgagatttcataaagatgcagatctggacgatgttcgaagccttgcttcactgatgagcttcaagacggcattgttggatgtgccgttcggaggggcaaaaggtggcattactgtggacacaaaggcgttatctgagcatgagatagaaaaactcacccgcaaatttgttcaggaaatcaaggacatcatcgggcccttccgtgacatacctgcaccagatgtgggcaccgatggccgggtgatggcctggatttttgacgagtattcaaagtttgaaggttactctcccggtgtcgtaactggcaagccaacgtggctgcatggtagccatggtcgagagtccgcaacagggcggggtacagtctttggaatcaaaaacatgttgcaagcgttcggtgagggccctccagcggacaaaacttttgcaattcagggctttggaaacgtgggtgcttgggctgggcgtctgctggcggagcaaggagggattgtaaaagctgtcagtgatgcaagcggttgcgtttatgatgacggacctagcggcattgatgttcccaagttgttgaggcatttgcaccggggcgatgacctaagcaagtacccacatggccagcagctgctacgggatgaaatttttgacgtgaagtgtgacgtgtttgtcccagctgctttgggaggggtaatcacagatcctgtcgcaaggaagatatcatgcaagtatattgtggaagcagcaaatggacctacaactccctcggcagaccttattctccgcgaccgtggtatcccagtgctgccggatatctataccaatgctggaggggtgactgtgagcttcttggaatgggtacagaatttgcagaatttcaagtggaccactgaacaagtcaatgatcaattaaagacccggatggatgaggcattccagagtatgtgggacagcagtcaagagcatggtgttcctttgcgtacgggagctttcactgtcagtctaaggcgtgttgtgcgagcaacggtgaacagaggctttaactaa

SEQ ID NO: 57115 - protein, 447 aa, Ulva pertusa
MFGALSKAVGSVCSRQGQAAVTGLGSVTGHQVRRAGHAENTNTFIREALAVLDLPPAMEKIVITPQREMTVELIINRDDGKPESFMGYRVQHDNARGPFKGGLRFHKDADLDDVRSLASLMSFKTALLDVPFGGAKGGITVDTKALSEHEIEKLTRKFVQEIKDIIGPFRDIPAPDVGTDGRVMAWIFDEYSKFEGYSPGVVTGKPTWLHGSHGRESATGRGTVFGIKNMLQAFGEGPPADKTFAIQGFGNVGAWAGRLLAEQGGIVKAVSDASGCVYDDGPSGIDVPKLLRHLHRGDDLSKYPHGQQLLRDEIFDVKCDVFVPAALGGVITDPVARKISCKYIVEAANGPTTPSADLILRDRGIPVLPDIYTNAGGVTVSFLEWVQNLQNFKWTTEQVNDQLKTRMDEAFQSMWDSSQEHGVPLRTGAFTVSLRRVVRATVNRGFN

SEQ ID NO: 57116 - DNA, 1260 bp, Thermococcus waiotapuensis
  CDS (1)..(1260): transl_table=11
atggttgaactcgacccgtttgaaatggctgttcagcagctcgagagggctgcccagttcatggacataagcgaagaggccctcgagtggctcaagaggcccatgaggattgtggaggttagcgttccagtagagatggacgacggttctgtcaaggttttcaccggtttccgcgttcagcacaactgggcccgcggtccgaccaagggtggtataaggtggcacccagccgagaccctcagcaccgttaaggctctggcaacctggatgacctggaaggttgccgtcgttgacctcccctacggtggaggtaagggtggcatcatcgttgacccgaagaagctctccgagagggagcaggagaggctcgcccgctcatacataagggccgtttacgatgtcatcggcccatggagcgacatccctgccccggacgtttacaccaacccgaagatcatgggctggatgatggacgagtacgagaccataatgaggcgcacgggcccggccttcggtgtcatcaccggaaagccgctcagcatcggcggttcacttggcaggggcaccgccacagcccagggtgccattttcaccatcagggaagccgctaaggccctcggcatcgacctcaagggcaagaccatcgccgtccagggctatggtaacgccggctactacaccgccaagctcgccaaggagcagctcggcatgaaggtcgtcgctgtaagcgacagccagggcggcatttacaacccgaacggccttgacccggacgaggttctcaagtggaagaacgaaaccggctcagttaaggacttcccaggggccaccaacatcagcaacgaggagctcctcgagcttgaagttgaggtactcgccccggcggcaatagagggagtcatcaccgagaagaacgccgatggagtcaaggccaagatcgttgccgaagtcgccaacggtcctgttactccggaggccgacgagatcctccgcgagaagggcatcctccagattccggacttcctgtgcaacgccggtggtgccaccgtcagctacttcgagtgggtccagaacatcaacggctactactggaccgaggaggaggtccgcgagaagctcgacaagaagatgaccaaggccttctgggacgtctacaacaccgccaaggagaagaacatccacatgcgcgacggtgcctacgtcgttgccgtcagcaaggtctatcaggccatgaaagaccgcggatgggtcaagcactga

SEQ ID NO: 57117 - protein, 419 aa, Thermococcus waiotapuensis
MVELDPFEMAVQQLERAAQFMDISEEALEWLKRPMRIVEVSVPVEMDDGSVKVFTGFRVQHNWARGPTKGGIRWHPAETLSTVKALATWMTWKVAVVDLPYGGGKGGIIVDPKKLSEREQERLARSYIRAVYDVIGPWSDIPAPDVYTNPKIMGWMMDEYETIMRRTGPAFGVITGKPLSIGGSLGRGTATAQGAIFTIREAAKALGIDLKGKTIAVQGYGNAGYYTAKLAKEQLGMKVVAVSDSQGGIYNPNGLDPDEVLKWKNETGSVKDFPGATNISNEELLELEVEVLAPAAIEGVITEKNADGVKAKIVAEVANGPVTPEADEILREKGILQIPDFLCNAGGATVSYFEWVQNINGYYWTEEEVREKLDKKMTKAFWDVYNTAKEKNIHMRDGAYVVAVSKVYQAMKDRGWVKH

SEQ ID NO: 57118 - DNA, 1236 bp, Vitis vinifera
  CDS (1)..(1236)
atgaatgctctagcagccacaaaccgcaattttcgccatgcttcccgcattcttgggttggactccaagctggagaagagtcttctgatacctttcagagagatcaaggtggagtgcacgattccgaaggatgatggaagcctggcgacgtatgtggggttccgtgtgcagcatgataatgctcgtgggcccatgaagggagggatcagatatcaccctgaggtggatcctgatgaggtaaatgccctggctcaattgatgacatggaagaccgccgtagtcgacattccctatggtggtgcaaagggtggcattgggtgcaccccaaaggacttgagtatgagcgagttggaacgtctcactcgtgtctttactcaaaagattcatgatcttattggaactcatactgatgtacctgcaccggacatgggaactaatgctcagactatggcatggattttggacgagtactcaaaattccatggtcactcaccggccgtagtgactggaaagccaatagctcttggtggttccctcggtagggaggctgcaactggtcgaggtgttgttttcgcaactgaagctttacttgcgcaacatgggaagtcaatcaagggtttgacatttgttattcagggttttggcaatgttggatcttgggtagcaagactcatcggtgagagaggtggtaaaatcatagcggtgagcgacgtcactggagctgttaagaaccaaaatgggcttgatatagtggatttgcttaggcacaaagaagagactggttgtctaacgaatttcagtggcggagatcacatggatccgaatgaactgctcacacatgaatgtgatgttctcatcccatgtgctctaggtggagttcttaacaaagaaaatgctgcggatgttaaggcaaagttcataatagaagcagcaaatcatcctactgatccagaagctgatgagattctatccaagaagggagttgtaatccttcccgacatctatgctaatgctggaggtgtgaccgtgagctattttgagtgggttcagaatattcaaggttttatgtgggaagaagagaaggtgaataatgagcttcagaagtacatgaccaaagcttttcataacattaaggcaatgtgtcaatcgcacaactgcagtcttcgaatgggagccttcacattggcagtgaatcgagttgcttgtgccacaacgctaaggggttgggaagcttag

SEQ ID NO: 57119 - protein, 411 aa, Vitis vinifera
MNALAATNRNFRHASRILGLDSKLEKSLLIPFREIKVECTIPKDDGSLATYVGFRVQHDNARGPMKGGIRYHPEVDPDEVNALAQLMTWKTAVVDIPYGGAKGGIGCTPKDLSMSELERLTRVFTQKIHDLIGTHTDVPAPDMGTNAQTMAWILDEYSKFHGHSPAVVTGKPIALGGSLGREAATGRGVVFATEALLAQHGKSIKGLTFVIQGFGNVGSWVARLIGERGGKIIAVSDVTGAVKNQNGLDIVDLLRHKEETGCLTNFSGGDHMDPNELLTHECDVLIPCALGGVLNKENAADVKAKFIIEAANHPTDPEADEILSKKGVVILPDIYANAGGVTVSYFEWVQNIQGFMWEEEKVNNELQKYMTKAFHNIKAMCQSHNCSLRMGAFTLAVNRVACATTLRGWEA

SEQ ID NO: 57120 - DNA, 1368 bp, Debaryomyces hansenii
  CDS (1)..(1368)
atggtcttacctcacgaaccagaatttcaacaagcttacaacgaattagtttctgctttagaagactctactttatttaccgaaaaaccagaatacaaaaaggttattccagttgtttcggtcccagaaagaattatccaattcagagttgcatgggaaaacgacaacggtgatgttgaggtcaacaacggttacagagtgcaattcaactcggcgttaggtccattcaagggtggtttaagattccatccatctgtcaacttgtcgattttgaagtttttgggtttcgaacaaatcttcaaaaacgctttgaccggtttatccatgggtggtggtaaaggtggttgtgacttcaacccaaagggtagaaccgactctgaaatcagaagattctgtgttgctttcatgagacaattagccagatacattggcagtgacaccgatgttccagctggtgatattggtgttggtagccgtgaagttggttacatgttcggtgcttacaagcaaatgcaaaacaactggtctggtattttgaccggtaagggtttaagctggggtggttctttaatccgtcctgaagctactggttacggtgttgtctacttcgtcgaaaagatgattgaaaaggccactggaggtaaggaatccttcaagggtaagagagttgcaatctctggttcaggtaacgttgctcaatacgccgccttaaaggttattgagttaggttctaccgttgtttccttatccgactctaagggttgtatcatctcccaaactggtattactccagatcaaatcaaggccatcgctgcagctaagatacacttcaagactttggaagaaattaccaaggagtccgcatcgctcttctccggctctaacgaagttcaatacattgctggtgttcgtccatggacccactgtggccaagttgacgttgctttaccatctgctactcaaaatgaagtttctggtgaagaagcaaaggctttagttgaagctggctgtaagttcgtcgctgaaggttccaatatgggttctaccaaggaagctatcgatgtttttgaagccaacagatctaaggctgtatggtacgctccaggtaaggctgccaactgtggtggtgttgctgtctctggtttagaaatggcacaaaactctcaaagagttacttgggctgctgaagaagtcgacgaaaagttgaagaacattatgtacacttgtttcgataactgttacgctaatgctgctaaatactctgctgaaaaggatgcagaaaatttaccatctttattaaagggtgctaacatcactggtttcatcaaggtcgccgatgctatgtttgaccaaggtgaagtcttttaa

SEQ ID NO: 57121 - protein, 455 aa, Debaryomyces hansenii
MVLPHEPEFQQAYNELVSALEDSTLFTEKPEYKKVIPVVSVPERIIQFRVAWENDNGDVEVNNGYRVQFNSALGPFKGGLRFHPSVNLSILKFLGFEQIFKNALTGLSMGGGKGGCDFNPKGRTDSEIRRFCVAFMRQLARYIGSDTDVPAGDIGVGSREVGYMFGAYKQMQNNWSGILTGKGLSWGGSLIRPEATGYGVVYFVEKMIEKATGGKESFKGKRVAISGSGNVAQYAALKVIELGSTVVSLSDSKGCIISQTGITPDQIKAIAAAKIHFKTLEEITKESASLFSGSNEVQYIAGVRPWTHCGQVDVALPSATQNEVSGEEAKALVEAGCKFVAEGSNMGSTKEAIDVFEANRSKAVWYAPGKAANCGGVAVSGLEMAQNSQRVTWAAEEVDEKLKNIMYTCFDNCYANAAKYSAEKDAENLPSLLKGANITGFIKVADAMFDQGEVF

SEQ ID NO: 57122 - DNA, 1236 bp, Asparagus officinalis
  CDS (1)..(1236)
atgaatgcactagcggccaccagtaggaacttcaagcaggcagctaagctgttgggattggaccctaagctggaaaagagcttactcatcccattcagggagatcaaggttgagtgtacaattcccaaagatgatggtactttggcatcatttgttggatttagggtgcagcacgacaatgctagaggccctatgaagggaggaattagataccactctgaggttgatccagatgaggtaaatgccttagcacaattaatgacatggaagacagctgtagcaaacattccatatggaggagctaaagggggtattggatgtagcccaggagatttgagcttatctgagcttgaaaggctcacccgagtttttacacaaaagatacatgatctcattggggttcacactgatgttccagcaccggatatgggaaccaatgcacagacaatggcatggatacttgatgagtactcaaaattccacggctactctcctgcaattgtaactggaaaacctgttgatctgggtggatctttgggtagagatgcagctactggaaggggagtcctttttgcaacagaagcgctgctggcagaatatggaaagggcatttcaggccaacgatttgtaatccaggggtttggcaatgttggttcttgggcagctcaacttatcaccaaagctggtggaaaagttgttgcagtcagcgatgtcacaggagcaattaagcacagcaatggtctagacatagagaacttacttaagtattctgtcaaaaatcgtggtatcaaaggtttcagtggtggtgatgcaattgattccaactcattactaactgaagattgtgatgttctcattccagcagcacttggtggtgtcatcaacagggaaaatgcaaatgacgttagggccaagttcataattgaggcagctaaccatccaacagacccagaggctgatgagattctatcaaaaaaaggagtatgtattctgccagacatacttgcaaattcaggcggagttactgtcagttattttgagtgggttcagaacatccaaggattcatgtgggatgaagagaaggtcaactctgagctgaagacttacatgaccaaaggcttcaaacatgtgaaggagatgtgcaagacccacaactgtgacctccgaatgggagccttcactcttggagtcaaccgagttgccagagcaactctcctccgaggttgggaagcataa

SEQ ID NO: 57123 - protein, 411 aa, Asparagus officinalis
MNALAATSRNFKQAAKLLGLDPKLEKSLLIPFREIKVECTIPKDDGTLASFVGFRVQHDNARGPMKGGIRYHSEVDPDEVNALAQLMTWKTAVANIPYGGAKGGIGCSPGDLSLSELERLTRVFTQKIHDLIGVHTDVPAPDMGTNAQTMAWILDEYSKFHGYSPAIVTGKPVDLGGSLGRDAATGRGVLFATEALLAEYGKGISGQRFVIQGFGNVGSWAAQLITKAGGKVVAVSDVTGAIKHSNGLDIENLLKYSVKNRGIKGFSGGDAIDSNSLLTEDCDVLIPAALGGVINRENANDVRAKFIIEAANHPTDPEADEILSKKGVCILPDILANSGGVTVSYFEWVQNIQGFMWDEEKVNSELKTYMTKGFKHVKEMCKTHNCDLRMGAFTLGVNRVARATLLRGWEA

SEQ ID NO: 57124 - DNA, 1236 bp, Arabidopsis thaliana
  CDS (1)..(1236)
atgaatgctttagcagcaacaaacagaaacttcaagttagctgctaggcttcttggtctggattctaagctcgagaaaagtcttctcatccccttccgagaaatcaaggtggaatgtaccataccgaaagacgatggtacactagcatcattcgttgggttcagagttcaacacgacaatgcaagaggtcccatgaaaggtggaatcagatatcatcctgaggttgatccggatgaagtgaacgcattggctcagctcatgacatggaaaacagcagtggctaagattccttacggaggagctaaaggagggattggttgtgatcctagcaagctcagtatctccgagctcgagcggttgactcgagttttcactcagaagattcatgatctcattgggattcatactgatgttccagctccagatatgggcactggtcctcagacaatggcttggattcttgatgaatactctaagtttcatggatactcgcctgcagttgtgactggaaaacccattgatcttggtggatcgctagggagagacgcggctactggaagaggagtgatgtttggtaccgaagctttgcttaacgagcacggaaagaccatatcagggcagcgttttgtcatccagggatttggtaatgtgggttcttgggcggcaaagctgataagtgaaaagggtgggaagattgttgccgtgagtgacattaccggagcaatcaagaacaaggatggtatcgatatcccggccttgctcaagcatactaaagaacacagaggtgtcaaagggtttgatggtgcagatccgatcgatccaaactccatactggttgaggattgtgatatcctcgtccctgcagcacttggtggtgtcatcaacagggagaatgcgaatgagattaaagcaaagttcatcatagaagcagctaatcatccaactgatccggacgcggatgagatcctaagtaagaaaggtgtggttattctcccggacatatatgcaaactctggaggagtcactgtaagttacttcgaatgggttcagaacattcaaggctttatgtgggaggaagagaaggtgaacgatgagctaaagacttacatgactcgctctttcaaggacttgaaagagatgtgcaaaactcactcttgcgatctccggatgggagctttcacactcggtgttaatcgtgtggctcaagctaccattctcagaggctggggagcttaa

SEQ ID NO: 57125 - protein, 411 aa, Arabidopsis thaliana
MNALAATNRNFKLAARLLGLDSKLEKSLLIPFREIKVECTIPKDDGTLASFVGFRVQHDNARGPMKGGIRYHPEVDPDEVNALAQLMTWKTAVAKIPYGGAKGGIGCDPSKLSISELERLTRVFTQKIHDLIGIHTDVPAPDMGTGPQTMAWILDEYSKFHGYSPAVVTGKPIDLGGSLGRDAATGRGVMFGTEALLNEHGKTISGQRFVIQGFGNVGSWAAKLISEKGGKIVAVSDITGAIKNKDGIDIPALLKHTKEHRGVKGFDGADPIDPNSILVEDCDILVPAALGGVINRENANEIKAKFIIEAANHPTDPDADEILSKKGVVILPDIYANSGGVTVSYFEWVQNIQGFMWEEEKVNDELKTYMTRSFKDLKEMCKTHSCDLRMGAFTLGVNRVAQATILRGWGA

SEQ ID NO: 57126 - DNA, 1236 bp, Arabidopsis thaliana
  CDS (1)..(1236)
atgaatgctttagctgcaacaaacagaaacttccgtcatgcatctcgaatcctgggtttggattcgaagatcgagagaagtcttatgatcccatttagagaaatcaaggttgagtgtacgattcctaaagacgatggcactctggtttcatacatcggatttagggttcaacatgacaatgctcgtggacccatgaaaggtggaatcagatatcatcctgaggttgatccagatgaagttaacgcactagctcagctgatgacttggaagactgctgtagcagatattccatatggtggtgctaaaggtggaattggatgtagtcctcgtgacttgagtttgagcgagcttgagaggttgactcgtgtgtttacacagaagattcatgatcttatcggtattcataccgatgtgcctgctcctgatatgggcactaacgctcaaaccatggcttggattcttgatgagtactccaagtttcatggtcattcccctgctgttgtcactggaaagcccattgatcttggtggttcattaggtagggaagctgccacaggtcgtggtgtagtatttgccaccgaagctcttcttgctgagtacgggaaatcgattcagggtttgacatttgttattcagggttttgggaatgttggaacatgggctgcgaagctgatccacgagaaaggcggtaaagtggttgcagtaagcgacattactggtgcaatcaggaaccctgaaggtatcgacatcaacgctctcataaaacacaaggacgcaactggaagtctcaatgatttcaatggtggagacgctatgaattcagatgaattgctcattcatgagtgtgatgttctcattccatgcgctcttggtggtgtcctgaacaaggaaaatgctggagatgtgaaggcaaagtttatagtagaggcagctaaccatccaacagatccagatgctgatgagattctgtcgaagaaaggagtgattatacttccagatatctacgcaaacgcaggaggagtgacagtgagttacttcgagtgggtgcagaacattcaaggattcatgtgggaagaggaaaaagtgaacttggagctgcaaaaatacatgactcgagcctttcacaacatcaagacaatgtgccatactcattcttgcaacctccgtatgggagctttcactcttggagttaaccgagtcgctcgagccacccagttgcgtggttgggaagcttaa

SEQ ID NO: 57127 - protein, 411 aa, Arabidopsis thaliana
MNALAATNRNFRHASRILGLDSKIERSLMIPFREIKVECTIPKDDGTLVSYIGFRVQHDNARGPMKGGIRYHPEVDPDEVNALAQLMTWKTAVADIPYGGAKGGIGCSPRDLSLSELERLTRVFTQKIHDLIGIHTDVPAPDMGTNAQTMAWILDEYSKFHGHSPAVVTGKPIDLGGSLGREAATGRGVVFATEALLAEYGKSIQGLTFVIQGFGNVGTWAAKLIHEKGGKVVAVSDITGAIRNPEGIDINALIKHKDATGSLNDFNGGDAMNSDELLIHECDVLIPCALGGVLNKENAGDVKAKFIVEAANHPTDPDADEILSKKGVIILPDIYANAGGVTVSYFEWVQNIQGFMWEEEKVNLELQKYMTRAFHNIKTMCHTHSCNLRMGAFTLGVNRVARATQLRGWEA

SEQ ID NO: 57128 - DNA, 1266 bp, Clostridium difficile
  CDS (1)..(1266): transl_table=11
atgtcaggaaaagatgtaaatgtcttcgagatggcgcaatctcaagtaaaaaatgcatgtgataaattaggtatggaaccagcagtttatgaattattaaaagaacctatgagagttatagaggtttcaattccagtaaaaatggatgatggttctataaaaacttttaaaggatttagatcacaacataatgatgcagtagggccaacaaaaggtggaataagattccatcaaaatgtttcaagagacgaagtaaaagctttatctatatggatgactttcaagtgttctgtaacaggtataccatatggtggaggtaaaggtggaataatagtagatccatcaactttatctcaaggtgaattagaaagattaagtagaggatacatagatggaatatataaattaataggtgagaaagttgacgttcctgcaccagacgtaaatactaatggtcaaataatgtcttggatggttgatgagtacaataaattaactggacaaagttctataggtgttataactggtaagccagttgaatttggtggttctttaggaagaacagctgctactggatttggtgttgctgttacagcaagagaagctgctgctaaattaggaatagatatgaaaaaagctaaaatagctgttcaaggtataggaaacgttggttcttatacagttcttaactgtgaaaaacttggtggtactgttgtagctatggctgaatggtgtaaatcagaaggttcttatgctatatacaatgaaaatggtttagatggtcaagctatgttagattatatgaaagaacatggtaacttattaaacttcccaggagctaagagaatatctttagaagagttctgggcttcagatgttgatatagtaataccagctgcattagaaaactctataactaaagaagttgctgaatctataaaagctaaattagtttgtgaggctgctaatggaccaactactccagaggctgatgaagtatttgctgaaagaggaatagttcttactccagatatattaactaatgctggtggagttacagtttcttactttgagtgggtacaaaacttatatggatactactggtcagaagaagaagtagagcaaaaagaagaaatagctatggttaaagcatttgaatctatttggaaaatcaaagaagagtacaatgttacaatgagagaagctgcttacatgcattcaattaagaaagttgctgaagctatgaaattaagaggatggtactaa

SEQ ID NO: 57129 - protein, 421 aa, Clostridium difficile
MSGKDVNVFEMAQSQVKNACDKLGMEPAVYELLKEPMRVIEVSIPVKMDDGSIKTFKGFRSQHNDAVGPTKGGIRFHQNVSRDEVKALSIWMTFKCSVTGIPYGGGKGGIIVDPSTLSQGELERLSRGYIDGIYKLIGEKVDVPAPDVNTNGQIMSWMVDEYNKLTGQSSIGVITGKPVEFGGSLGRTAATGFGVAVTAREAAAKLGIDMKKAKIAVQGIGNVGSYTVLNCEKLGGTVVAMAEWCKSEGSYAIYNENGLDGQAMLDYMKEHGNLLNFPGAKRISLEEFWASDVDIVIPAALENSITKEVAESIKAKLVCEAANGPTTPEADEVFAERGIVLTPDILTNAGGVTVSYFEWVQNLYGYYWSEEEVEQKEEIAMVKAFESIWKIKEEYNVTMREAAYMHSIKKVAEAMKLRGWY

SEQ ID NO: 57130 - DNA, 1266 bp, Peptostreptococcus asaccharolyticus
  CDS (1)..(1266): transl_table=11
atgacagatacacttaatccgttagtagcggcacaagaaaaagtaagaatagcatgcgaaaaattaggatgcgatccagcagtatatgaactattaaaagaaccacaaagagtaattgaaatctcaattccagtaaaaatggatgatggtacagttaaagtgttcaaaggatggagaagtgctcactcaagcgctgtaggtccatcaaaaggtggagttagattccatccaaatgtaaacatggatgaagttaaagctctttctctatggatgacattcaaaggtggagcactaggcttaccatacggcggaggaaaaggtggaatctgcgtagatccagcagaactatcagaaagagaattagaacaattatcaagaggatgggtaagaggtctttataaatatcttggagacagaatcgatatcccagcaccagacgtaaacactaacggacaaatcatgagctggttcgttgatgaatatgtaaaattaaacggcgaaagaatggacatcggaactttcacaggaaagccagtagcatttggcggaagtgaaggaagaaacgaagcaactggattcggagtagctgtagtagttagagaatctgctaagagattcggaatcaaaatggaagatgctaaaatagctgttcaaggtttcggaaacgtaggtactttcactgttaagaacattgaaagacaaggcggaaaagtttgtgctatcgctgaatgggatagaaacgaaggaaactatgctctatacaatgaaaatggaatcgacttcaaagaattattagcttacaaagaagctaacaaaactcttatcggattcccaggagcagaaagaattactgatgaagaattctggacaaaagaatatgatatcatagtaccagcagcattagaaaatgtaatcacaggcgaaagagctaaaacaataaacgctaaattagtttgtgaagcagctaatggtcctacaactccagaaggagacaaagtattaactgaaagaggaatcaacttaacaccagatatcttaactaactcaggtggagttctagtatcttactatgaatgggtacaaaatcaatatggatactactggacagaagcagaagtagaagaaaaacaagaagcagacatgatgaaagctatcaaaggcgtattcgcagttgctgatgaatacaatgtaactctaagagaagctgtttacatgtatgcaatcaaatcaatagatgtagctatgaaattaagaggatggtattaa

SEQ ID NO: 57131 - protein, 421 aa, Peptostreptococcus asaccharolyticus
MTDTLNPLVAAQEKVRIACEKLGCDPAVYELLKEPQRVIEISIPVKMDDGTVKVFKGWRSAHSSAVGPSKGGVRFHPNVNMDEVKALSLWMTFKGGALGLPYGGGKGGICVDPAELSERELEQLSRGWVRGLYKYLGDRIDIPAPDVNTNGQIMSWFVDEYVKLNGERMDIGTFTGKPVAFGGSEGRNEATGFGVAVVVRESAKRFGIKMEDAKIAVQGFGNVGTFTVKNIERQGGKVCAIAEWDRNEGNYALYNENGIDFKELLAYKEANKTLIGFPGAERITDEEFWTKEYDIIVPAALENVITGERAKTINAKLVCEAANGPTTPEGDKVLTERGINLTPDILTNSGGVLVSYYEWVQNQYGYYWTEAEVEEKQEADMMKAIKGVFAVADEYNVTLREAVYMYAIKSIDVAMKLRGWY

SEQ ID NO: 57132 - DNA, 1257 bp, Aeropyrum pernix
  CDS (1)..(1257): transl_table=11
ttgcagcccacggaccctcttgaggaggctcgcgcgcagctcaggagagctgtagaccttctgggctacgatgactatgtttatgaagttctcgcaaacccggacagagttctacaggtaagggtcactattaagatggatgacggtactgtcaagacgttcctcggctggaggagccagcacaatagcgcgctaggcccctacaaaggcggtgttaggtaccaccccaacgttactatgaatgaggtgatagcccttagcatgtggatgacgtggaagaacagcctcgccggcctgccttatgggggaggtaaggggggtgttagggttaaccctaagatactctcccccagggagcttgaactcctgtctaggaagtatttcgagagtataagtgatatagttggggtggaccaggacattcccgcgcccgacgtctacacggatccccaggtcatgtcttggttcctagacgagtataatagggtgaagaggggccagttcttcggcgttgtcactggcaagccagtcgagctcggcggcctcaacgctagaatagtgtccacgggctacggggtggcagtgtcgacaagagtcgccgcagaaaagtttctaggaggcctcgagggaagaacagtcgcggtccagggctacgggaacgtgggatactatgccgccaagttcctagcagagatgggtgctaagatcgttgcagtaagcgacagccgaggcggcatttacgaccctgagggcatagacccggaggaggctttgaaggtgaagaggagcacgggcacggtggctaactatcagcggggcaagaagatctcgacaatggagatactagagctgcccgttgacattctagtcccggccgccatagaggaggtcattaccgacgagaatgcggataggattaaggcgaagattatatcggagggagccaacggccccactaccactgcggccgagaaaatacttgtaaagaagggcgtcttagtgctcccggacatactggcaaacgctggcggtgttataatgagtcatatagagtgggtgaacaacaggatgggcgggtggatcacggacgaggaagctctgaagaagctcgagcagaagatggttgagaacacgaagacggtaataacatactgggagaagaacctcaagccggaggagaacagcctcagggacgctgcctacatgatagctgtggaaagggtgtttagagccatgaagctaaggggctggatctaa

SEQ ID NO: 57133 - protein, 418 aa, Aeropyrum pernix
MQPTDPLEEARAQLRRAVDLLGYDDYVYEVLANPDRVLQVRVTIKMDDGTVKTFLGWRSQHNSALGPYKGGVRYHPNVTMNEVIALSMWMTWKNSLAGLPYGGGKGGVRVNPKILSPRELELLSRKYFESISDIVGVDQDIPAPDVYTDPQVMSWFLDEYNRVKRGQFFGVVTGKPVELGGLNARIVSTGYGVAVSTRVAAEKFLGGLEGRTVAVQGYGNVGYYAAKFLAEMGAKIVAVSDSRGGIYDPEGIDPEEALKVKRSTGTVANYQRGKKISTMEILELPVDILVPAAIEEVITDENADRIKAKIISEGANGPTTTAAEKILVKKGVLVLPDILANAGGVIMSHIEWVNNRMGGWITDEEALKKLEQKMVENTKTVITYWEKNLKPEENSLRDAAYMIAVERVFRAMKLRGWI

SEQ ID NO: 57134 - DNA, 1236 bp, Arabidopsis thaliana
  CDS (1)..(1236)
atgaatgctttagcagcaaccaacagaaacttcaagcttgcttctaggcttcttggtttagactcaaagctcgagaaaagtcttctcattcccttcagagagatcaaggtggaatgtaccataccaaaagacgatggaactctagcatcctttgttggattcagagttcaacacgacaatgcaagaggtcccatgaaaggtggaatcagatatcatccagaggttgaaccggatgaagtaaacgctttggctcaacttatgacatggaaaacagcagtggctaagataccttatggaggagccaaaggaggaatcggttgtgacccgagcgagctaagtctctcagagctcgaacgtttgactcgagttttcactcagaagattcacgatcttattgggattcatactgatgttccagctcctgatatgggaaccggtcctcagacaatggcttggattcttgatgaatactcaaaattccatggacattctcctgctgttgtcactggaaaacccattgatcttggtggatctcttgggagagatgctgctacaggaagaggagtgttgtttgcaacagaagctttactcaacgaacatggaaagaccatatctggacagcgattcgccatccagggctttggaaatgtgggttcttgggcagcgaagttgataagtgacaaaggtggtaagattgtggcggtgagtgatgtcacaggagcaatcaagaacaataatggaattgacatcttgagtttgctcgagcatgctgaagaaaacagaggaatcaaagggtttgatggtgctgattcaatcgatcctgattcgattcttgtcgaagattgtgatattcttgtccctgcagctctagggggagtcatcaacagggaaaatgcaaacgaaataaaagccaaattcatcattgaaggtgctaatcacccaactgatcctgaggctgacgagatcttgaagaagaaaggtgttatgatcctcccagatatatacgcaaactcaggaggagtcactgtaagttacttcgagtgggttcagaacatacaaggattcatgtgggatgaggaaaaggtgaatagggagctaaagacctacatgactcgcgggttcaaagacttgaaagaaatgtgtcagacgcactcatgtgatctccgtatgggagctttcaccctcggtattaatcgtgtcgctcaagctaccactatcagaggctggggttcttga

SEQ ID NO: 57135 - protein, 411 aa, Arabidopsis thaliana
MNALAATNRNFKLASRLLGLDSKLEKSLLIPFREIKVECTIPKDDGTLASFVGFRVQHDNARGPMKGGIRYHPEVEPDEVNALAQLMTWKTAVAKIPYGGAKGGIGCDPSELSLSELERLTRVFTQKIHDLIGIHTDVPAPDMGTGPQTMAWILDEYSKFHGHSPAVVTGKPIDLGGSLGRDAATGRGVLFATEALLNEHGKTISGQRFAIQGFGNVGSWAAKLISDKGGKIVAVSDVTGAIKNNNGIDILSLLEHAEENRGIKGFDGADSIDPDSILVEDCDILVPAALGGVINRENANEIKAKFIIEGANHPTDPEADEILKKKGVMILPDIYANSGGVTVSYFEWVQNIQGFMWDEEKVNRELKTYMTRGFKDLKEMCQTHSCDLRMGAFTLGINRVAQATTIRGWGS

SEQ ID NO: 57136 - DNA, 1689 bp, Drosophila melanogaster
  CDS (1)..(1689)
atgtatcacctgaagagtctggcccgccagggcgcccgccgccagcaggagctggccacgctggccaaggcactgcccaccgctgtgatgcagtcgagccgcggctatgccaccgagcaccagattcccgaccgcctcaaggatgtgcccaccgccaaggatccgcgcttcttcgacatggtcgagtatttcttccatcgcggctgccaaatcgccgaggaatcgctggtggacgacatgaagggcaagctgacccgcgacgagaagaagcagaaggtgaagggcatcctcatgctgatgcagccctgcgaccacatcatcgagatcgccttccccctgcgccgcgatgccggcaactacgagatgatcaccggctaccgcgcccagcacagcacccacaagacgcccaccaagggaggcatccgtttctcgttggatgtgtcacgcgatgaggtcaaagccctgtccgccctgatgaccttcaagtgcgcctgcgtggatgtgccattcggcggagccaaggccggtctgaagatcaaccctaaggagtactccgagcacgagctggagaagatcacccgtcgcttcacccttgagttggccaagaagggcttcattggacccggtgtcgatgtgcccgcccccgacatgggaaccggtgagcgcgagatgtcctggattgccgatacttatgccaagaccatcggtcacctggacatcaatgctcatgcctgtgtcaccggcaagcccatcaaccagggcggtatccacggacgcgtctcggccaccggtcgcggtgtcttccacggcctggagaacttcatcaacgaggccaactacatgagccagatcggcaccactcccggctggggcggcaagaccttcatcgtccagggcttcggtaacgtgggcctgcacaccactcgctatctgacccgcgccggagccacctgcatcggtgtcattgagcacgacggcactctgtacaacccggagggcattgaccctaagctgctggaggactacaagaacgagcacggcaccattgtgggctaccagaacgccaagccctacgagggcgagaacctcatgttcgagaagtgcgacatcttcattcccgctgccgtcgagaaggtcatcaccagcgagaatgccaaccgcattcaagctaagatcattgccgaggctgccaacggccccaccacccccgctgccgacaagatcctcatcgatcgcaacatcctggtcattcccgatctgtacatcaacgccggtggtgtcaccgtctccttcttcgagtggctgaagaacctgaaccacgtctcgtacggtcgcctgaccttcaagtatgagcgcgagtccaactaccatctgcttgcctcagtccaacagtcaattgaaagaatcattaatgacgaatccgttcaagagtccctggagcgtcgcttcggccgtgtgggcggtcgcatccccgtgaccccctccgagtcgttccagaagcgcatctccggcgcctccgagaaggatatcgtgcactccggcctggactacaccatggagcgctccgcccgcgccatcatgaagacagccatgaagtacaacctgggcctggacctcagaaccgctgcctacgtcaactccattgagaagatcttcaccacataccgcgatgccggcctggccttctaa

SEQ ID NO: 57137 - protein, 562 aa, Drosophila melanogaster
MYHLKSLARQGARRQQELATLAKALPTAVMQSSRGYATEHQIPDRLKDVPTAKDPRFFDMVEYFFHRGCQIAEESLVDDMKGKLTRDEKKQKVKGILMLMQPCDHIIEIAFPLRRDAGNYEMITGYRAQHSTHKTPTKGGIRFSLDVSRDEVKALSALMTFKCACVDVPFGGAKAGLKINPKEYSEHELEKITRRFTLELAKKGFIGPGVDVPAPDMGTGEREMSWIADTYAKTIGHLDINAHACVTGKPINQGGIHGRVSATGRGVFHGLENFINEANYMSQIGTTPGWGGKTFIVQGFGNVGLHTTRYLTRAGATCIGVIEHDGTLYNPEGIDPKLLEDYKNEHGTIVGYQNAKPYEGENLMFEKCDIFIPAAVEKVITSENANRIQAKIIAEAANGPTTPAADKILIDRNILVIPDLYINAGGVTVSFFEWLKNLNHVSYGRLTFKYERESNYHLLASVQQSIERIINDESVQESLERRFGRVGGRIPVTPSESFQKRISGASEKDIVHSGLDYTMERSARAIMKTAMKYNLGLDLRTAAYVNSIEKIFTTYRDAGLAF

SEQ ID NO: 57138 - DNA, 1236 bp, Zea mays
  CDS (1)..(1236)
atgaatgcattggcagcaaccagcaggaacttcaagcaggcagctaagctgctgggcctcgactccaagctggagaagagcttgctcattccattcagggagatcaaggttgaatgcacaatcccaaaagatgatggaactttggcatcctatgttggatttagggttcaacatgataatgctaggggacctatgaagggtggaatcagataccaccatgaggttgatcctgatgaagttaatgccttggcacaattgatgacttggaaaacagcagtagctaacataccatatggaggagccaaaggtggaattggatgtagccctggagacctgagcatctctgagcttgagaggcttacccgagtttttactcagaaaatccatgacttgattggcatccatactgacgttccagctccagatatgggcaccaactcacagacaatggcatggatacttgacgaatactcaaagttccatggttactcacctgctgttgtgacaggaaagcctgtggacctcggaggatcattgggaagagacgccgctactggaaggggagttctgtttgctactgaagctttgcttgcagagcatggcaaaggcattgcaggccagcgtttcgtcatacagggattcggtaacgttggttcctgggcagctcagctgataagtgaagccggtggcaaggtgattgctatcagtgacgtcacaggcgccgtcaaaaacgtcgatggcctcgacatcgcgcagctagtgaagcactcggcggagaacaaggggatcaagggcttcaaggggggagacgccatcgctccagactcgttgctcactgaagagtgcgacgtcctcatcccggcagcgcttgggggagtcataaacaaggataatgctaacgacataaaggcaaagtacatcatcgaggctgccaatcaccccacagatccagaggcagacgagatcctgtcaaagaaaggcgtcctcatcctccccgacatactggccaactctggcggcgtcacagtgagctacttcgagtgggtacaaaacatccaggggttcatgtgggacgaggagaaggtaaacgcggagctgcggacgtacatcacgcgcgcctttggaaacgtgaagcagatgtgccggagccacagctgcgacctccgcatgggcgccttcacgctgggcgtcaaccgcgtcgcgcgcgccaccgtcctcaggggatgggaagcatga

SEQ ID NO: 57139 - protein, 411 aa, Zea mays
MNALAATSRNFKQAAKLLGLDSKLEKSLLIPFREIKVECTIPKDDGTLASYVGFRVQHDNARGPMKGGIRYHHEVDPDEVNALAQLMTWKTAVANIPYGGAKGGIGCSPGDLSISELERLTRVFTQKIHDLIGIHTDVPAPDMGTNSQTMAWILDEYSKFHGYSPAVVTGKPVDLGGSLGRDAATGRGVLFATEALLAEHGKGIAGQRFVIQGFGNVGSWAAQLISEAGGKVIAISDVTGAVKNVDGLDIAQLVKHSAENKGIKGFKGGDAIAPDSLLTEECDVLIPAALGGVINKDNANDIKAKYIIEAANHPTDPEADEILSKKGVLILPDILANSGGVTVSYFEWVQNIQGFMWDEEKVNAELRTYITRAFGNVKQMCRSHSCDLRMGAFTLGVNRVARATVLRGWEA

SEQ ID NO: 57140 - DNA, 1263 bp, Pyrococcus endeavori
  CDS (1)..(1263): transl_table=11
atggttgagcaagacccatttgagattgccgttaagcagcttgagagagctgcccaatacatgaagataagtgaggaagcccttgaattcctcaagagacctcagaggattgttgaggttacgattcctgttgagatggatgatggaactgttaaagtatttaccggattcagagttcagtacaactgggctagaggtccaactaagggtggaattagatggcacccagaggagacccttagcaccgttaaggctctcgcagcttggatgacatggaagactgctgttatggatctcccatacggtggaggtaagggtggaattatcgtagatccaaagaagctctccgacagggaaaaggagaggcttgcgagaggttacataagggctatttatgatgtcataagcccatatgaggacatcccagcacctgacgtttacaccaacccacagataatggcttggatgatggatgagtacgaggcaataagcagaagaaagacaccagcctttggaataattaccggaaagccattaagcattggaggatcacttggaaggaacgaggctaccgcaagaggtgcctcctatacaataagggaggctcgaaaggttctaggatggggtgacctcaagggcaagaccatcgcaatccagggttacggtaatgcaggttactacctagcaaagataatgagcgaggactatggaatgaaggtcgttgcagtgagcgacagcaagggtggaatttacaacccagatggactcaacgctgacgaggttctcaagtggaagcaagaacacggtagcgttaaggacttcccaggagcaacaaacataaccaacgaggagctccttgagcttgaagtagatgttctcgcaccagccgcaatcgaggaagtaataaccaagaagaacgccgacaacataaaggccaagatcgttgccgaagttgctaacggaccagtcacaccagaggcagatgagatcctcttcgagaagggaattctacagataccagacttcctctgtaatgctggtggtgtcacagtcagctacttcgagtgggtgcagaacataacaggctactactggacgcttgaggaggttagagagaagcttgacaagaagatgaccaaggcattctacgatgtctacaacaccgcgaaggagaagaacatccacatgagagatgcagactacgtcgttgcggtccagagagtttaccaggcaatgcttgaccgtggatgggtcaagcactga

SEQ ID NO: 57141 - protein, 420 aa, Pyrococcus endeavori
MVEQDPFEIAVKQLERAAQYMKISEEALEFLKRPQRIVEVTIPVEMDDGTVKVFTGFRVQYNWARGPTKGGIRWHPEETLSTVKALAAWMTWKTAVMDLPYGGGKGGIIVDPKKLSDREKERLARGYIRAIYDVISPYEDIPAPDVYTNPQIMAWMMDEYEAISRRKTPAFGIITGKPLSIGGSLGRNEATARGASYTIREARKVLGWGDLKGKTIAIQGYGNAGYYLAKIMSEDYGMKVVAVSDSKGGIYNPDGLNADEVLKWKQEHGSVKDFPGATNITNEELLELEVDVLAPAAIEEVITKKNADNIKAKIVAEVANGPVTPEADEILFEKGILQIPDFLCNAGGVTVSYFEWVQNITGYYWTLEEVREKLDKKMTKAFYDVYNTAKEKNIHMRDADYVVAVQRVYQAMLDRGWVKH

SEQ ID NO: 57142 - DNA, 1263 bp, Pyrococcus furiosus
  CDS (1)..(1263): transl_table=11
atggttgagcaagacccctatgaaattgttattaagcaacttgaaagagctgcccaatatatggagataagtgaagaagctcttgagttcttaaagagacctcaaagaattgttgaggtcacaattccagtagaaatggatgacggttctgtaaaagttttcactggatttagagtacaacacaactgggctagaggtccaactaagggtggaattagatggcatccagaagaaacccttagcactgttaaagctcttgcagcttggatgacatggaagactgctgtaatggatctcccatatggtggaggtaagggtggaataattgtagatccaaagaagctctccgacagagagaaggagaggcttgcaagaggttacattagagcaatttatgatgttattagcccatatgaagacattccagcacccgatgtttatacaaacccacaaataatggcatggatgatggatgagtacgagacaataagcaggagaaagacaccggcctttggaattatcactggaaagcctcttagcattggtggatcacttggaagaattgaggcaactgcaagaggtgcaagttacacaattagagaggctgcaaaggttcttggatgggacaccctcaagggcaagacaatagcaatccagggttacggtaacgcgggttattatcttgcaaagatcatgagtgaagactttggaatgaaggttgtagctgtgagcgacagcaagggtggaatatacaaccccgatggtcttaatgctgacgaggttctcaagtggaagaatgagcatggaagcgttaaagacttcccaggagcaaccaacataacgaatgaggagctacttgagcttgaggttgatgttctcgctccggcagctatagaagaagtgataactaagaagaacgcagacaacattaaggctaagatcgttgcagaagtagcaaacggtccagttactccagaagctgatgagatactattcgagaaaggaatccttcagatcccagacttcctatgtaatgctggtggagttacagtcagctacttcgagtgggtacagaacataactggatactactggacaattgaggaggttagagagagactcgacaagaagatgacaaaagcattctacgacgtctacaacatagcaaaggagaagaacatacacatgagagatgcagcttacgtagttgcagtccagagagtttatcaagcaatgcttgaccgtggatgggtcaagcactga

SEQ ID NO: 57143 - protein, 420 aa, Pyrococcus furiosus
MVEQDPYEIVIKQLERAAQYMEISEEALEFLKRPQRIVEVTIPVEMDDGSVKVFTGFRVQHNWARGPTKGGIRWHPEETLSTVKALAAWMTWKTAVMDLPYGGGKGGIIVDPKKLSDREKERLARGYIRAIYDVISPYEDIPAPDVYTNPQIMAWMMDEYETISRRKTPAFGIITGKPLSIGGSLGRIEATARGASYTIREAAKVLGWDTLKGKTIAIQGYGNAGYYLAKIMSEDFGMKVVAVSDSKGGIYNPDGLNADEVLKWKNEHGSVKDFPGATNITNEELLELEVDVLAPAAIEEVITKKNADNIKAKIVAEVANGPVTPEADEILFEKGILQIPDFLCNAGGVTVSYFEWVQNITGYYWTIEEVRERLDKKMTKAFYDVYNIAKEKNIHMRDAAYVVAVQRVYQAMLDRGWVKH

SEQ ID NO: 57144 - DNA, 1239 bp, Solanum lycopersicum
  CDS (1)..(1239)
atgaatgctttagcagcaactaatagaaattttaagctggcagctaggcttcttggtttagactcaaagttggaactaagtctgctaatccctttcagagaaattaaggtggagtgtactataccgaaggatgatggcacattggcatcttttgttggattcagggtacagcacgacaatgcacgagggcctatgaaaggcggaatcagataccacccggaggttgatcctgatgaggtgaatgcattagcacagctaatgacatggaagacagcggtcgccaatataccatatggtggggctaaaggaggaataggatgtagtcctagtgacctgagtatctctgagttggaacgacttactcgagtatttactcaaaaaatacatgacctaatcggaattcacaccgatgttcctgcaccagatatgggaacaaatcctcagacaatggcatggattttagacgagtactcaaaatttcatggttattcacctgctgtggtaactggaaaacctgttgatctcggtggatctctaggcagagatgcagctactggaaggggggctctctttgctacagaagccctgcttaatgagcatgggaagagtgttgctggtcagcgttttgttatacagggatttggtaatgttggttcctgggctgcaaaactcatccatgagcaaggtgggaaagttgtagcagtgagtgacataactggtgccataaagaatgagaagggaatcgacatagaaagcctattcaaacacgtgaaggaaactcgtggagttaaaggtttccatgatgcacatccaattgatgcaaattcaatactggtagaagactgtgatgttcttatcccagctgccctcggtggagtaatcaacaaggataaccacaaattgaaaattaaagccaaatatattattgaggctgctaaccatccaactgatccagaagctgatgagattttgtcaaagaaaggagtcaccatcctaccggatatttatgccaactcgggtggtgtcaccgtcagttattttgagtgggtccagaacatccaaggctttatgtgggatgagaaaaaagtgaatgatgagttgaagacatacatgacaagaggttttaaagatgtcaaggatatgtgcaagactcacaactgtgacctccgaatgggcgccttcaccttaggtgttaaccgtgtagctagagcaaccgttcttcgaggatgggaggcgtaa

SEQ ID NO: 57145 - protein, 412 aa, Solanum lycopersicum
MNALAATNRNFKLAARLLGLDSKLELSLLIPFREIKVECTIPKDDGTLASFVGFRVQHDNARGPMKGGIRYHPEVDPDEVNALAQLMTWKTAVANIPYGGAKGGIGCSPSDLSISELERLTRVFTQKIHDLIGIHTDVPAPDMGTNPQTMAWILDEYSKFHGYSPAVVTGKPVDLGGSLGRDAATGRGALFATEALLNEHGKSVAGQRFVIQGFGNVGSWAAKLIHEQGGKVVAVSDITGAIKNEKGIDIESLFKHVKETRGVKGFHDAHPIDANSILVEDCDVLIPAALGGVINKDNHKLKIKAKYIIEAANHPTDPEADEILSKKGVTILPDIYANSGGVTVSYFEWVQNIQGFMWDEKKVNDELKTYMTRGFKDVKDMCKTHNCDLRMGAFTLGVNRVARATVLRGWEA

SEQ ID NO: 57146 - DNA, 1251 bp, Thermotoga maritima
  CDS (1)..(1251): transl_table=11
atgccggagaaaagcctctacgagatggcagttgaacagttcaaccgtgccgcatcactcatggatctggaatcagaccttgcagaggttctcagaagaccaaaacgtgttttgatcgttgaattcccagtgagaatggatgacggccacgtcgaagtcttcacaggataccgtgtgcagcacaacgttgcgagaggtccagccaaaggtggtatcaggtaccaccccgatgtcacactcgatgaggtgaaagccctcgcattctggatgacatggaagactgctgtgatgaatctgcctttcggtggagggaagggaggagtcagggtagatccaaagaaactctcaagaaacgagcttgaaagactctcaagaaggttcttctcagagattcaggtgataataggcccgtacaacgacatacctgcaccagatgtaaacacgaacgcagatgtgatggcgtggtacatggatacatacagtatgaatgtgggtcacaccgttttgggaattgtcacaggaaaacccgtggaactgggaggatcaaagggtcgtgaagaagccacgggtcgtggtgttaaggtgtgtgcagggcttgcaatggatgttctgggaatagatccaaagaaagcaacagttgccgttcagggatttggaaacgtgggtcagttcgccgctcttttgatttctcaagaactcggatcgaaagtcgttgcggtgagcgacagcagaggcggtatctacaatcccgaggggttcgacgtggaggagctgatcagatacaaaaaagaacacggaacggtcgttacatatccgaagggtgaaagaataaccaacgaagaacttctggaactggatgttgacattctcgtccctgcagctttggaaggtgctatccacgctggaaacgcggaaagaataaaggcaaaagccgtggtggaaggagcaaacggtcccacaacacctgaagccgacgaaatcctgagcagaagaggaattcttgtggtaccagacatactcgccaacgccggtggagttacggtttcttactttgaatgggttcaggaccttcagagcttcttctgggatttggatcaggtgagaaacgcccttgaaaagatgatgaaaggagcattcaacgatgttatgaaagtaaaggagaaatacaacgtcgatatgagaacagcagcttacattcttgcgatcgatcgagttgcgtacgccacgaaaaagagaggtatctatccgtga

SEQ ID NO: 57147 - protein, 416 aa, Thermotoga maritima
MPEKSLYEMAVEQFNRAASLMDLESDLAEVLRRPKRVLIVEFPVRMDDGHVEVFTGYRVQHNVARGPAKGGIRYHPDVTLDEVKALAFWMTWKTAVMNLPFGGGKGGVRVDPKKLSRNELERLSRRFFSEIQVIIGPYNDIPAPDVNTNADVMAWYMDTYSMNVGHTVLGIVTGKPVELGGSKGREEATGRGVKVCAGLAMDVLGIDPKKATVAVQGFGNVGQFAALLISQELGSKVVAVSDSRGGIYNPEGFDVEELIRYKKEHGTVVTYPKGERITNEELLELDVDILVPAALEGAIHAGNAERIKAKAVVEGANGPTTPEADEILSRRGILVVPDILANAGGVTVSYFEWVQDLQSFFWDLDQVRNALEKMMKGAFNDVMKVKEKYNVDMRTAAYILAIDRVAYATKKRGIYP

SEQ ID NO: 57148 - DNA, 1260 bp, Thermococcus profundus
  CDS (1)..(1260): transl_table=11
atggtcgagattgacccgtttgagatggccgttaagcagcttgagagggctgctcagtacatggacataagcgaagaggccctcgagtggcttaagaagcccatgaggatcgtcgaagttagcgttccgatagagatggacgacggttctgttaaggttttcaccggtttccgcgttcagcacaactgggctcgcggcccgaccaagggtggtataaggtggcacccggccgagaccctcagcaccgttaaggccctcgctacctggatgacctggaaggttgcagttgtcgacctcccctacggtggaggtaagggtggcatcatcgtcaacccgaaggagctctccgagagggagcaggagaggctcgctcgcgcttacataagggccgtttatgacgtcatcggtccgtggaccgacattccggctcccgacgtctacaccaacccgaagatcatgggctggatgatggacgagtatgaaacaataatgaggaggaagggcccggccttcggtgtcatcactggaaagccgctcagcattggcggttcactcggtaggggtacagcaacagcccagggtgcaatattcaccatcagggaggccgccaaggccctcggcatcgacctcaagggcaagaagatcgccgtccagggctatggtaacgccggctactacaccgccaagctcgccaaggagcagctcggcatgaccgtcgtcgccgtcagcgacagccgcggcggcatctacaacccggacggcctcgacccggacgaggttctcaagtggaagagggagcacggctcagttaaggacttcccaggagcgaccaacatcaccaacgaggagctcctcgagctcgaggtagacgtcctcgctccggcagctatcgaagaggtcatcaccgagaagaacgccgacaacatcaaggccaagatcgtcgccgaggttgccaacggtccagttacgccagaggcagacgacatcctccgcgagaagggcatcctccagattccggacttcctgtgcaacgccggtggcgtcaccgtcagctacttcgagtgggtccagaacataaacggctactactggaccgaggaggaggtccgcgagaagctcgacaagaagatgaccaaggccttctgggaggtctacaacacccacaaggacaagaacatccacatgagggacgccgcctacgtcgtcgcggtcagcagggtttaccaggccatgaaggaccgcggatgggtgaagaagtga

SEQ ID NO: 57149 - protein, 419 aa, Thermococcus profundus
MVEIDPFEMAVKQLERAAQYMDISEEALEWLKKPMRIVEVSVPIEMDDGSVKVFTGFRVQHNWARGPTKGGIRWHPAETLSTVKALATWMTWKVAVVDLPYGGGKGGIIVNPKELSEREQERLARAYIRAVYDVIGPWTDIPAPDVYTNPKIMGWMMDEYETIMRRKGPAFGVITGKPLSIGGSLGRGTATAQGAIFTIREAAKALGIDLKGKKIAVQGYGNAGYYTAKLAKEQLGMTVVAVSDSRGGIYNPDGLDPDEVLKWKREHGSVKDFPGATNITNEELLELEVDVLAPAAIEEVITEKNADNIKAKIVAEVANGPVTPEADDILREKGILQIPDFLCNAGGVTVSYFEWVQNINGYYWTEEEVREKLDKKMTKAFWEVYNTHKDKNIHMRDAAYVVAVSRVYQAMKDRGWVKK

SEQ ID NO: 57150 - DNA, 1236 bp, Vitis vinifera
  CDS (1)..(1236)
atgaatgctctagcagccacaaaccgcaattttcgccatgcttcccgcattcttgggttggactccaagctggagaagagtcttctgatacctttcagagagatcaaggtggagtgcacgattccgaaggatgatggaagcctggcgacgtatgtggggttccgtgtgcagcatgataatgctcgtgggcccatgaagggagggatcagatatcaccctgaggtggatcctgatgaggtaaatgccctggctcaattgatgacatggaagaccgccgtagtcgacattccctatggtggtgcaaagggtggcattgggtgcaccccaaaggacttgagtatgagcgagttggaacgtctcactcgtgtctttactcaaaagattcatgatcttattggaactcatactgatgtacctgcaccggacatgggaactaatgctcagactatggcatggattttggacgagtactcaaaattccatggtcactcaccggccgtagtgactggaaagccaatagctcttggtggatccctcggtagggaggctgcaactggtcgaggtgttgttttcgcaactgaagctttacttgcgcaacatgggaagtcaatcaagggtttgacatttgttattcagggttttggcaatgttggatcttgggtagcaagactcatcggtgagagaggtggtaaaatcatagcggtgagcgacgtcactggagctgttaagaaccaaaatgggcttgatatagtggatttgcttaggcacaaagaagagactggttgtctaacgaatttcagtggcggagatcacatggatccgaatgaactgctcacacatgaatgtgatgttctcatcccatgtgctctaggtggagttcttaacaaagaaaatgctgcggatgttaaggcaaagttcataatagaagcagcaaatcatcctactgatccagaagctgatgagattctatccaagaagggaggtgtaatccttcccgacatctatgctaatgctggaggtgtgaccgtgagctattttgagtgggttcagaatattcaaggttttatgtgggaagaagagaaggtgaataatgagcttcagaagtacatgaccaaagcttttcataacattaaggcaatgtgtcaatcgcacaactgcagtcttcgaatgggagccttcacattggcagtgaatcgagttgcgtgtgccacaacgctaaggggttgggaagcttag

SEQ ID NO: 57151 - protein, 411 aa, Vitis vinifera
MNALAATNRNFRHASRILGLDSKLEKSLLIPFREIKVECTIPKDDGSLATYVGFRVQHDNARGPMKGGIRYHPEVDPDEVNALAQLMTWKTAVVDIPYGGAKGGIGCTPKDLSMSELERLTRVFTQKIHDLIGTHTDVPAPDMGTNAQTMAWILDEYSKFHGHSPAVVTGKPIALGGSLGREAATGRGVVFATEALLAQHGKSIKGLTFVIQGFGNVGSWVARLIGERGGKIIAVSDVTGAVKNQNGLDIVDLLRHKEETGCLTNFSGGDHMDPNELLTHECDVLIPCALGGVLNKENAADVKAKFIIEAANHPTDPEADEILSKKGGVILPDIYANAGGVTVSYFEWVQNIQGFMWEEEKVNNELQKYMTKAFHNIKAMCQSHNCSLRMGAFTLAVNRVACATTLRGWEA

SEQ ID NO: 57152 - DNA, 1308 bp, Halobacterium salinarium
  CDS (1)..(1308): transl_table=11
atgaccatggcatcgaaatctgatagcacccacgacgagtcaggcgacgaggcggcagattcgaccgaacccgaatcggcactcgaaaccgcccgccgccagttgtaccatgctgccagctatctcgatatcgaccagaacatcgtcgaacggctcaaatatcccaaaaaggtccacgaggtgacgatccccatcgaacgggatgacggcacggtcgaggtgttcacgggctaccgcgcgcagcacgacagcgtcagagggccatacaagggcgggttgcgataccaccccgacgtgaccagagacgagtgtgttggcctcggcatgtggatgacctggaaatgcgccgtcatggacctcccgttcggcggagccaagggtggtgtcgcggtcaacccgaaggagctgagtccggaagagaaggagcggctcacccgtcggttcacacaagaaattcgcgacgttatcgggcccaaccaagatatccccgctccggatatggggacggatccgcagacgatggcgtggttgatggacgcgtactcgatgcaggaaggcgagacaacaccgggcgtcgtcaccggaaaaccgccagtggtcggcggcagcgaagggcgtgaagaagcccccggacggagcgttgcgatcatcacacagttggtctgcgagtactacgaccagccgctcgatgagaccactgtggcagttcaggggtacgggagcgtcggagcgaatgcggcccgactcctcgacaagtggggcgcgaccatcgtcgcgatcagcgatgtgaatggagcgatgtacgagccggacggaatcgatacagcttcagttccgtcccacgacgaagagccggaagccgtcaccacgtacgcggacaccgtgatttcgaacgaggagcttctcaccctcgacgtcgatgtcctcattccggccgccctggggaacgtgatcacgaaagagaacgcggaagcaatcgccgccgatctcgtcgtcgagggcgcgaacggcccgacgacgtctacggctgattcgattctcgccgaccgggatgtcgccgtgattcccgatattctcgccaacgcaggcggtgtcacggtgagttatttcgagtggctccaggacattaatcggcgagcgtggtcgctcgaacgagtcaacgatgaactcgaagcggagatgcaggctgcctggcgagcagtcaaagacgaatacgagaaccgcgacgtcacgtggcgcgatgctgcctatattgtcgcactctcacgaatcgctgaagcccacgaggcgcgggggctctggccgtag

SEQ ID NO: 57153 - protein, 435 aa, Halobacterium salinarium
MTMASKSDSTHDESGDEAADSTEPESALETARRQLYHAASYLDIDQNIVERLKYPKKVHEVTIPIERDDGTVEVFTGYRAQHDSVRGPYKGGLRYHPDVTRDECVGLGMWMTWKCAVMDLPFGGAKGGVAVNPKELSPEEKERLTRRFTQEIRDVIGPNQDIPAPDMGTDPQTMAWLMDAYSMQEGETTPGVVTGKPPVVGGSEGREEAPGRSVAIITQLVCEYYDQPLDETTVAVQGYGSVGANAARLLDKWGATIVAISDVNGAMYEPDGIDTASVPSHDEEPEAVTTYADTVISNEELLTLDVDVLIPAALGNVITKENAEAIAADLVVEGANGPTTSTADSILADRDVAVIPDILANAGGVTVSYFEWLQDINRRAWSLERVNDELEAEMQAAWRAVKDEYENRDVTWRDAAYIVALSRIAEAHEARGLWP

SEQ ID NO: 57154 - DNA, 1374 bp, Agaricus bisporus
  CDS (1)..(1374)
atggtccttcctcacgagcccgaatttgaacaggccctccatgaacttgagacaagtttacagcctttcctcactacgaatcctcaatacaaaaaggcactggagattatccaggtgcctgaacgtgttcttcaattccgtgttacttgggaggatgaccaaggcaaaccccaagttaaccgtggattccgtgttcaatacaactctgctttgggaccgtacaagggtggtctacgacttcaccccaccgtcaacctctctattcttaaattcctcggtttcgagcaaacatttaaaaatgctctgactggactgtcaatgggtggtggtaagggtggttccgactttgaccccaagggcaagtcagacaacgagattaggcggttctgtgtagccttcatgtcggaattgttcagacatattggacaagacactgatgtaccagctggtgatatcggcactggtgcccgtgaaatcgggttcctctttggagcttacagacgtttgaagaatgaatttaccggtatgctcaccggtaaaggtatcaactggggtggaagttttattcggcccgaggctaccggctatggcctcatctactatgttgaacacatgattgctcatgcatgcccggaatatagcctcgacagaccatccactctcgttgctatctcgggttcgggcaatgtttctcagttcactgctctcaaggtcatagaactcggcgctaccgtgctttctctatccgactcgaagggttccttgatctctgagaagggatatacgaaggaggctatcgaaaaaattgctgagctcaagttgaaaggcggagcgcttgaggctatcgtcgatgatcttggtgcgggctatacctaccacgccggtaaacgcccttggacacttctcccacaggtccacattgccctccctggtgcgactcagaatgaggtttcacaagaagaagcagaggcattggtcaaagctggtacccgtatcgtcgctgaaggttccaacatgggttgtaccgaagaagccattgccatcttcgagaactcccgtcgcgcctctcgagccggagtttggtatgctccaggtaaagcatcgaactgtggtggtgtagcggtttccggtctcgagatggcgcaaaactctcagcgtcttgcttggtctacccaagaagttgacgcgaaattaaaatctattatggcagagtgctaccagatctgttatactgccggttcgagatggagtggcgagaaggttgctgagggtgttgccgagggcgaggcgttgcctagtttgctctcgggagcgaatcttgccgggtttatcaaggttgcggatgccatgaaggagcagggtgactggtggtag

SEQ ID NO: 57155 - protein, 457 aa, Agaricus bisporus
MVLPHEPEFEQALHELETSLQPFLTTNPQYKKALEIIQVPERVLQFRVTWEDDQGKPQVNRGFRVQYNSALGPYKGGLRLHPTVNLSILKFLGFEQTFKNALTGLSMGGGKGGSDFDPKGKSDNEIRRFCVAFMSELFRHIGQDTDVPAGDIGTGAREIGFLFGAYRRLKNEFTGMLTGKGINWGGSFIRPEATGYGLIYYVEHMIAHACPEYSLDRPSTLVAISGSGNVSQFTALKVIELGATVLSLSDSKGSLISEKGYTKEAIEKIAELKLKGGALEAIVDDLGAGYTYHAGKRPWTLLPQVHIALPGATQNEVSQEEAEALVKAGTRIVAEGSNMGCTEEAIAIFENSRRASRAGVWYAPGKASNCGGVAVSGLEMAQNSQRLAWSTQEVDAKLKSIMAECYQICYTAGSRWSGEKVAEGVAEGEALPSLLSGANLAGFIKVADAMKEQGDWW

SEQ ID NO: 57156 - DNA, 1353 bp, Botrytis cinerea
  CDS (1)..(1353)
atgtctaaccttccatctgagcctgagttcgagcaagcttacaatgagcttgcctcaaccctcgagaactccaccctttttgagaagaacccagaataccgtaccgccctcaaggtcgtttccatcccagaaagagtcatccaattccgtgttgtctgggaagatgacaagaaccaagttcaagtcaaccgcggataccgtgtgcaattcaacagcgctcttggaccatacaagggaggattgagattccaccctaccgtcaatctcagtgttttgaagttcttgggtttcgagcaaatcttcaagaacgctttgactggattgaacattggaggtggtaagggaggagcagacttcgacccaaagggcaaatccgacaacgaaatccgcagattctgcgtttctttcatgcgcgaattgagcaagcacattggagccgacaccgatgtcccagctggtgatatcaacgttggaggaagagaaatcggattcctcttcggtgcctacaaggccatccaaaacaaatgggagggtgttcttactggaaagggaggaagctggggtggatctttgatcagacctgaggctactggttacggtctcgtctactacgtcgcccacatgatccaatatgctggccaaggttcattccaaggaaagcgtgttgctatctctggatccggaaacgtcgctcaatacgccgctctcaaatgtattgagcttggtgccaccgttgtatccctctctgattctcaaggttctttgatcgctgaaggagatgcatacttcaccccagaagatgttggaaagatcgctgagttgaagctcaagagacaatccctcaccgctttcgaacacggaggaaaatacaagtacattgagggttccagaccatggacccacgtcaaggtcgacgttgcacttccatgtgctacccaaaacgaagtcagcaaggaagaggctgagtctctcgttgccagcggtgctagatacattgctgagggatccaacatgggttgcacacaagaggctattgatgtctttgaggctgagcgcaaggagaagaaggacaaggccatctggtacgcaccaggaaaggctgccaacgctggtggtgtcgctgtttctggtcttgagatggcacaaaacagtgctcgtatcagctggactcaagaggaggttgatgagaagctcaaggatatcatgaagaatgcattcgagacgggattggagactcccaagaagtacgtcgaggcaaaggatggcgaatacccatctttggttgctggttccaacattgccggattcgtcaaggttgctagcgctatgcacaaccacggtgattggtggtaa

SEQ ID NO: 57157 - protein, 450 aa, Botrytis cinerea
MSNLPSEPEFEQAYNELASTLENSTLFEKNPEYRTALKVVSIPERVIQFRVVWEDDKNQVQVNRGYRVQFNSALGPYKGGLRFHPTVNLSVLKFLGFEQIFKNALTGLNIGGGKGGADFDPKGKSDNEIRRFCVSFMRELSKHIGADTDVPAGDINVGGREIGFLFGAYKAIQNKWEGVLTGKGGSWGGSLIRPEATGYGLVYYVAHMIQYAGQGSFQGKRVAISGSGNVAQYAALKCIELGATVVSLSDSQGSLIAEGDAYFTPEDVGKIAELKLKRQSLTAFEHGGKYKYIEGSRPWTHVKVDVALPCATQNEVSKEEAESLVASGARYIAEGSNMGCTQEAIDVFEAERKEKKDKAIWYAPGKAANAGGVAVSGLEMAQNSARISWTQEEVDEKLKDIMKNAFETGLETPKKYVEAKDGEYPSLVAGSNIAGFVKVASAMHNHGDWW

SEQ ID NO: 57158 - DNA, 1380 bp, Debaryomyces occidentalis
  CDS (1)..(1380)
atgattaaaaatggtcttcctcacgaacctgaattccaacaagcttataacgagttagtctcagctttagaagaatctactttattcaccgaaaagccagaatacaagaaagtcatcccagttgtttcaattccagaaagaattatccaattcagagtcgcatgggaaaacgataacggcgatgttgaagtcaacaacggtttcagagtgcaattcaactcttctttgggtccgtacaagggaggattaagattccacccatcggtcaacttgtccatcttgaaattcttgggatttgaacaaatctttaagaacgccttaaccggtttatccatgggaggtggtaaaggtggttgtgatttcaacccaaagggcagatcagacggtgaaattagaagattctgtgttgcattcatgagacaattagccagatacattggagcagatactgatgttcctgccggtgacattggtgtcggtggtagagaaatcggttacttattcggtgcatacaaacaaatgcaaaacaactggtatggtgttttgaccggtaagggtttaacttggggtggttcattgattcgtccagaagctaccggttacgtgtcgtttactacgttgaaaaaaatgatcgaaaaagctaccaacggtaaggaatctttcaaaggtaaaagagttgaactctctggttccggtaacgttgcacaatacgctgccttaaaggttattgaattaggtggtatcgttgtttctttatccgactctaaaggttcaattgtttctaagaatggtattgtccctgaacaagttcttgaaattgctgccgctaaattaaaattcaaatctttagaagaaattactaaagaatctgttaagctcttctctggagaaaactcagttgaatacttagctggtgttcgtccatgggctaaagttggccatttcgatgttgctttgccatctgccacccaaaaagaagtttctggtgaagaagaagctaaagctttagttgaagctggttgtaaatacattgctgaaggttctaatatgggttctactaaagaagccattgatgttttcgaagccaacagatccaataacgtctggtacgctccaggtaaggccgccaactgtggtggtgttgctgtctctggtttagaaatggcccaaaactcacaaagagttcaatggtctgctgaagaagttgatgctaaattaaagaacatcatgtacacttgttttgacaactgttacgatcctgccatcaaatactctgctgaaaagaacgccgatggcttaccatctttattaaaaggtgctaacattgcttcattcattaaggtcgccgacgctatgttcgatcaaggtgatgtttattag

SEQ ID NO: 57159 - protein, 459 aa, Debaryomyces occidentalis
MIKNGLPHEPEFQQAYNELVSALEESTLFTEKPEYKKVIPVVSIPERIIQFRVAWENDNGDVEVNNGFRVQFNSSLGPYKGGLRFHPSVNLSILKFLGFEQIFKNALTGLSMGGGKGGCDFNPKGRSDGEIRRFCVAFMRQLARYIGADTDVPAGDIGVGGREIGYLFGAYKQMQNNWYGVLTGKGLTWGGSLIRPEATGYVSFTTLKKMIEKATNGKESFKGKRVELSGSGNVAQYAALKVIELGGIVVSLSDSKGSIVSKNGIVPEQVLEIAAAKLKFKSLEEITKESVKLFSGENSVEYLAGVRPWAKVGHFDVALPSATQKEVSGEEEAKALVEAGCKYIAEGSNMGSTKEAIDVFEANRSNNVWYAPGKAANCGGVAVSGLEMAQNSQRVQWSAEEVDAKLKNIMYTCFDNCYDPAIKYSAEKNADGLPSLLKGANIASFIKVADAMFDQGDVY

SEQ ID NO: 57160 - DNA, 1356 bp, Gibberella fujikuroi
  CDS (1)..(1356)
atgtctcaccttccccaagagcccgagttcgagcaggcctatggcgagctcgcctctgccctcgagaacagctctctcttcaacgagcaccccgagtatcgtactgcccttgctgtggccgccatccctgagcgtgtcattcagttccgtgtcgtctggaacgacgacaagggtaacctacaggtcaaccgcggttatcgagtccagttcaacggtgcccttggcccctacaagggtggtctccgattccaccccagcgtcaacctgtccattctcaagttccttggtttcgagcaaatcttcaagaatgccctgactggcctcaacatgggtggtggcaagggtggtgccgacttcgaccccaagggcaagtctgatgccgagattcgacgattttgccaggctttcatgactgagctgtccaagcacattggtgccgagactgatgttcctgctggtgatattggtgtcggtggccgagagatcggttacctctttggcgcctaccgcaagttcgcaaaccgttgggagggtgtcctcactggaaagggtctttcatggggtggtagcttgatccgacctgaggctactggctacggtctcgtctactatgtcgagtacatgctcaagcacgccaaccgtggcaccttcgagggtaagcgtgtcgctctctccggctccggaaatgtcgcccaatacgctgctcttaagatcatcgagcttggtggttctgttgtctctctttccgactccaagggtgctctcgtcgctaaggagggttcttcattcacacccgagcaaattcacaacattgctgccctcaagatcaagcaccaagccctgaccactttcgagcacgatggacagttcacatggattgagggcgcccgcccttgggtccatgttggtaaggtcgacattgccctccccagtgctactcagaacgaggtcagcaaggaggaggcacaggctctcgttgatgctggcgctttcatcgtcgctgagggctccaacatgggttgcactgctgaggctattgatgtctttgaggctcaccgcaaggagaagggtgctgaggcgctctggtacgcccccggcaaggcctccaactgtggtggtgtcgctgtttctggcctcgagatggcccagaacagccagcgtatccagtggactgagaaggaggttgatgaccgcctgaaggccatcatgaaggacgcctttgtcgctggtcttgagactgctcagaagtacgtcgaggccaaggagggtgagcttcccagcttgattgctggtagcaacatcgccggtttcatcaaggtcgccgaggccatgcacgaccagggtgattggttctaa

SEQ ID NO: 57161 - protein, 451 aa, Gibberella fujikuroi
MSHLPQEPEFEQAYGELASALENSSLFNEHPEYRTALAVAAIPERVIQFRVVWNDDKGNLQVNRGYRVQFNGALGPYKGGLRFHPSVNLSILKFLGFEQIFKNALTGLNMGGGKGGADFDPKGKSDAEIRRFCQAFMTELSKHIGAETDVPAGDIGVGGREIGYLFGAYRKFANRWEGVLTGKGLSWGGSLIRPEATGYGLVYYVEYMLKHANRGTFEGKRVALSGSGNVAQYAALKIIELGGSVVSLSDSKGALVAKEGSSFTPEQIHNIAALKIKHQALTTFEHDGQFTWIEGARPWVHVGKVDIALPSATQNEVSKEEAQALVDAGAFIVAEGSNMGCTAEAIDVFEAHRKEKGAEALWYAPGKASNCGGVAVSGLEMAQNSQRIQWTEKEVDDRLKAIMKDAFVAGLETAQKYVEAKEGELPSLIAGSNIAGFIKVAEAMHDQGDWF

SEQ ID NO: 57162 - DNA, 1353 bp, Hebeloma cylindrosporum
  CDS (1)..(1353)
atggtcaagcccttcgaacccgaattccaacaggctttggacgagctcaccaccagcttgcaaccattcttggacgccaacccccagtacaagaaagccctggagatcgtccaggtccccgagcgtgtcttgcaattccgtgttgtctgggaagatgaccaaggggtcgcccaagttaaccatggtttccgtgttcagtacaactctgcccttggtccatacaaaggtggtctccgccttcacccctctgtgaacttgtccattctcaagttcctcggattcgaacaaacattcaagaacgccctcaccggcctcagcatgggtggaggaaagggtggatctgactttgaccccaagggcaagtcggacagcgagatcaggcgtttctgcttttccttcatgggcgagctcttccgccacatcggctcggacaccgatgtcccggccggagatattggaacgggtggtcgcgagatcggtttcttgtttggcgcgtacaagaagctcaggaatgagttcactggtatgctcactggcaagggcctaacatggggaggaagcttcatccgtccggaggctactggatacggcttaatctacttcgtcgagcatatgattgccaaggcttgtcccgagtatagccttgataagccctccacacttgttgccatctccggctctggcaatgttgcccagttcaccgccctcaaggtcatcgagcttggcgccaccgtcctttccctttccgactctaaggggtccctcatctccgacaagggatataccaaggagttcatcaggaaagtcgccgacctcaagttgaagggaggaagccttgcgtctctggctaacgaggagggctacacttatcacgctggtgctcgcccatggaccctcatccccaccatccacatcgcactccccggtgctactcagaacgaggtttccgccgaagaggccgaggcattgctcaaggcgggtgtccgcatcgtcgcggagggctccaacatgggttgcactgccgacgccatcgacatcttcgagtcttcccgtaaagctggtccaggaggagtttggtacgctcccggaaaggcttccaactgcggaggtgtcgctgtgtctggtctcgagatggcccaaaacagtcaacgtctcgcttggaccacacaggaggtcgactctaagttgaaggatatcatggctgagtgctacggaatttgcttgactgcaggaaccaagtggtctggcgaagaactcaccgatgaggtcctccccagcttgctctctggcgctaacgttgccggcttcatcaaagtcgccgatgccatgaaagcccaaggagactggtggtaa

SEQ ID NO: 57163 - protein, 450 aa, Hebeloma cylindrosporum
MVKPFEPEFQQALDELTTSLQPFLDANPQYKKALEIVQVPERVLQFRVVWEDDQGVAQVNHGFRVQYNSALGPYKGGLRLHPSVNLSILKFLGFEQTFKNALTGLSMGGGKGGSDFDPKGKSDSEIRRFCFSFMGELFRHIGSDTDVPAGDIGTGGREIGFLFGAYKKLRNEFTGMLTGKGLTWGGSFIRPEATGYGLIYFVEHMIAKACPEYSLDKPSTLVAISGSGNVAQFTALKVIELGATVLSLSDSKGSLISDKGYTKEFIRKVADLKLKGGSLASLANEEGYTYHAGARPWTLIPTIHIALPGATQNEVSAEEAEALLKAGVRIVAEGSNMGCTADAIDIFESSRKAGPGGVWYAPGKASNCGGVAVSGLEMAQNSQRLAWTTQEVDSKLKDIMAECYGICLTAGTKWSGEELTDEVLPSLLSGANVAGFIKVADAMKAQGDWW

SEQ ID NO: 57164 - DNA, 1353 bp, Laccaria bicolor
  CDS (1)..(1353)
atggtcctcccagtcgaacctgaatacgagcaagcactctccgaactcccaaacagtttgaagccctttttggcagcgaacccagactacggaaaggccctcgagatcgtcccaattccggagcgtgtgctccaattccgtgtaatttgggaggatgatcagggcaaggcccaagtcaaccgaggattccgcgtccagtataactctgctcttggaccctataaaggaggtctccgacttcatccctccgtcaacctctccatcctcaaattcctcgggttcgaacaaaccttcaagaatgctctgactggcttgagcatgggaggaggaaagggtgggtccgactttgaccccaagggcaagtcggacggcgagatcaggcgtttctgcacttcgttcatgtctgagctgttcaggcatatcggtcaggacactgatgttcccgctggtgacatcggaactggtgctcgggagatcggttacctctttggtgcttacaagaaactccagaacgagttcgtcggcatgctcactggaaagggtctcgcgtggggaggaagcttcatccgtcccgaggcgacaggttacggtctgatctactacgtcgagcacatgatcgccaaagccgccccggagtacagtctctccaagcccgagactcttgttgccatctcaggatcagggaacgtcggccaattcaccgcactcaaagtcatcgagttgggtgctaccgtcctctccctctccgactccaagggttcccttatcgccgagaagggctacaccaaggaattcatcaaggagatcggacaactgaagctcaagggtggcgctcttgaatcgttggctcaaagggagggctacacataccatgctggcaaacgcccatggagccttctccccgttgtccacgttgcgctcccaggcgcgacccaaaatgaagtctccaaaacggaggctgaagacctcatcaaggctggcgtgaggattgtagctgagggctcgaacatgggatgcacggaagacgccatcgccgtcttcgaagaatctcgtaaagctggcgctggcggcgtgtggtacgccccgggcaaagcgtccaactgtggtggtgttgcggtctctggtctggagatggcccagaacagtcagcgactcgcctggacgacggatcaagtcgaccagaagctgaagaaaatcatggctgagtgctatgagatctgtctcagcgcaggcacgaaatggtcgggtgaggagatcaaggacggtgtcctaccaagcttgctctccggcgcgaacgttgctggctttatcaaagttgcggacgcgatgagggagcatggcgactggtggtga

SEQ ID NO: 57165 - protein, 450 aa, Laccaria bicolor
MVLPVEPEYEQALSELPNSLKPFLAANPDYGKALEIVPIPERVLQFRVIWEDDQGKAQVNRGFRVQYNSALGPYKGGLRLHPSVNLSILKFLGFEQTFKNALTGLSMGGGKGGSDFDPKGKSDGEIRRFCTSFMSELFRHIGQDTDVPAGDIGTGAREIGYLFGAYKKLQNEFVGMLTGKGLAWGGSFIRPEATGYGLIYYVEHMIAKAAPEYSLSKPETLVAISGSGNVGQFTALKVIELGATVLSLSDSKGSLIAEKGYTKEFIKEIGQLKLKGGALESLAQREGYTYHAGKRPWSLLPVVHVALPGATQNEVSKTEAEDLIKAGVRIVAEGSNMGCTEDAIAVFEESRKAGAGGVWYAPGKASNCGGVAVSGLEMAQNSQRLAWTTDQVDQKLKKIMAECYEICLSAGTKWSGEEIKDGVLPSLLSGANVAGFIKVADAMREHGDWW

SEQ ID NO: 57166 - DNA, 1365 bp, Neurospora crassa
  CDS (1)..(1365)
atgtctaaccttccctctgagcccgagttcgagcaggcctacaaggagttggcctacactctcgagaactcctccctcttccagaagcaccccgagtaccgcaccgccctcaccgttgcctccatccccgagcgtgtcattcagttccgtgttgtctgggaggacgacaacggcaacgtccaggtcaaccgcggttaccgtgtccagttcaactccgccctcggtccctacaagggtggtctccgtctccacccctccgtcaacctttccattctcaagttcctcggtttcgagcagatcttcaagaatgcccttactggcctgagcatgggtggtggcaagggtggtgccgacttcgaccccaagggcaagagcgacgctgagatccgtcgcttctgctgcgctttcatggccgagcttcacaagcacattggtgctgataccgatgttcccgctggtgatatcggtgttggtggccgtgagatcggttacatgttcggtgcctaccgcaaggccgcgaaccgtttcgagggtgtccttactggcaagggcctctcctggggtggttcgctcattcgccctgaggccactggttacggtcttgtttactacgtcggccacatgctcgagtactctggcgccggctcctacgctggcaagcgcgttgccctctccggttccggcaacgtcgcccagtacgccgccctcaagctcattgagctaggcgccaccgttgtctccctctccgactccaagggtgcccttgtcgccactggcgagtccggcatcaccgttgaggacatcaacgccgtcatggccatcaaggaggcccgtcagtcccttaccagcttccagcacgctggccacctcaagtggatcgagggtgcccgcccctggcttcacgtcggcaaggttgacatcgctcttccttgcgctacccagaacgaggtctccaaggaggaggctgagggtctccttgccgccggctgcaagttcgtcgctgagggttccaacatgggctgcactctcgaggccatcgaggtctttgagaacaaccgcaaggagaagaagggcgaggccgtctggtacgcccccggcaaggccgccaactgtggtggtgttgccgtttccggtctcgagatggctcagaacagccagcgcctcaactggactcaggctgaggttgacgagaagctcaaggacatcatgaagaacgccttcttcaacggtctcaacactgccaagacctacgtcgaggctgctgagggcgagcttccttcccttgttgccggctccaacattgctggtttcgtcaaggttgcccaggccatgcacgaccagggtgactggtggtccaagaactaa

SEQ ID NO: 57167 - protein, 454 aa, Neurospora crassa
MSNLPSEPEFEQAYKELAYTLENSSLFQKHPEYRTALTVASIPERVIQFRVVWEDDNGNVQVNRGYRVQFNSALGPYKGGLRLHPSVNLSILKFLGFEQIFKNALTGLSMGGGKGGADFDPKGKSDAEIRRFCCAFMAELHKHIGADTDVPAGDIGVGGREIGYMFGAYRKAANRFEGVLTGKGLSWGGSLIRPEATGYGLVYYVGHMLEYSGAGSYAGKRVALSGSGNVAQYAALKLIELGATVVSLSDSKGALVATGESGITVEDINAVMAIKEARQSLTSFQHAGHLKWIEGARPWLHVGKVDIALPCATQNEVSKEEAEGLLAAGCKFVAEGSNMGCTLEAIEVFENNRKEKKGEAVWYAPGKAANCGGVAVSGLEMAQNSQRLNWTQAEVDEKLKDIMKNAFFNGLNTAKTYVEAAEGELPSLVAGSNIAGFVKVAQAMHDQGDWWSKN

SEQ ID NO: 57168 - DNA, 1365 bp, Neurospora intermedia
  CDS (1)..(1365)
atgtctaaccttccctctgagcccgagtttgagcaggcctacaaggagttggcctacactctcgagaactcctccctcttccagaagcaccccgagtaccgcactgccctcaccgttgcctccatccccgagcgtgtcattcagttccgtgttgtctgggaggacgacaacggcaacgtccaggtcaatcgcggttaccgtgtccagttcaactccgccctcggtccctacaagggtggtctccgtctccacccctccgtcaacctttccattctcaagttcctcggtttcgagcagatcttcaagaatgccctcactggcttgagcatgggtggtggcaagggtggtgccgacttcgaccccaagggcaagagcgacgctgagatccgtcgcttctgctgcgctttcatggctgagcttcacaagcacattggtgccgataccgatgttcccgctggtgacatcggtgttggtggccgtgagatcggctacatgttcggtgcctaccgcaaggccgcgaaccgtttcgagggtgtccttactggcaagggcctctcctggggtggttcgctcattcgccctgaggccactggttacggcctcgtctactacgtcggccacatgctcgagtactctggcgccggatcctacgctggcaagcgcgttgccctctccggttccggcaacgtcgcccagtacgccgccctcaagctcattgagctaggcgccaccgttgtctccctctccgactccaagggtgctcttgtcgccactggcgagtccggcatcaccgttgaggacatcaacgccgttatggccatcaaggaggcccgtcagtcccttaccagcttccagcacgctggtcacctgaagtggatcgagggcgcccgcccctggcttcacgttggcaaggttgacatcgctcttccttgcgctacccagaacgaggtctccaaggaggaggctgagggtctccttgccgccggctgcaagttcgtcgctgagggttccaacatgggctgcactctcgaggccattgaggtctttgagaaccaccgcaaggagaagaagggcgaggccgtctggtacgcccccggcaaggccgccaactgtggtggtgttgccgtttccggtctcgagatggctcagaacagccagcgcctcaactggactcaggctgaggttgacgagaagctcaaggacatcatgaagaacgccttcttcaacggtctcaacactgccaagatctacgtcgaggctgctgagggcgagcttccttccctcgttgctggctccaacattgctggtttcgtcaaggttgcccaggccatgcacgaccagggtgactggtggtccaagaactaa

SEQ ID NO: 57169 - protein, 454 aa, Neurospora intermedia
MSNLPSEPEFEQAYKELAYTLENSSLFQKHPEYRTALTVASIPERVIQFRVVWEDDNGNVQVNRGYRVQFNSALGPYKGGLRLHPSVNLSILKFLGFEQIFKNALTGLSMGGGKGGADFDPKGKSDAEIRRFCCAFMAELHKHIGADTDVPAGDIGVGGREIGYMFGAYRKAANRFEGVLTGKGLSWGGSLIRPEATGYGLVYYVGHMLEYSGAGSYAGKRVALSGSGNVAQYAALKLIELGATVVSLSDSKGALVATGESGITVEDINAVMAIKEARQSLTSFQHAGHLKWIEGARPWLHVGKVDIALPCATQNEVSKEEAEGLLAAGCKFVAEGSNMGCTLEAIEVFENHRKEKKGEAVWYAPGKAANCGGVAVSGLEMAQNSQRLNWTQAEVDEKLKDIMKNAFFNGLNTAKIYVEAAEGELPSLVAGSNIAGFVKVAQAMHDQGDWWSKN

SEQ ID NO: 57170 - DNA, 1365 bp, Neurospora sitophila
  CDS (1)..(1365)
atgtctaaccttccctctgagcccgagttcgagcaggcctacaaggagttggcctacactctcgagaactcctccctcttccagaagcaccccgagtaccgcaccgccctcgccgttgcctccatccccgagcgtgtcattcagttccgtgttgtctgggaggacgacaacggcaacgtccaggtcaaccgcggttaccgtgtccagttcaactccgccctcggtccctacaagggtggtctccgtctccatccctccgtcaacctttccattctcaagttcctcggtttcgagcagatcttcaagaatgcccttactggcctgagcatgggtggtggcaagggtggtgccgacttcgaccccaagggcaagagcgatgctgagatccgtcgcttctgctgcgctttcatggccgagcttcacaagcacattggtgccgataccgatgttcccgctggtgatattggtgttggtggccgcgagatcggttacatgttcggtgcctaccgcaaggctgcgaaccgtttcgagggtgtccttactggtaagggcctctcctggggtggttcgctcattcgccctgaggccactggttacggtctcgtctactacgtcggccacatgctcgagtactctggcgccggctcctacgctggcaagcgcgttgccctctctggttccggcaacgtcgcccagtacgccgccctcaagctcattgagctaggcgccaccgttgtctccctctccgactccaagggtgcccttgtcgccactggcgagtccggcatcactgttgaggacatcaacgccatcatggccatcaaggaggcccgtcagtctcttaccaccttccagcacgctggccacgtcaagtggatcgagggcgcccgcccctggcttcacgttggcaaggttgacatcgctcttccttgcgctacccagaacgaggtctccaaggaggaggctgagggtctccttgccgccggctgcaagttcgtcgctgagggttccaacatgggctgcactctcgaggccatcgaggtctttgagaacaaccgcaaggagaagaagggcgaggccgtctggtacgcccccggcaaggccgccaactgtggtggtgttgccgtttccggtctcgagatggctcagaacagccagcgcctcaactggactcaggctgaggttgacgagaagctcaaggacatcatgaagaacgccttcttcaacggtctcaacactgccaagacctacgccgaggctgctgagggcgagcttccttccctcgttgccggctccaacattgctggtttcgtcaaggtaccccaggccatgcacgaccagggtgactggtggtccaagaactaa

SEQ ID NO: 57171 - protein, 454 aa, Neurospora sitophila
MSNLPSEPEFEQAYKELAYTLENSSLFQKHPEYRTALAVASIPERVIQFRVVWEDDNGNVQVNRGYRVQFNSALGPYKGGLRLHPSVNLSILKFLGFEQIFKNALTGLSMGGGKGGADFDPKGKSDAEIRRFCCAFMAELHKHIGADTDVPAGDIGVGGREIGYMFGAYRKAANRFEGVLTGKGLSWGGSLIRPEATGYGLVYYVGHMLEYSGAGSYAGKRVALSGSGNVAQYAALKLIELGATVVSLSDSKGALVATGESGITVEDINAIMAIKEARQSLTTFQHAGHVKWIEGARPWLHVGKVDIALPCATQNEVSKEEAEGLLAAGCKFVAEGSNMGCTLEAIEVFENNRKEKKGEAVWYAPGKAANCGGVAVSGLEMAQNSQRLNWTQAEVDEKLKDIMKNAFFNGLNTAKTYAEAAEGELPSLVAGSNIAGFVKVPQAMHDQGDWWSKN

SEQ ID NO: 57172 - DNA, 1386 bp, Penicillium chrysogenum
  CDS (1)..(1386)
atgatgcaaaaccttcccttcgagcctgagttcgagcaggcctacaaggagctcgcctccactctcgagaactccactcttttccagaagaagcccgagtaccgcaaggctcttcaggtcgtctctgtccccgagcgtgttattcagttccgtgttgtctgggaagatgacaaaggccaggtccaaatcaaccgtggataccgtgtccagttcaactccgctcttggcccctacaagggtggcctccggttccaccccacggtgaacctttccatcctcaagttcctcggtttcgagcagatcttcaagaatgccctcaccggcctgaacatgggcggtggtaagggtggatccgacttcgaccccaagggcaagaccgataacgagatccgccgcttctgtgtctccttcatgaccgagctgtgcaagcacatcggtgccgacaccgatgttcccgccggtgatatcggtgtgaccggccgcgaggttggtttcatgttcggccagtacaagaagatccgcaaccagtgggagggtgtcctcaccggtaagggtggcagctggggtggttccctcatccgccccgaggccaccggctacggtgtcgtctactacgtcgagcacatgatccagcacgcctccggcggcaaggaatccttcgctggtaagcgcgtcgccatctccggttccggaaacgtcgcccagtacgccgctctcaaggtcatcgagctcggtggctccgtcatctccctctccgactcccagggtgctctcgtcctgaacggcgaggagggctccttcaccgctgaggagatcaacaccatcgctgagatcaaggtccagcgcaagcagatcgccgagctcgctacccaggacgccttcagctccaagttcaagtacatccccggtgcccgcccctggaccaacatcgccggccgcatcgatgtcgctctcccctccgccacccagaacgaggtctccggcgatgaggccaaggctctcatcgccgctggctgcaagttcatcgctgagggctccaacatgggttccacccaggaggctatcgatgtcttcgaggcccaccgtgatgccaaccctggtgccgctgccatctggtacgcccctggtaaggccgccaacgctggtggtgttgccgtctctggtctcgagatggcccagaactctgcccgtgtcaactggtcccgtgaggaggttgactcccgtcttaagaagattatggaggactgcttcaacaacggtctctctactgctaaggagtatgtcacccctgctgagggtgttcttccttccctcgtggctggctccaacattgctggtttcaccaaggtcgctgaggccatgaaggagcacggtgactggtggtaa

SEQ ID NO: 57173 - protein, 461 aa, Penicillium chrysogenum
MMQNLPFEPEFEQAYKELASTLENSTLFQKKPEYRKALQVVSVPERVIQFRVVWEDDKGQVQINRGYRVQFNSALGPYKGGLRFHPTVNLSILKFLGFEQIFKNALTGLNMGGGKGGSDFDPKGKTDNEIRRFCVSFMTELCKHIGADTDVPAGDIGVTGREVGFMFGQYKKIRNQWEGVLTGKGGSWGGSLIRPEATGYGVVYYVEHMIQHASGGKESFAGKRVAISGSGNVAQYAALKVIELGGSVISLSDSQGALVLNGEEGSFTAEEINTIAEIKVQRKQIAELATQDAFSSKFKYIPGARPWTNIAGRIDVALPSATQNEVSGDEAKALIAAGCKFIAEGSNMGSTQEAIDVFEAHRDANPGAAAIWYAPGKAANAGGVAVSGLEMAQNSARVNWSREEVDSRLKKIMEDCFNNGLSTAKEYVTPAEGVLPSLVAGSNIAGFTKVAEAMKEHGDWW

SEQ ID NO: 57174 - DNA, 1335 bp, Prevotella ruminicola
  CDS (1)..(1335): transl_table=11
atgaaagcaacagaagtcattgaaaagctcaaggctaaatttccaggtcagccagaatacattcaggctgtaagtcaggttcttggtactatagaagaagagtacaataagcatcctgaatttgaaaaggcaaacctgattgaacgtctttgcgttccagatcgtattcttcagttcagagtttcttgggttgacgacaatggaaatgtacagacaaacttgggatatcgcgtacagcacaataatgctatcggcccttataaaggtggtcttcgtttccacaaatctgttaacgcttctattttgaaattcttggctttcgagcagactttcaaaaattccctcacaactcttcctatgggtggtgccaaaggtggttcagacttcgatcctcacggaaagagtgatatggaagttatgcgcttttgccaagcattcatgaatgagctctaccgtcttatcggtcctgacgaggatgttcctgctggtgatatcggtgttggtggtcgtgaagtaggctacatgtttggtcaatataaaaagttaactcatcagttccagggtattttaactggtaaaggtcttgaattcggtggttctttgattcgtcctgaagctactggttatggtaatgtttacttccttgaggatatgttgaagactcgtggcgaaagtctcgaaggtaagactgttttggtttctggttctggtaacgttgcacagtacaccatcgagaaacttcttcagttgggtgcaaaacctgttacatgctcagactctaacggttatatatatgaccctgatggtattgatgcagaaaagcttgcattcatcatggaattgaagaatgttaaacgtggacgtatcaaggaatatgctgagaaatatggcgttaaatatgtagagaatgcaagaccttggggcgagaaagccgacattgcaaccccttgcgctactcaagacgaaattaacgaagctgaagctaaaactcttatagcaaatggcgtatttgcagtatcagagggtgctaacatgcctacagaacctgcagctatcaaggtattccaggatgctaagattctctactgcccaggtaaggcttctaatgctggtggtgttgcaacttctggtcttgaaatgtctcagaactctgaacgcttgagctggactcgtgaagaagttgataccaaactccataacatcatggacgaaattcacgctaattgtgtgaagtatggtacagaaccagatggatatatcaactatgtcaagggtgctaacgtagcaggcttcatgaaagttgctaaagctatgatggctcaaggcatttactaa

SEQ ID NO: 57175 - protein, 444 aa, Prevotella ruminicola
MKATEVIEKLKAKFPGQPEYIQAVSQVLGTIEEEYNKHPEFEKANLIERLCVPDRILQFRVSWVDDNGNVQTNLGYRVQHNNAIGPYKGGLRFHKSVNASILKFLAFEQTFKNSLTTLPMGGAKGGSDFDPHGKSDMEVMRFCQAFMNELYRLIGPDEDVPAGDIGVGGREVGYMFGQYKKLTHQFQGILTGKGLEFGGSLIRPEATGYGNVYFLEDMLKTRGESLEGKTVLVSGSGNVAQYTIEKLLQLGAKPVTCSDSNGYIYDPDGIDAEKLAFIMELKNVKRGRIKEYAEKYGVKYVENARPWGEKADIATPCATQDEINEAEAKTLIANGVFAVSEGANMPTEPAAIKVFQDAKILYCPGKASNAGGVATSGLEMSQNSERLSWTREEVDTKLHNIMDEIHANCVKYGTEPDGYINYVKGANVAGFMKVAKAMMAQGIY

SEQ ID NO: 57176 - DNA, 1347 bp, Psychrobacter sp
  CDS (1)..(1347): transl_table=11
atgagtatcagtaaggccattgaaaaagttgaagcccgttatgcgcatcagcctgagtttatacaagcggtcaaagaagtggcaatcactatcaagccgttatacgatgctcatcctgaatacgataaattaaaagtatttgagcgcctagttgaacccgatcgcgtatttggttttcgtgtgaattgggaagacgataacggcgaaattcaaatcaatcgcggttggcgtgtacagtttagtaacgctttagggccttacaaaggtggtcttaggttccatccgaccgttaaccagtcggtgttaaagttcttaggctttgagcaaatattcaaaaatgccttgactggtctacctattggtggcggtaaagggggatctgattttgaccctaaaggtaaaactgattctgaaattcgtcgtttttgctatgcctttatgcgtgagctacatcattacgttaataaagatatggatgttccagccggtgatattggcgtaggtggccgtgaagtcagctatatgttcgctatgtataaaaatctgacacgcgaatctactggggtaattactggtaagggtgttggttttggtggtagtttaatgcgtactgaagccactggttacggtgccgtttacttcttacaaaacatgctagctgctcagaatgaaagtattgaaggtaaaaaagtcttagtgtcaggagctggtaatgtctctttacatgcagctgaaaaagctactttgataggcgctattgtactgacagtatctgattcaaaaggtacaatttatgatgcaaaaggcttaaatcaagaaaaaatagattggttaaaagtacagaaagatcaacacaaaccattagcagactatgttgaggtgtttggtggtgaatggatggccgatcaaaagccttggagtatcaaagcagatatcgctatcccttcagcaacgcaaaatgaaatcaatgaagaagacgcgaagctacttgttgataatggtgtcaagtacatcgttgaaggcgctaacatgccgttgactgctgaagctatcgattatattcgtctacatcgtgttcattacgcgccaggtaaagcagcaaacgctggtggtgtagcggtatcagctcttgagatgtcacaaaactcagtacgtcagtatcaaacctttgagcaagttgatgagcgtttgcaaggtatcatgaaggatattcatgacagttctgctcaagcttcagagatgtatggacagacggacgaaggctatatcgattatatgtcaggcgctaatatggttggctttaaacgtgtggctgatgctctcgttgcttttggtattttaaattaa

SEQ ID NO: 57177 - protein, 448 aa, Psychrobacter sp
MSISKAIEKVEARYAHQPEFIQAVKEVAITIKPLYDAHPEYDKLKVFERLVEPDRVFGFRVNWEDDNGEIQINRGWRVQFSNALGPYKGGLRFHPTVNQSVLKFLGFEQIFKNALTGLPIGGGKGGSDFDPKGKTDSEIRRFCYAFMRELHHYVNKDMDVPAGDIGVGGREVSYMFAMYKNLTRESTGVITGKGVGFGGSLMRTEATGYGAVYFLQNMLAAQNESIEGKKVLVSGAGNVSLHAAEKATLIGAIVLTVSDSKGTIYDAKGLNQEKIDWLKVQKDQHKPLADYVEVFGGEWMADQKPWSIKADIAIPSATQNEINEEDAKLLVDNGVKYIVEGANMPLTAEAIDYIRLHRVHYAPGKAANAGGVAVSALEMSQNSVRQYQTFEQVDERLQGIMKDIHDSSAQASEMYGQTDEGYIDYMSGANMVGFKRVADALVAFGILN

SEQ ID NO: 57178 - DNA, 1365 bp, Saccharomyces bayanus
  CDS (1)..(1365)
atgtccgagccagaatttcaacaagcttacgatgaagttgtctcttcgctagaagactctactcttttcgaacaacatccaaagtacagaaaggtcttgccaatcgtctctgttccagaaagaatcatacaattcagagtcacttgggaaaacgacaagggcgaacaagaagttgctcaaggttacagagtgcaatacaactccgccaagggtccatacaagggtggtttgcgtttccatccatccgtcaacttgtctattttgaagttcttgggtttcgaacaaattttcaagaactctttgaccggcctagacatgggtggtggtaaaggtggtttgtgtgttgacttgaagggaagatccaacaacgaaatcagaagaatctgttacgcgttcatgagagagctaagcagacacattggccaagacaccgatgtgccagccggtgatattggtgtcggtggccgtgaaatcggttacctattcggtgcctacagaacatacaagaactcctgggaaggtgtcttgaccggtaaaggtttgaactggggtggttctttgatcagaccagaagctactggttacggtttggtctactacacgcaagccatgattgactatgccaccaacggtaaggaatccttcgaaggtaagcgtgtcaccatctctggtagcggtaacgttgcccaattcgccgctttgaaggttatcgaactaggcggtaccgttgtttctctatccgactccaagggttgtatcatctccgaaaccggtatcacttccgaacaagtcgctgatatctccagtgccaaggtcaatttcaagtccttggaacaaattgtcggtgaatactctaccttcactgaaaacaaagtccaatacatttccggtgcccgtccatggacccacgttcaaaaggtcgacattgccttgccatgtgccactcaaaacgaagtcagcggtgacgaagccaaggctttggtcgctcaaggtgtgaagtttgttgccgaaggttccaacatgggttccaccccagaagccattgccgttttcgaaactgctcgtgccacagcctccacactaaaggaatctgtctggtacggtccaccaaaggctgctaatttgggtggtgttgctgtttctggtttggaaatggcccaaaactcccaaagaatcacttggagcagcgaaagagtcgaccaagaattgaagaaaatcatggtcaactgtttcaacgaatgtattgattccgccaagaagtacactaaggaaggtaacgctttgccatccttagtcaagggtgctaacattgccagtttcattaaggtctctgatgctatgttcgaccaaggtgatgtattttaa

SEQ ID NO: 57179 - protein, 454 aa, Saccharomyces bayanus
MSEPEFQQAYDEVVSSLEDSTLFEQHPKYRKVLPIVSVPERIIQFRVTWENDKGEQEVAQGYRVQYNSAKGPYKGGLRFHPSVNLSILKFLGFEQIFKNSLTGLDMGGGKGGLCVDLKGRSNNEIRRICYAFMRELSRHIGQDTDVPAGDIGVGGREIGYLFGAYRTYKNSWEGVLTGKGLNWGGSLIRPEATGYGLVYYTQAMIDYATNGKESFEGKRVTISGSGNVAQFAALKVIELGGTVVSLSDSKGCIISETGITSEQVADISSAKVNFKSLEQIVGEYSTFTENKVQYISGARPWTHVQKVDIALPCATQNEVSGDEAKALVAQGVKFVAEGSNMGSTPEAIAVFETARATASTLKESVWYGPPKAANLGGVAVSGLEMAQNSQRITWSSERVDQELKKIMVNCFNECIDSAKKYTKEGNALPSLVKGANIASFIKVSDAMFDQGDVF

SEQ ID NO: 57180 - DNA, 1356 bp, Schizosaccharomyces pombe
  CDS (1)..(1356)
atgagtaccccatacgaacctgaatttcaacaagcctacaaggagattgtgggctccatcgagagctccaagctctttgaagttcatcccgagttgaagcgtgtgcttccaatcatttccattcccgaacgtgtcttagaattccgcgtcacatgggaggacgataaaggtaactgccgtgttaacaccggctaccgtgtccaattcaactcggctttgggcccctacaagggtggattgcgtttccatccttccgtcaacttgagcatcctcaagttcttgggctttgaacaaattttcaagaatgccttgacgggccttcccatgggtggtggcaaaggtggttctgacttcgaccccaagggcaaatccgacaacgagattcgtcgcttctcgcaagctttcatgcgtcagcttttccgctatatcggtcctcaaactgatgtaccggctggtgatattggtgtcacaggttttgtcgttatgcacatgtttggtgagtacaagcgtcttcgcaatgagtacagtggtgtcgtcaccggcaagcacatgcttaccggcggtagcaacattcgtcctgaagccactggctacggtgtcgtttactatgttaagcacatgattgaacaccgcaccaagggtgccgagaccttgaagggcaagcgtgttgccatctccggtagcggcaacgttgctcaatatgctgccttgaagtgcattcaagaaggcgctattgttaagagtatcagtgactctaaaggtgtcctaattgcaaagaccgctgaaggccttgtccctgaagagatccatgaaattatggctctaaaggagaagcgtgccagcattgccgactctgcttctctttgcaagaagcatcactacatcgccggtgctcgtccctggactaatgttggtgaaattgacattgctttgccttgtgcaactcaaaacgaagttagcggtgaggaagccgccgctcttatcaaacaaggatgtcgctacgttgctgagggctccaacatgggttcttctgctgaggccgttgaagtctttgagaagtctcgtgcttctggtgagggttgctggcttgctcctggtaaggctgccaatgctggtggtgtcgccgtttctggcttggaaatggctcaaaatgctcaattctctacctggactcatgccgaggttgacgctaaattggctggaattatgcaaaacatctttgaacaatccaccgatgtcgcctccaagtattgtgactctggctctaacaacattcccagtcttgtcgatggtgccaacattgctggtttcttgaaggttgctactgccatgcaagccgttggtgactggtggtag

SEQ ID NO: 57181 - protein, 451 aa, Schizosaccharomyces pombe
MSTPYEPEFQQAYKEIVGSIESSKLFEVHPELKRVLPIISIPERVLEFRVTWEDDKGNCRVNTGYRVQFNSALGPYKGGLRFHPSVNLSILKFLGFEQIFKNALTGLPMGGGKGGSDFDPKGKSDNEIRRFSQAFMRQLFRYIGPQTDVPAGDIGVTGFVVMHMFGEYKRLRNEYSGVVTGKHMLTGGSNIRPEATGYGVVYYVKHMIEHRTKGAETLKGKRVAISGSGNVAQYAALKCIQEGAIVKSISDSKGVLIAKTAEGLVPEEIHEIMALKEKRASIADSASLCKKHHYIAGARPWTNVGEIDIALPCATQNEVSGEEAAALIKQGCRYVAEGSNMGSSAEAVEVFEKSRASGEGCWLAPGKAANAGGVAVSGLEMAQNAQFSTWTHAEVDAKLAGIMQNIFEQSTDVASKYCDSGSNNIPSLVDGANIAGFLKVATAMQAVGDWW

SEQ ID NO: 57182 - DNA, 1374 bp, Tuber borchii
  CDS (1)..(1374)
atgtctaaccttgcacccgagccggaattccagcaagcttataatgagctcgttcactctttgagggatcaaaactcttccaggcttccccagatcttaaggctgctttgcctgtcgtctccgcccgagcgtgtcattcagttccgtgtcacttgggaggatgacaagggcaatttccaagtcaaccgtggatacagagttcaattcaactctgctctcggcccctacaagggtggtttgagattccaccccaccgtcaatctatccatcctcaagttcttggggttcgagcaaaccttcaagaatgcgttgactggactcaacatgggtggtggcaagggaggatctgactttgaccccaagggaaagtctgacaacgagatccgccgcttctgctattctttcatgcgtgagctctccaagcacattggccagttcactgatgttccggctggtgatatcggtgttggtggccgtgagatcggatacctcttcggtgcctacgagtcctacaagaaccagttcgagggtgtcttgactggaaagggaatcacctggggtggttctctgatccgcccggaggccactggttacggtcttgtctactatgttgcccatatgatttcttatgcctccggtggaaaggaaaccttcgccggcaagcgtgttgctatttctggttctggaaacgttgctcaatacgccgcccttaaggtcctcgaacttggaggaaaagttatcacgctctctgactccaagggtgctttgattgccaccggcgaggagggtttcaacgagaccgacattgaactcattgccaagttgaagctcgacagagggtaccttacccagctccacgccgccgaagactccttcaagtctcgcttcaagtacctccccggcgagaggccttggtgccacgtcgacaaggtcgatgttgcccttccctctgcaacccagaatgaggtttccgagcaggaggccaaggagttgatcgctagtggatgcaagttcttggctgagggttccaacatgggatctacccaggaggctatcaacgtttacgaagaggatcgtaaaagtcgcaaggccgatggtctttggtacggtcctgctaaggctgccaactgtggtggtgttgctgtctctggtcttgagatggctcagaacagccagcgcctcacttggacctctgagcaggtcgacaaggagcttgccggaattatggaaagatgcttctggaactgcttgaaccccgctaaggagtatttcgacattgccgaaggcgagcttccttctcttgttgctggtgccaacattgccggttatgtcaaggttgtcaatgctatgaaggcgcagggagattggtggtaa

SEQ ID NO: 57183 - protein, 457 aa, Tuber borchii
MSNLAPEPEFQQAYNELVHSLRDQNSSRLPQILRLLCLSSPPERVIQFRVTWEDDKGNFQVNRGYRVQFNSALGPYKGGLRFHPTVNLSILKFLGFEQTFKNALTGLNMGGGKGGSDFDPKGKSDNEIRRFCYSFMRELSKHIGQFTDVPAGDIGVGGREIGYLFGAYESYKNQFEGVLTGKGITWGGSLIRPEATGYGLVYYVAHMISYASGGKETFAGKRVAISGSGNVAQYAALKVLELGGKVITLSDSKGALIATGEEGFNETDIELIAKLKLDRGYLTQLHAAEDSFKSRFKYLPGERPWCHVDKVDVALPSATQNEVSEQEAKELIASGCKFLAEGSNMGSTQEAINVYEEDRKSRKADGLWYGPAKAANCGGVAVSGLEMAQNSQRLTWTSEQVDKELAGIMERCFWNCLNPAKEYFDIAEGELPSLVAGANIAGYVKVVNAMKAQGDWW

SEQ ID NO: 57184 - DNA, 1365 bp, Saccharomyces cerevisiae
  CDS (1)..(1365)
atgtcagagccagaatttcaacaagcttacgaagaagttgtctcctctttggaagactctactcttttcgaacaacacccagaatacagaaaggttttgccaattgtttctgttccagaaagaatcatacaattcagagtcacctgggaaaatgacaagggtgaacaagaagttgctcaaggttacagagtgcaatataactccgccaagggtccatacaagggtggtctacgtttccatccttccgtgaacttgtctatcttgaaattcttgggtttcgaacaaatcttcaagaactccttgaccggcctagacatgggtggtggtaaaggtggtctatgtgtggacttgaagggaagatctaataacgaaatcagaagaatctgttatgctttcatgagagaattgagcagacacattggtcaagacactgacgtgccagctggtgatatcggtgttggtggtcgtgaaattggttacctgttcggtgcttacagatcatacaagaactcctgggaaggtgtcttaaccggtaagggtttgaactggggtggttctttgatcagaccagaagccactggttacggtttagtttactatactcaagctatgatcgactatgccacaaacggtaaggaatctttcgaaggtaagcgcgtcaccatctctggtagtggtaacgttgctcaatacgctgccttgaaggttattgagctaggtggtactgtcgtttccctatctgactccaagggttgtatcatctctgaaactggtatcacctccgaacaagtcgctgatatttccagtgctaaggtcaacttcaagtccttggaacaaatcgtcaacgaatactctactttctccgaaaacaaagtgcaatacattgctggtgctcgtccatggacccacgtccaaaaggtcgacattgctttgccatgtgccacccaaaatgaagtcagcggtgaagaagccaaggccttggttgctcaaggtgtcaagtttattgccgaaggttccaacatgggttccactccagaagctattgccgtctttgaaactgctcgttccaccgccactggaccaagcgaagctgtttggtacggtccaccaaaggctgctaacttgggtggtgttgctgtttctggtttagaaatggcacaaaactctcaaagaatcacatggactagcgaaagagttgaccaagagttgaagagaattatgatcaactgtttcaatgaatgtatcgactatgccaagaagtacactaaggacggtaaggtcttgccatctttggtcaaaggtgctaatatcgcaagtttcatcaaggtctctgatgctatgtttgaccaaggtgatgtattttaa

SEQ ID NO: 57185 - protein, 454 aa, Saccharomyces cerevisiae
MSEPEFQQAYEEVVSSLEDSTLFEQHPEYRKVLPIVSVPERIIQFRVTWENDKGEQEVAQGYRVQYNSAKGPYKGGLRFHPSVNLSILKFLGFEQIFKNSLTGLDMGGGKGGLCVDLKGRSNNEIRRICYAFMRELSRHIGQDTDVPAGDIGVGGREIGYLFGAYRSYKNSWEGVLTGKGLNWGGSLIRPEATGYGLVYYTQAMIDYATNGKESFEGKRVTISGSGNVAQYAALKVIELGGTVVSLSDSKGCIISETGITSEQVADISSAKVNFKSLEQIVNEYSTFSENKVQYIAGARPWTHVQKVDIALPCATQNEVSGEEAKALVAQGVKFIAEGSNMGSTPEAIAVFETARSTATGPSEAVWYGPPKAANLGGVAVSGLEMAQNSQRITWTSERVDQELKRIMINCFNECIDYAKKYTKDGKVLPSLVKGANIASFIKVSDAMFDQGDVF

SEQ ID NO: 57186 - DNA, 1374 bp, Saccharomyces cerevisiae
  CDS (1)..(1374)
atgacaagcgaaccagagtttcagcaggcttacgatgagatcgtttcttctgtggaggattccaaaatttttgaaaaattcccacagtataaaaaagtgttacctattgtttctgtcccggagaggatcattcaattcagggtcacgtgggaaaatgataatggcgagcaagaagtggctcaaggatacagggtgcagttcaattcagccaagggcccttacaagggtggcctacgcttccacccatcagtgaacctgtctatcctaaaatttttgggttttgaacagatcttcaagaatgcgctcactgggctagatatgggcggtggtaagggtggcctgtgtgtggacttgaaaggcaagtctgacaacgagatcagaaggatttgttatgcgttcatgagagaactgagcaggcatattggtaaggacacagacgtgcccgcaggagatattggtgtcggtggccgtgaaattggctacctattcggcgcttacagatcatacaagaactcctgggaaggtgtgttgactggtaagggtttaaactggggtggctcacttatcaggccggaggccaccgggttcggcttagtttactatacgcaagcaatgatcgattatgcaacaaacggcaaggagtcgtttgagggcaaacgtgtgacaatctccggaagtggcaatgttgcgcaatatgcagctttgaaagtgatcgagctgggtggtattgtggtgtctttatccgattcgaaggggtgcatcatctctgagacgggcattacttctgagcaaattcacgatatcgcttccgccaagatccgtttcaagtcgttagaggaaatcgttgatgaatactctactttcagcgaaagtaagatgaagtacgttgcaggagcacgcccatggacgcatgtgagcaacgtcgacattgccttgccctgtgccacccaaaacgaggtcagtggtgacgaagccaaggccctagtggcatctggcgttaagttcgttgccgaaggtgctaacatgggttctacacccgaggctatttctgttttcgaaacagcgcgtagcactgcaaccaatgcaaaggatgcagtttggtttgggccaccaaaggcagctaacctgggcggcgtggcagtatccggtctggaaatggctcagaattctcaaaaagtaacttggactgccgagcgggtcgatcaagaactaaagaagataatgatcaactgcttcaacgactgcatacaggccgcacaagagtactctacggaaaaaaatacaaacaccttgccatcattggtcaagggggccaacattgccagcttcgtcatggtggctgacgcaatgcttgaccagggagacgttttttag

SEQ ID NO: 57187 - protein, 457 aa, Saccharomyces cerevisiae
MTSEPEFQQAYDEIVSSVEDSKIFEKFPQYKKVLPIVSVPERIIQFRVTWENDNGEQEVAQGYRVQFNSAKGPYKGGLRFHPSVNLSILKFLGFEQIFKNALTGLDMGGGKGGLCVDLKGKSDNEIRRICYAFMRELSRHIGKDTDVPAGDIGVGGREIGYLFGAYRSYKNSWEGVLTGKGLNWGGSLIRPEATGFGLVYYTQAMIDYATNGKESFEGKRVTISGSGNVAQYAALKVIELGGIVVSLSDSKGCIISETGITSEQIHDIASAKIRFKSLEEIVDEYSTFSESKMKYVAGARPWTHVSNVDIALPCATQNEVSGDEAKALVASGVKFVAEGANMGSTPEAISVFETARSTATNAKDAVWFGPPKAANLGGVAVSGLEMAQNSQKVTWTAERVDQELKKIMINCFNDCIQAAQEYSTEKNTNTLPSLVKGANIASFVMVADAMLDQGDVF

SEQ ID NO: 57188 - DNA, 1236 bp, Nicotiana plumbaginifolia
  CDS (1)..(1236)
atgaatgctcttgcagccaccaaccgtaactttcgccaggccgctcgcatccttggattggactccaaacttgagaagagtcttttaatccctttcagagaaattaaggtggaatgcacaattcccaaggatgatggaacattagtgtcctatgttggattcagagtgcaacatgataatgctcggggtcctatgaaagggggaatcagataccatcctgaggttgaccttgacgaagtaaatgcccttgctcaactaatgacttggaagactgctgtagcagatattccgtatggaggagctaagggcggaattggctgcaaaccaaaagatctaagcaagagtgagttggagcgccttacacgtgttttcacacagaaaattcatgatcttattggaattaatactgatgtccctgcacctgatatgggcactaatgcccagactatggcctggattttggatgagtattcaaagtttcatggtcactcacctgcaattgtgactggaaaaccgattgatcttggcggttcattgggtagggaagctgcaactgggcgtggtgtcgtttatgctacagaagctttacttgctgaatatggaaagaatattaaggatttgacttttgcaattcagggttttggaaatgtgggagcatgggcagcaaagcttattcatgagagaggtggcaaggtaattgccgtgagtgatataactggagcagtcaagaatcccaatgggcttgatatacccgctttgcttaatcacaaagaagcaacagggaagctgatcgactttagtggtggggatgtgatgaattcagatgaagtgcttacacatgaatgtgatgttctcataccttgtgccttgggaggagttttgaacagagaaaatgctgataatgtcaaggctaagttcatcatagaagcagcaaatcatcctactgatccggaggctgatgagattttgtgtaaaaagggaattgtaattcttcccgacatatatgccaatgctggaggtgtgacagtcagttattttgagtgggttcagaatattcaaggttttatgtgggatgaggagaaggttaacagggaacttaggaaatacatgacaaaagccttccataatctgaaaaacatgtgtcagtcgcacaattgcagtcttcggatgggtgccttcacactaggagtgaatcgtgttgcgcgtgccacaacattaagaggttgggaggcgtag

SEQ ID NO: 57189 - protein, 411 aa, Nicotiana plumbaginifolia
MNALAATNRNFRQAARILGLDSKLEKSLLIPFREIKVECTIPKDDGTLVSYVGFRVQHDNARGPMKGGIRYHPEVDLDEVNALAQLMTWKTAVADIPYGGAKGGIGCKPKDLSKSELERLTRVFTQKIHDLIGINTDVPAPDMGTNAQTMAWILDEYSKFHGHSPAIVTGKPIDLGGSLGREAATGRGVVYATEALLAEYGKNIKDLTFAIQGFGNVGAWAAKLIHERGGKVIAVSDITGAVKNPNGLDIPALLNHKEATGKLIDFSGGDVMNSDEVLTHECDVLIPCALGGVLNRENADNVKAKFIIEAANHPTDPEADEILCKKGIVILPDIYANAGGVTVSYFEWVQNIQGFMWDEEKVNRELRKYMTKAFHNLKNMCQSHNCSLRMGAFTLGVNRVARATTLRGWEA

SEQ ID NO: 57190 - DNA, 1236 bp, Nicotiana plumbaginifolia
  CDS (1)..(1236)
atgaacgctttagcagcaaccaacagaaactttaagctagcatctcgtttgctaggcttggattccaagcttgaacagtgtcttctcattccatttagggagattaaggttgagtgtacaataccaaaggacgacggctcattggcaacttttattggattcagggtacaacacgacaatgctcgaggccccatgaaaggaggaatcagataccaccctgaggtagatccggatgaggtgaatgccttagcacagctaatgacatggaagacagcagttgccaatataccatatggaggggctaaaggaggaatagggtgtagtcccagtgacttaagcatctctgagctagagcgacttactcgagtatttactcaaaagatccacgaccttattggagttcatacagatgttccagcacctgacatgggaacaaatccacagacaatggcgtggattctagatgagtactcaaagtttcatggctattcacctgcagtggtaactggaaaacctattgatcttggtggatctctaggcagagatgcagctactggtaggggtgttctttttgctgctgaagcactgcttagagaccatggaaagagcatcgctgggcagcgttttgttgttcagggatttggaaatgttggttcttgggctgcgcaactcattactgagcaaggtggaaagattgttgcagtaagtgacataacaggtgccataaagaacaaaaatggaatcgacatagcaagtttactcaaacatgtgaaagaaaatcgcggagttaaaggtttccatggtgctgattcaatagatcctaattctatactggtagaagactgcgatgttcttataccagctgcccttggcggagtaattaacagggataatgcaaaagacattaaagccaaattcattgttgaggctgctaaccatccaactgatcctgaggctgacgagattttggcaaagaaaggagttgtcattctaccagacatatatgcaaactcaggaggtgttactgtcagctattttgaatgggttcagaacatccaaggttttatgtgggatgaggagagagtgaacactgagctaaaagcatacatgaacagaggttttaaagatgtcaaagatatgtgcaagactcacaactgcgatctccgaatgggtgccttcaccctaggcgtcaaccgtgttgccagagcaacaacactcaggggatgggaagcctaa

SEQ ID NO: 57191 - protein, 411 aa, Nicotiana plumbaginifolia
MNALAATNRNFKLASRLLGLDSKLEQCLLIPFREIKVECTIPKDDGSLATFIGFRVQHDNARGPMKGGIRYHPEVDPDEVNALAQLMTWKTAVANIPYGGAKGGIGCSPSDLSISELERLTRVFTQKIHDLIGVHTDVPAPDMGTNPQTMAWILDEYSKFHGYSPAVVTGKPIDLGGSLGRDAATGRGVLFAAEALLRDHGKSIAGQRFVVQGFGNVGSWAAQLITEQGGKIVAVSDITGAIKNKNGIDIASLLKHVKENRGVKGFHGADSIDPNSILVEDCDVLIPAALGGVINRDNAKDIKAKFIVEAANHPTDPEADEILAKKGVVILPDIYANSGGVTVSYFEWVQNIQGFMWDEERVNTELKAYMNRGFKDVKDMCKTHNCDLRMGAFTLGVNRVARATTLRGWEA

SEQ ID NO: 57192 - DNA, 1281 bp, Bacillus subtilis
  CDS (1)..(1281): transl_table=11
atggcagccgatcgaaacaccggtcatacagaagaggacaaacttgatgtattaaaatcaacccaaaccgtaatacataaggctctggaaaaattgggatatcccgaagaggtatacgaattgttaaaagagccgatgagattattaacggtaaaaatacctgttcgtatggacgacggttcagtaaagattttcacaggatatcgtgcgcacaatgactctgtcggtccaacgaaaggcgggatacgttttcacccgaacgtaacagaaaaagaggtgaaggcggtgaaggcgctttcaatttggatgagtttaaaatgcggcataattgatcttccatatggcggtggtaaaggcggaattgtttgtgatccaagggatatgtcgtttagagagctggagcgtctgagcagagggtatgtcagagcgatcagccaaattgtcggcccgacaaaagacgtgccggcaccggatgtatttacaaactcacaaatcatggcttggatgatggatgagtattcaagaattgatgaatttaattcgcctggatttattacaggcaaaccgcttgtgcttggcggatctcacgggagagaatctgcgacagcaaaaggtgttaccatctgtattaaagaagcggctaagaagagaggcatcgatattaaaggtgcgcgtgtcgttgtccaaggcttcggaaacgcgggaagctatttggcaaaatttatgcatgatgcgggggcaaaagttgtcggcatctcagatgcgtatggcggactttatgatccggaaggccttgatatcgattatttactcgaccgacgcgacagcttcggtaccgtaacaaagcttttcaacgataccattaccaaccaagagctgctggagctggattgtgatattctcgttcctgctgcgattgaaaatcaaattacagaagaaaatgcccataatatccgggctaaaattgtcgttgaagcagcgaacggaccaacaacgcttgaaggaacaaaaattctttcagaccgggacattctgcttgtaccagacgtgctggcaagtgccggtggcgtaacagtttcttattttgaatgggttcagaataaccaaggcttctactggagtgaagaagaggtagaagaaaaattagaaaaaatgatggtcaaatcatttaacaatatttacgaaatggctaacaaccgaagaattgacatgaggctcgctgcatatatggtcggcgttcgcaaaatggctgaagcttcgcgttttagaggctggatataa

SEQ ID NO: 57193 - protein, 426 aa, Bacillus subtilis
MAADRNTGHTEEDKLDVLKSTQTVIHKALEKLGYPEEVYELLKEPMRLLTVKIPVRMDDGSVKIFTGYRAHNDSVGPTKGGIRFHPNVTEKEVKAVKALSIWMSLKCGIIDLPYGGGKGGIVCDPRDMSFRELERLSRGYVRAISQIVGPTKDVPAPDVFTNSQIMAWMMDEYSRIDEFNSPGFITGKPLVLGGSHGRESATAKGVTICIKEAAKKRGIDIKGARVVVQGFGNAGSYLAKFMHDAGAKVVGISDAYGGLYDPEGLDIDYLLDRRDSFGTVTKLFNDTITNQELLELDCDILVPAAIENQITEENAHNIRAKIVVEAANGPTTLEGTKILSDRDILLVPDVLASAGGVTVSYFEWVQNNQGFYWSEEEVEEKLEKMMVKSFNNIYEMANNRRIDMRLAAYMVGVRKMAEASRFRGWI

SEQ ID NO: 57194 - DNA, 1923 bp, Oryza sativa
  CDS (1)..(1923)
atggacgagctcaacctattgcggcagcaccagcaccagcaccagcaccacctggtggtgcgcggcctcggcgaggagatcgacctcgagatcggcccgggcgacgacccctccttccccggcgcggccctcgtcggcgtcacccccggcgcgcacgaccccgcggacgaccacaagagcctcctcatcccgtgctcgcagcccgtcgccgaggggcagccgcagccgacgccgccgcaggtggaggagcacgacgggctgctacggctgccggggcaaaccaagaagaagaagaaggtggtgaagaaatggagggaggagtgggcggacacctacaagtgggcctacgtcgccgtgcacgacaacaccagcaggatcttctgcaccgtgtgcaaggagtacgggcggaagcaccgccggaatccctacgggaacgaggggagcaggaacatgcagatgagcgcgctggaggagcacaacaacagcttgctgcacaaggaggcgctgcggttgcagacggcgtccaaggagaacgcgcagccccctgagatcgagaggccggtatatgtcaaagctctgtcgaaaactgcagcctctatacttgaatctatcctaaagaaggaccctcatgaagctgagtttatacagtctatccaagaggtggttcattccttggaaccagttttggtgaagaactcccaacatgtccaaattttggagcgtttgttggaacctgagagatgctttatcttcagagtgccatgggttgatgatagaggtgaagcacatgtaaatcgaggcttccgtgtgcagttcagtcaagcgttaggtccatgcagaggtggtcttcgtttccacccttccatgactttgagcgtagcaaaatttctagcttttgagcagactctaaaaaatgctttgtcacaatataaacttggaggagctgctggagggagtgattttgatcccaagggtaaaagtgaaagtgagataatgcgtttttgtcaaagtttcatggatgagctgtatagatatttggggcctgatcaggattttcctgctgaagatgttggtgtgggtccaagagaaatgggttatctttttgggcagtatagacgcctttctggtcattttcaggggaattttacagggcctaaaatcttctggtctggttctagtttccgaacagaagctactggatacggactggtattctttgcacgtgtagtgcttgctgatatgaacaaggaactcaaaggattaagatgtgtgataagtggttctggaaagatagcaatgcatgtattggaaaagcttctgtcatgtgaagctattcctgttacagtttcagattcgaagggttatttgttagacacggaagggtttgattacatgaaatattcagttctaaggaacatcaaggctcagcaaaggagcctcaaggaatacttgaaatcatatccaaatgccaaatatatagatgatgcaaagccctggagtgagaagtgtgacgttgcattcccttgtgcatcacaaaatgagattgaccaggcggaggctcttgcaataattaactctggctgccgtgttcttatagaatgttcaaatatgccttgcactgctcaagcagttgatatcctacgaacagcaaaagtagttgttgctcccgcaaaggcaactgccgctggtggggtagcagttggagaactcgaactgaaccctgagttcagtttgatgcagtggtcagtggaggattttgagaacaaaatacaggatgcggtgaaacaaacatatgacagatctatcaaagctgctcaagattatggaatcatgaaagagaacccagagtcgttggtgcatggtgcaaacatatgtgcgtttcttaatattgcacaagccatgactgatcaaggatgtgtctag

SEQ ID NO: 57195 - protein, 640 aa, Oryza sativa
MDELNLLRQHQHQHQHHLVVRGLGEEIDLEIGPGDDPSFPGAALVGVTPGAHDPADDHKSLLIPCSQPVAEGQPQPTPPQVEEHDGLLRLPGQTKKKKKVVKKWREEWADTYKWAYVAVHDNTSRIFCTVCKEYGRKHRRNPYGNEGSRNMQMSALEEHNNSLLHKEALRLQTASKENAQPPEIERPVYVKALSKTAASILESILKKDPHEAEFIQSIQEVVHSLEPVLVKNSQHVQILERLLEPERCFIFRVPWVDDRGEAHVNRGFRVQFSQALGPCRGGLRFHPSMTLSVAKFLAFEQTLKNALSQYKLGGAAGGSDFDPKGKSESEIMRFCQSFMDELYRYLGPDQDFPAEDVGVGPREMGYLFGQYRRLSGHFQGNFTGPKIFWSGSSFRTEATGYGLVFFARVVLADMNKELKGLRCVISGSGKIAMHVLEKLLSCEAIPVTVSDSKGYLLDTEGFDYMKYSVLRNIKAQQRSLKEYLKSYPNAKYIDDAKPWSEKCDVAFPCASQNEIDQAEALAIINSGCRVLIECSNMPCTAQAVDILRTAKVVVAPAKATAAGGVAVGELELNPEFSLMQWSVEDFENKIQDAVKQTYDRSIKAAQDYGIMKENPESLVHGANICAFLNIAQAMTDQGCV

SEQ ID NO: 57196 - DNA, 1236 bp, Oryza sativa
  CDS (1)..(1236)
atgaacgcgctagccgccaccagccgcaacttccggcaggcggcgaggctactcggcctcgactccaaactccagaagagccttctgatccctctccgcgagatcaaggttgaatgcaccatccccaaagacgatggcaccttggcgacgtttgttgggttcagagtgcagcatgacaattcccgtggcccgatgaaaggcggcatcaggtatcaccctgaggttgacccagatgaagtgaatgcacttgctcagctgatgacatggaagactgctgttgctgctgtgccttatggtggagcaaagggaggcattgggtgcactcctggtgaactgagtagaagtgaacttgagcgtttaacgcgcgtgtttacccagaaaattcatgacctcattgggatcaatacagatgttccagcccctgacatgggaacaaatgcacagaccatggcatggatactagatgaatactcaaagttccatggccactccccagctgttgtcacgggaaagccaattgatcttggaggatccttaggaagagatgctgcgactggccgcggtgttatgtatgctactgaggctttattgactgaatacagcgagtcaatttcaggatcaacctttgttatccagggtttggggaatgttggttcttgggcagccaagctcatccatcagaaaggtggcaagatagttgcagttggagatgtaacaggtgcaatcagaaataaatccgggatagacatacctgctctcttgaagcacaggagcgagggtggatctttggaggacttctacggtgcagaagttatggacgctgcagagctgcttgtgcatgaatgtgatgttctcgtcccgtgcgccttgggtggtgttctcaacagagaaaatgcagctgaagtgaaggccagattcataattgagggggctaatcatcccactgatacagaagctgatgagatactcgcaaagaagggagtcattgtgctgccagatatctatgcaaattcaggcggcgtggtcgtcagctattttgagtgggttcagaacattcagggcttcatgtgggatgaagagaaggtgaacagggagctccaaaagtacatgaagaacgcttttcagaacatcaaggacatgtgcaaatcccaaaactgcaaccttaggatgggggcattcactttgggggttaaccgggttgcaaaggctactctgttgaggggatgggaggcatga

SEQ ID NO: 57197 - protein, 411 aa, Oryza sativa
MNALAATSRNFRQAARLLGLDSKLQKSLLIPLREIKVECTIPKDDGTLATFVGFRVQHDNSRGPMKGGIRYHPEVDPDEVNALAQLMTWKTAVAAVPYGGAKGGIGCTPGELSRSELERLTRVFTQKIHDLIGINTDVPAPDMGTNAQTMAWILDEYSKFHGHSPAVVTGKPIDLGGSLGRDAATGRGVMYATEALLTEYSESISGSTFVIQGLGNVGSWAAKLIHQKGGKIVAVGDVTGAIRNKSGIDIPALLKHRSEGGSLEDFYGAEVMDAAELLVHECDVLVPCALGGVLNRENAAEVKARFIIEGANHPTDTEADEILAKKGVIVLPDIYANSGGVVVSYFEWVQNIQGFMWDEEKVNRELQKYMKNAFQNIKDMCKSQNCNLRMGAFTLGVNRVAKATLLRGWEA

SEQ ID NO: 57198 - DNA, 1236 bp, Oryza sativa
  CDS (1)..(1236)
atgaatgcgttggcagcgacgagcaggaacttcaagcaggcggccaagctgctgggcctggactccaagctggagaagagcttgctcatcccgttcagggagatcaaggttgaatgcacaattccgaaagatgatgggactttagcatcttatgttgggtttagggtccaacacgacaatgctaggggacctatgaagggtggaatcagataccaccatgaggttgatcctgatgaggtcaatgcgttggcacaactaatgacatggaagacggccgtggctaatattccatatggaggagctaaaggtggaataggatgcagccctggagatctcagcatctccgagctagagcgacttacccgtgttttcacccagaaaatccacgacttgattggcattcatacagatgttccagctccagatatgggaaccaactctcagacaatggcgtggatacttgacgaatactcaaagtttcatggttattcacctgctgtggtgactggaaaacctgttgaccttggaggatcacttggaagagatgcagctactggaaggggagttctgtttgctactgaagccttgcttgcagagcatggcaagggcattgctggccagcgttttgtaatacagggatttggtaatgttggatcctgggctgctcagctgatcagtgaagctggtggcaaggtgattgccatcagtgatgtcactggagctgtcaagaacagcaatgggcttgacattgcaaagctaatgaagcactcatcagagaaccgcgggatcaagggtttcgacggaggcgatgcaatcgacccacgctcactgcttactgaagaatgtgatgtcctcatcccggcagcacttggtggagttataaacaaggacaacgcaaatgagatcaaagcaaagtacatcattgaggctgcaaaccaccccacagaccctgaggcagatgagatcctgtccaagaaaggcgttctcattcttccagacatcctcgcgaactccggtggtgtcacagtgagctacttcgagtgggttcagaacattcagggtttcatgtgggacgaggagaaggtgaacaatgagctgaagacctacatgacccgtgggttcagggatgtgaaggagatgtgcaggagccaccactgcgacctccgcatgggcgccttcaccctcggtgtcaaccgtgtcgctcgcgccaccgttctcagaggatgggaagcatga

SEQ ID NO: 57199 - protein, 411 aa, Oryza sativa
MNALAATSRNFKQAAKLLGLDSKLEKSLLIPFREIKVECTIPKDDGTLASYVGFRVQHDNARGPMKGGIRYHHEVDPDEVNALAQLMTWKTAVANIPYGGAKGGIGCSPGDLSISELERLTRVFTQKIHDLIGIHTDVPAPDMGTNSQTMAWILDEYSKFHGYSPAVVTGKPVDLGGSLGRDAATGRGVLFATEALLAEHGKGIAGQRFVIQGFGNVGSWAAQLISEAGGKVIAISDVTGAVKNSNGLDIAKLMKHSSENRGIKGFDGGDAIDPRSLLTEECDVLIPAALGGVINKDNANEIKAKYIIEAANHPTDPEADEILSKKGVLILPDILANSGGVTVSYFEWVQNIQGFMWDEEKVNNELKTYMTRGFRDVKEMCRSHHCDLRMGAFTLGVNRVARATVLRGWEA

SEQ ID NO: 57200 - DNA, 1236 bp, Brassica napus
  CDS (1)..(1236)
atgaatgctttagccgcaacgaacaggaacttccgccatgcctcacgaatcctcggcttggattcgaagatcgagaagagtctcatgatcccattcagagaaatcaaggtggagtgcacgatccccaaagacgacggaactcttgtttcctacgttggattcagggttcaacacgacaatgctcgtggaccaatgaaaggaggaatcagatatcaccccgaggttgatccggatgaagtcaacgcattggctcagctcatgacttggaagacagctgtcgctgacattccgtacggtggagctaaaggtgggatcggatgcaaccctcgtgacttgagcttgagcgagctcgagaggcttacacgtgtcttcactcagaagatccatgatctcatcggtattcacaccgatgtacctgctcctgacatggggactaatgctcagacaatggcttggattcttgatgagtactccaagtttcatggtcattcccctgctgttgtcaccggcaagcccattgatcttggtggttcacttggtagggaagctgccacaggacgtggtgtagtctatgcaaccgaagctctccttgctgaatacggcaaatcgattaagggattgacatttgttgttcagggttttgggaatgttggaacatgggcagccaagctgatccatgagaaaggtgggaaagtggttgcggtaagcgacatcacaggtgctgtcagaaaccctgaaggtctagacatcgacgctcttctgagtcacaaagagacaactggaagtctagttgatttcagtggtggagacgctatggactcaaatgaactgcttatccatgagtgtgatgttctcattccttgtgctcttggtggtgtcttgaacaaggaaaatgctggagatgtgaaggcaaagttcataatagaggctgcaaaccatccaactgatccagatgctgatgagattctgtcgaagaaaggagtgattatacttccagatatatacgcaaacgcaggaggagtgacggtgagttactttgagtgggtgcagaacattcaagggttcatgtgggaagaggagaaagtgaacctggagttgcagaagtacatgactcgtgcctttcacaacatcaagtcaatgtgccatactcattcctgtaacctccgtatgggagctttcactcttggagttaaccgtgttgctagagccacccagttgcgtggttgggaagcttga

SEQ ID NO: 57201 - protein, 411 aa, Brassica napus
MNALAATNRNFRHASRILGLDSKIEKSLMIPFREIKVECTIPKDDGTLVSYVGFRVQHDNARGPMKGGIRYHPEVDPDEVNALAQLMTWKTAVADIPYGGAKGGIGCNPRDLSLSELERLTRVFTQKIHDLIGIHTDVPAPDMGTNAQTMAWILDEYSKFHGHSPAVVTGKPIDLGGSLGREAATGRGVVYATEALLAEYGKSIKGLTFVVQGFGNVGTWAAKLIHEKGGKVVAVSDITGAVRNPEGLDIDALLSHKETTGSLVDFSGGDAMDSNELLIHECDVLIPCALGGVLNKENAGDVKAKFIIEAANHPTDPDADEILSKKGVIILPDIYANAGGVTVSYFEWVQNIQGFMWEEEKVNLELQKYMTRAFHNIKSMCHTHSCNLRMGAFTLGVNRVARATQLRGWEA

SEQ ID NO: 57202 - DNA, 1239 bp, Glycine max
  CDS (1)..(1239)
atgaacgctcttgcagctaccaaccgcaactttcaacgtgcagctcgcattctcggtttggattccaagcttgagaagagtctcctcatacccttcagagaaatcaaagttgaatgcacgatccccaaggatgatggaactctggtttcctatgtgggattcaggatccaacatgataatgcccgtggtcctatgaagggagggattcgttatcatcctgaggttgaccctgatgaagtgaatgctctagctcagctgatgacatggaagactgctgtagcagacattccttatggaggagcaaagggtgggatcggctgcaacccaagggatctgagtatcagtgagttagaacgtctaactcgggttttcacccaaaagattcatgatctcattggcgttcagagggatgttcctgcccctgatatgggaactaatgctcagaccatggcatggattcttgatgaatattcaaagtttcatgggcattcacctgcagttgtgacagggaagcctattgatcttggaggttcgttggggagggaggctgcaacaggtctcggagtggtttttgcaactgaggctttatttgctgaatatgggaagtcaatttcggatcacacatttgtcatccagggctttggaaatgtgggcacgtgggctgctaagtctatttttgagagggggggaaaggtgattgctgtgagtgacatcagtggtgctatcaaaaacctaaatggaatcgacatccttgcccttctgaaacacaaggatggcaatggtggagtcttgaaggacttcccaggtgcagaagccatggatccagatgaattgcttgttcatgaatgcgatgttcttgtcccttgtgccttgggtggagttctaaacaaggaaaatgctgctgatgtgaaggcaaaatttataatagaagcagcaaatcaccccactgaccctgatgcggatgggatcttgtctaagaaaggagtcattatattacctgatatttatgccaatgctggcggagtgactgtgagctactttgaatgggttcagaatattcaaggtttcatgtgggatgaagagaaagtgaaccgtgagctggagaagtacatgaccaaagctttccaggatatcaaggcaatgtgtaaaattcacaactgtgacctgcgaatgggggcattcactctaggagtgaaccgtgttgcccgtgctacccttttgaggggttgggaagcatag

SEQ ID NO: 57203 - protein, 412 aa, Glycine max
MNALAATNRNFQRAARILGLDSKLEKSLLIPFREIKVECTIPKDDGTLVSYVGFRIQHDNARGPMKGGIRYHPEVDPDEVNALAQLMTWKTAVADIPYGGAKGGIGCNPRDLSISELERLTRVFTQKIHDLIGVQRDVPAPDMGTNAQTMAWILDEYSKFHGHSPAVVTGKPIDLGGSLGREAATGLGVVFATEALFAEYGKSISDHTFVIQGFGNVGTWAAKSIFERGGKVIAVSDISGAIKNLNGIDILALLKHKDGNGGVLKDFPGAEAMDPDELLVHECDVLVPCALGGVLNKENAADVKAKFIIEAANHPTDPDADGILSKKGVIILPDIYANAGGVTVSYFEWVQNIQGFMWDEEKVNRELEKYMTKAFQDIKAMCKIHNCDLRMGAFTLGVNRVARATLLRGWEA

SEQ ID NO: 57204 - DNA, 1236 bp, Brassica napus
  CDS (1)..(1236)
atgaatgctttagcagcaacaaacagaaacttcaggctagcttctaggcttctgggtttggattctaagcttgagaaaagtcttctcattcctttcagagaaatcaaggtggagtgtaccataccgaaagacgatgggacactagcgtcgttcgttgggttcagagtccaacacgacaatgcaagaggtcctatgaaaggtggaatcagatatcatccagaggttgaaccggatgaagtaaacgcattggctcaactcatgacatggaaaacagcagtggctaagataccttacggtggagccaaaggagggattggttgcgacccgagcaagctaagcatctcagagctggaacggttgactcgtgttttcactcagaagattcatgatctcattgggattcatactgacgttccagctccagatatgggcactggtcctcagacaatggcttggattcttgatgagtactctaagttccatggatactcgcctgcagttgtcactggaaaacctattgatcttggtggatcactcgggagagacgctgccactggaagaggagtgatgtttgcaactgaagctttgcttaatgagcacggcaagagcatttcaggccaacggtttgtcatccaggggtttgggaatgtgggctcatgggcggcgaagctgataagtgaacaaggtgggaagatagttgcggtgagtgacatttccggagccatcaagaacaaggacggtatcgatatcgagagcctgctcaactataccaaagaacaaagaggtgttaaagggtttgatggtgcgcatccgatcgatgcaaactcgatactggtcgaggattgtgatatcctcatccctgcagcacttggtggtgtcatcaacagggagaatgcgaatgagattaaagcaaagttcatcattgaagctgctaaccatccaactgatcctgatgctgatgagatcttgagtaagaaaggtgtggttattctcccggacatatatgcaaactctggaggagtcactgtcagctacttcgaatgggttcagaacatacaagggtttatgtgggaagaagagaaggtgaacgaggagctgaagacatacatgaatcgtggattcaaaaatatgaaagagatgtgcaaaactcactcatgtgatcttaggatgggagctttcacgctcggtgttaaccgtgtggctcgtgctaccgttctcagaggctggggagcttaa

SEQ ID NO: 57205 - protein, 411 aa, Brassica napus
MNALAATNRNFRLASRLLGLDSKLEKSLLIPFREIKVECTIPKDDGTLASFVGFRVQHDNARGPMKGGIRYHPEVEPDEVNALAQLMTWKTAVAKIPYGGAKGGIGCDPSKLSISELERLTRVFTQKIHDLIGIHTDVPAPDMGTGPQTMAWILDEYSKFHGYSPAVVTGKPIDLGGSLGRDAATGRGVMFATEALLNEHGKSISGQRFVIQGFGNVGSWAAKLISEQGGKIVAVSDISGAIKNKDGIDIESLLNYTKEQRGVKGFDGAHPIDANSILVEDCDILIPAALGGVINRENANEIKAKFIIEAANHPTDPDADEILSKKGVVILPDIYANSGGVTVSYFEWVQNIQGFMWEEEKVNEELKTYMNRGFKNMKEMCKTHSCDLRMGAFTLGVNRVARATVLRGWGA

SEQ ID NO: 57206 - DNA, 1236 bp, Brassica napus
  CDS (1)..(1236)
atgaatgctctagccgcaaccaacagaaacttccgccacgcatcgcgaatcctcggcctggattcgaagatcgagaagagtctcatgatcccattccgagaaatcaaggtcgaatgcacgatccccaaagacgacggcaccctcgtctcctacatcggattcagggtccagcacgacaattctcgcggacccatgaagggaggaatcagatatcaccccgaggttgatcctgatgaagtgaacgcgttagctcagctgatgacgtggaagacagctgtcgccgacattccgtacggtggagctaaaggtgggatcggatgcagccctcgcgacttgagtttgagcgagctcgagcgtcttacacgtgtcttcacgcagaagatccatgatcttattggtattcacaccgatgtccctgctcctgacatggggaccaacgctcagaccatggcttggattcttgatgagtactccaagtttcatgggcattcccctgctgttgtcaccggcaagcccattgatcttggtggttcgcttggtagagaagctgctacaggacgtggtgtggtctatgccactgaagctcttcttgctgagtatggcaaatcgattcagggattgacatttgttgttcagggttttgggaatgttggaacatgggcagccaagctgatccatgagaaaggtgggaaagtggttgcggtaagcgacatcacaggtgcagtcagaaaccctgaaggtatagacatcaacgctcttctgaaacacaaagagacaactggaagtctaaatgagttcactggtggagacgctatggactcaaacgaactgctgatccatgagtgtgatgttctcattccttgtgctcttggtggtgtcctgaacaaggaaaatgctgcagatgtgaaggcaaagttcataatagaggcagcaaaccatccaacagatccagatgctgatgagattctgtcgaagaaaggagtgattatactaccagatatatacgcaaacgcaggaggagtgactgtgagttactttgagtgggttcagaacattcaagggttcatgtgggaagaggagaaagtgaacctggagctacaaaagtacatgactcgagcctttcacaacatcaagtctatgtgccatactcattcttgcaacctccgtatgggtgctttcacccttggagttagccgtgtcgctcgagccacccagttgcgtggttgggaagcttag

SEQ ID NO: 57207 - protein, 411 aa, Brassica napus
MNALAATNRNFRHASRILGLDSKIEKSLMIPFREIKVECTIPKDDGTLVSYIGFRVQHDNSRGPMKGGIRYHPEVDPDEVNALAQLMTWKTAVADIPYGGAKGGIGCSPRDLSLSELERLTRVFTQKIHDLIGIHTDVPAPDMGTNAQTMAWILDEYSKFHGHSPAVVTGKPIDLGGSLGREAATGRGVVYATEALLAEYGKSIQGLTFVVQGFGNVGTWAAKLIHEKGGKVVAVSDITGAVRNPEGIDINALLKHKETTGSLNEFTGGDAMDSNELLIHECDVLIPCALGGVLNKENAADVKAKFIIEAANHPTDPDADEILSKKGVIILPDIYANAGGVTVSYFEWVQNIQGFMWEEEKVNLELQKYMTRAFHNIKSMCHTHSCNLRMGAFTLGVSRVARATQLRGWEA

SEQ ID NO: 57208 - DNA, 1236 bp, Brassica napus
  CDS (1)..(1236)
atgaatgctttagccgcaacgaacaggaacttccgccatgcctcacgaatcctcggtttggattccaagatcgagaagagtctcatgatcccattcagagaaatcaaggtggagtgcacgatccccaaagacgacggaacgcttgtctcctacgttggattcagggttcaacacgacaatgctcgtggacccatgaaaggaggaatcagataccaccccgaggttgatcccgatgaagtcaacgcattggctcagctcatgacttggaagacagctgtcgctgacattccgtacggtggagctaaaggtgggatcggatgcaaccctcgtgacttgagcttgagcgagctcgagagacttacacgtgtcttcactcagaagatccatgatctcatcggtattcacaccgatgtacctgctcctgacatggggactaatgctcagacaatggcttggattcttgatgagtactccaagtttcatggtcattcccctgctgttgtcaccggcaagcccattgatcttggtggttcacttggtagggaagctgccacaggacgtggtgtagtctatgcaaccgaagctctccttgctgaatacggcaaatcgattaagggattgacatttgttgttcagggttttgggaatgttggaacatgggcagccaagctgatccatgagaaaggtgggaaagtggttgcagtaagcgacatcacaggtgcagtcagaaaccctgaaggtatagacatcaacgctcttctgaaacacaaagaagcaactggaagtctaaatgagttcactggtggagacgctatggactcaaacgaactgctgatccatgagtgtgatgttctcattccttgtgctcttggtggtgtcctgaacaaggaaaatgctgcagatgtgaaggcaaagttcataatagaggcagcaaaccatccaacagatccagatgctgatgagattctgtcgaagaaaggagtgattatactaccagatatatacgcaaacgcaggaggagtgacggtgagttactttgagtgggtccagaacattcaagggttcatgtgggaagaggaaaaagtgaacctagagctacaaaagtacatgactcgagcctttcacaacatcaagtcaatgtgccatactcattcctgtaacctccgtatgggagctttcactcttggagttaaccgtgtcgctagagccacccagttgcgtggttgggaagcttaa

SEQ ID NO: 57209 - protein, 411 aa, Brassica napus
MNALAATNRNFRHASRILGLDSKIEKSLMIPFREIKVECTIPKDDGTLVSYVGFRVQHDNARGPMKGGIRYHPEVDPDEVNALAQLMTWKTAVADIPYGGAKGGIGCNPRDLSLSELERLTRVFTQKIHDLIGIHTDVPAPDMGTNAQTMAWILDEYSKFHGHSPAVVTGKPIDLGGSLGREAATGRGVVYATEALLAEYGKSIKGLTFVVQGFGNVGTWAAKLIHEKGGKVVAVSDITGAVRNPEGIDINALLKHKEATGSLNEFTGGDAMDSNELLIHECDVLIPCALGGVLNKENAADVKAKFIIEAANHPTDPDADEILSKKGVIILPDIYANAGGVTVSYFEWVQNIQGFMWEEEKVNLELQKYMTRAFHNIKSMCHTHSCNLRMGAFTLGVNRVARATQLRGWEA

SEQ ID NO: 57210 - DNA, 1236 bp, Brassica napus
  CDS (1)..(1236)
atgaatgctttagcagcaacaaacagaaacttcaggctagcttctaggcttctgggtttggattctaagcttgagaaaagtcttctcattcccttcagagaaatcaaggtggagtgtaccataccgaaagacgatgggacactagcgtcgttcgttgggttcagagtccaacacgacaatgcaagaggtcctatgaaaggtggaatcagatatcatccagaggttgaaccggatgaagtgaacgcattggctcagctcatgacatggaaaacagcagtggctaacataccgtacggaggagccaaaggagggattggttgcgacccgagcaagctaagcatctcagagctggaacggttgactcgtgttttcactcagaagattcatgatctcattgggattcatactgacgttccagctccagatatgggcactggtcctcagacaatggcttggattcttgatgagtactctaagttccatggatactcgcctgcagttgtcactggaaaaccaattgatcttggtggatcactcgggagagacgctgccactggaagaggagtgatgttggcaactgaagctttgcttaacgagcacggcaagagcatctcaggccaacggttggtcatccaggggtttgggaatgtgggctcatgggcggcgaagctgataagtgaacaaggtgggaagatagttgcggtgagtgacatttccggagccatcaagaacaaggacggtatcgatatcgagagcctgctcaactataccaaagaacaaagaggtgttaaagggtttgatggtgcgcatccgatcgatgcaaactcgatactggtcgaggattgtgatatcctcatccctgcagcacttggtggtgtcatcaacagggagaatgcgaatgagattaaagcaaagttcatcattgaagctgctaaccatccaactgatcctgatgctgatgagatcttgagtaagaaaggtgtggttattctcccggacatatatgcaaactctggaggagtcactgtcagctacttcgaatgggttcagaacatacaagggtttatgtgggaagaagagaaggtgaacgaggagctgaagacatacatgaatcgtggattcaaaaatatgaaagagatgtgcaaaactcactcatgtgatcttaggatgggagctttcacgctcggtgttaaccgtgtggctcgtgctaccgttctcagaggctggggagcttaa

SEQ ID NO: 57211 - protein, 411 aa, Brassica napus
MNALAATNRNFRLASRLLGLDSKLEKSLLIPFREIKVECTIPKDDGTLASFVGFRVQHDNARGPMKGGIRYHPEVEPDEVNALAQLMTWKTAVANIPYGGAKGGIGCDPSKLSISELERLTRVFTQKIHDLIGIHTDVPAPDMGTGPQTMAWILDEYSKFHGYSPAVVTGKPIDLGGSLGRDAATGRGVMLATEALLNEHGKSISGQRLVIQGFGNVGSWAAKLISEQGGKIVAVSDISGAIKNKDGIDIESLLNYTKEQRGVKGFDGAHPIDANSILVEDCDILIPAALGGVINRENANEIKAKFIIEAANHPTDPDADEILSKKGVVILPDIYANSGGVTVSYFEWVQNIQGFMWEEEKVNEELKTYMNRGFKNMKEMCKTHSCDLRMGAFTLGVNRVARATVLRGWGA

SEQ ID NO: 57212 - DNA, 1914 bp, Glycine max
  CDS (1)..(1914)
atgttgttgccaaccagtggagtagggatgaattctgcaatggatgatatgaatttgattcagcaaacccagaggcatcacttggttgtgagggagattggcgaggagattgatttagaaataggagctggggaggatgacccgtcatttggtaacgctactctgattggtgcaccaatgcgggaatcttctgtagaagaacatggagagagcaagcagacggggatgatttctcagcttcctaatgatgctcaagatatgtccaagacccaacaagggaaaaggaagaaaaaggttgttaaaagatggagagaagaatgggcagacacctataagtgggcttatgttgatgtgaaggatggtacaccgaggattttctgctctgtctgcagggagtacggtcggaagcatagaagaaatccttatgggaatgagggcagtcgtaatatgcagatgagtgccctggaagaacacaacaacagtttgcttcacaaagaggctcttcgtcttcaaatggcctccaaagataaaattgtggtcgacaagcctgtttatgtaaaagttgccatgtcaaaaacagcaggatcaattcttgaagctacactaaaaagggatcctcatgaggttgaattcattcaggcagtccaagaagcagttcaagcccttgaaagagtcatagcaaaaaattctcgttatattaacatcatggagcgcttattggaacctgaacgaatgattgtttttcgagtttcatgggtggatgataggggtgagacatgtgtgaatcggggctttagggtacagtttaaccagtcaatgggtccatgtaggggtggtattcgttttcatccatcaatgaatttaagtgttgccaagttccttggttttgaacagactttaaagaatgccttatcaccatacaaattaggaggagcagctggtggaagtgatttcgatccaaaaggaaaaagtgataatgagattatgcgattctgccaaagtttcatgagcgaaatgtatcgctacctggggcctgacaaggaccttccgtctgaggaaatgggtgttggtactcgagaaatggggtatctttttggacagtataggcgtctagcaggtcattttcagggaagctttacagggccaaggatattttggtctggctccagtcttcgacctgaagctactggctatgggctggttttctttgcccagctcatgcttgctgacatgaataaagaacttaaaggattaagatgtgctgtgagtggttctggaaagattgcaatgcatgtcttagagaagctaattgcttatggtgctcttcccatttcagtatcagattctagaggatatttggttgatgaggatggatttgactacatgaaaatatcatttttgagagacatcaaagctcaacaaagaagtttacgagactattcaaagacctatgctcggtccaaatattatgatgaagcaaaaccatggagtgaaaggtgtgatgttgcatttgcttgtacttcacagaatgaaattgatcaatctgatgccattaatttggttaattcaggttgtcgtatactagtagaaggttcaaacatgccttgtacccctgaggcagttcagattcttaggaaagctagtgttctcattgctcctgcaatggctgccggtgctggaggggttgtggctggagaacttgaactgaatcatgaatgcagtttgatgcactggtcaccggaggactttgaatctaaattgcaggaagctatgaagcagacttatcagagggctatgaaagctgcaactgactttggttatcaaaaagaaagtcctgaggctttggtacatggagcagtcatctctgcctttctaaccattgctcaagccatgactgatcaaggctctatatag

SEQ ID NO: 57213 - protein, 637 aa, Glycine max
MLLPTSGVGMNSAMDDMNLIQQTQRHHLVVREIGEEIDLEIGAGEDDPSFGNATLIGAPMRESSVEEHGESKQTGMISQLPNDAQDMSKTQQGKRKKKVVKRWREEWADTYKWAYVDVKDGTPRIFCSVCREYGRKHRRNPYGNEGSRNMQMSALEEHNNSLLHKEALRLQMASKDKIVVDKPVYVKVAMSKTAGSILEATLKRDPHEVEFIQAVQEAVQALERVIAKNSRYINIMERLLEPERMIVFRVSWVDDRGETCVNRGFRVQFNQSMGPCRGGIRFHPSMNLSVAKFLGFEQTLKNALSPYKLGGAAGGSDFDPKGKSDNEIMRFCQSFMSEMYRYLGPDKDLPSEEMGVGTREMGYLFGQYRRLAGHFQGSFTGPRIFWSGSSLRPEATGYGLVFFAQLMLADMNKELKGLRCAVSGSGKIAMHVLEKLIAYGALPISVSDSRGYLVDEDGFDYMKISFLRDIKAQQRSLRDYSKTYARSKYYDEAKPWSERCDVAFACTSQNEIDQSDAINLVNSGCRILVEGSNMPCTPEAVQILRKASVLIAPAMAAGAGGVVAGELELNHECSLMHWSPEDFESKLQEAMKQTYQRAMKAATDFGYQKESPEALVHGAVISAFLTIAQAMTDQGSI

SEQ ID NO: 57214 - DNA, 1914 bp, Glycine max
  CDS (1)..(1914)
atgttgttgccaaccagtggagtagggatgaattctgcaatggatgatatgaatttgattcagcaaacccagaggcatcacttggttgtgagggagattggcgaggagattgatttagaaataggagctggggaggatgacccgtcatttggtaacgctactctgattggtgcaccaatgcgggaatcttctgtagaagaacatggagagagcaagcagacggggatgatttctcagcttcctaatgatgctcaagatatgtccaagacccaacaagggaaaaggaagaaaaaggttgttaaaagatggagagaagaatgggcagacacctataaatgggcttatgttgatatgaaggatgggacaccaaggattttctgctctgtctgcagggagtacggtcggaagcatagaagaaatccttatgggaatgagggcagtcgtaatatgcagatgagtgccctggaagaacacaacaacagtttgcttcacaaagaggctcttcgtcttcaaatggcctccaaagataaaattgtggtcgacaagcctgtttatgtaaaagttgccatgtcaaaaacagcaggatcaattcttgaagctacactaaaaagggatcctcatgaggttgaattcattcaggcagtccaagaagcagttcaagcccttgaaagagtcatagcaaaaaattctcgttatattaacatcatggagcgcttattggaacctgaacgaatgattgtttttcgagtttcatgggtggatgataggggtgagacatgtgtgaatcggggctttagggtacagtttaaccagtcaatgggtccatgtaggggtggtattcgttttcatccatcaatgaatttaagtgttgccaagttccttggttttgaacagactttaaagaatgccttatcaccatacaaattaggaggagcagctggtggaagtgatttcgatccaaaaggaaaaagtgataatgagattatgcgattctgccaaagtttcatgagcgaaatgtatcgctacctggggcctgacaaggaccttccgtctgaggaaatgggtgttggtactcgagaaatggggtatctttttggacagtataggcgtctagcaggtcattttcagggaagctttacagggccaaggatattttggtctggctccagtcttcgacctgaagctactggctatgggctggttttctttgcccagctcatgcttgctgacatgaataaagaacttaaaggattaagatgtgctgtgagtggttctggaaagattgcaatgcatgtcttagagaagctaattgcttatggtgctcttcccatttcagtatcagattctagaggatatttggttgatgaggatggatttgactacatgaaaatatcatttttgagagacatcaaagctcaacaaagaagtttacgagactattcaaagacctatgctcggtccaaatattatgatgaagcaaaaccatggagtgaaaggtgtgatgttgcatttgcttgtacttcacagaatgaaattgatcaatctgatgccattaatttggttaattcaggttgtcgtatactagtagaaggttcaaacatgccttgtacccctgaggcagttcagattcttaggaaagctagtgttctcattgctcctgcaatggctgccggtgctggaggggttgtggctggagaacttgaactgaatcatgaatgcagtttgatgcactggtcaccggaggactttgaatctaaattgcaggaagctatgaagcagacttatcagagggctatgaaagctgcaactgactttggttatcaaaaagaaagtcctgaggctttggtacatggagcagtcatctctgcctttctaaccattgctcaagccatgactgatcaaggctctatatag

SEQ ID NO: 57215 - protein, 637 aa, Glycine max
MLLPTSGVGMNSAMDDMNLIQQTQRHHLVVREIGEEIDLEIGAGEDDPSFGNATLIGAPMRESSVEEHGESKQTGMISQLPNDAQDMSKTQQGKRKKKVVKRWREEWADTYKWAYVDMKDGTPRIFCSVCREYGRKHRRNPYGNEGSRNMQMSALEEHNNSLLHKEALRLQMASKDKIVVDKPVYVKVAMSKTAGSILEATLKRDPHEVEFIQAVQEAVQALERVIAKNSRYINIMERLLEPERMIVFRVSWVDDRGETCVNRGFRVQFNQSMGPCRGGIRFHPSMNLSVAKFLGFEQTLKNALSPYKLGGAAGGSDFDPKGKSDNEIMRFCQSFMSEMYRYLGPDKDLPSEEMGVGTREMGYLFGQYRRLAGHFQGSFTGPRIFWSGSSLRPEATGYGLVFFAQLMLADMNKELKGLRCAVSGSGKIAMHVLEKLIAYGALPISVSDSRGYLVDEDGFDYMKISFLRDIKAQQRSLRDYSKTYARSKYYDEAKPWSERCDVAFACTSQNEIDQSDAINLVNSGCRILVEGSNMPCTPEAVQILRKASVLIAPAMAAGAGGVVAGELELNHECSLMHWSPEDFESKLQEAMKQTYQRAMKAATDFGYQKESPEALVHGAVISAFLTIAQAMTDQGSI

SEQ ID NO: 57216 - DNA, 1239 bp, Glycine max
  CDS (1)..(1239)
atgaacgctcttgcagctaccaaccgcaactttcaacgtgcagctcgcattctcggtttggattccaagcttgagaagagtctcctcatacccttcagagaaatcaaagttgaatgcacgatccccaaggatgatggaactctggtttcctatgtgggattcaggatccaacatgataatgcccgtggtcctatgaagggagggattcgttatcatcctgaggttgaccctgatgaagtgaatgctctagctcagctgatgacatggaagactgctgtagcagacattccctatggaggagcaaagggtgggatcggctgcaacccaagggatctgagtatcagtgagttagaacgtctaactcgggttttcacccaaaagattcatgatctcattggcattcagagggatgttcctgcccctgatatgggaactaatgctcagaccatggcatggattctcgatgagtattcaaagtttcatgggcattcacctgcagttgtgacagggaagcctattgatcttggaggttcgttggggagggaggctgccacaggtctcggagtggtttttgcaactgaggctttatttgctgaatatgggaagtcaatttctgatcacacatttatcatccagggctttggaaatgtgggcacgtgggctgctaagtctatttttgagagggggggaaaggtgattgctgtgagtgacatcagtggtgctatcaaaaacccaaatggaatcgacatccccgcccttctgaaacacaaggatggcaatggtggagtcttgaaggacttcccaggtgcagaagccatggatccagatgaattgcttgttcatgaatgcgatgttcttgtcccttgtgccttgggtggagttctaaacaaggaaaatgctgctgatgtgaaggcaaaatttataatagaagcagcaaatcaccccactgaccctgatgcggatgggatcttgtctaagaaaggagtcattatattacctgatatttatgccaatgctggcggagtgactgtgagctactttgaatgggttcagaatattcaaggtttcatgtgggatgaagaaaaagtgaaccatgagctgaagaagtacatgaccaaagctttccgggatatcaaggcaatgtgtaaaattcataactgtgacttgcgaatgggggccttcactctaggagtgaaccgtgttgcccgtgctacccttctgaggggttgggaagcttag

SEQ ID NO: 57217 - protein, 412 aa, Glycine max
MNALAATNRNFQRAARILGLDSKLEKSLLIPFREIKVECTIPKDDGTLVSYVGFRIQHDNARGPMKGGIRYHPEVDPDEVNALAQLMTWKTAVADIPYGGAKGGIGCNPRDLSISELERLTRVFTQKIHDLIGIQRDVPAPDMGTNAQTMAWILDEYSKFHGHSPAVVTGKPIDLGGSLGREAATGLGVVFATEALFAEYGKSISDHTFIIQGFGNVGTWAAKSIFERGGKVIAVSDISGAIKNPNGIDIPALLKHKDGNGGVLKDFPGAEAMDPDELLVHECDVLVPCALGGVLNKENAADVKAKFIIEAANHPTDPDADGILSKKGVIILPDIYANAGGVTVSYFEWVQNIQGFMWDEEKVNHELKKYMTKAFRDIKAMCKIHNCDLRMGAFTLGVNRVARATLLRGWEA

SEQ ID NO: 57218 - DNA, 1236 bp, Zea mays
  CDS (1)..(1236)
atgaacgcgctcgccgccaccacccgcaacttccggcgggcatcgaagctgctcggcctcgactccaagctcgagcagagcctgctcatcccgttccgggagatcaaggtggaatgcaccatccccaaagacgacggcaccttgacgacgttcgtggggttccgcgtgcagcatgataacccccgcgggccgatgaaaggcggcatccgctatcacaatgaggttgatccagatgaagtaaatgcccttgctcaactcatgacatggaagacagctgttgctgcagtcccatatggtggagcaaagggagggatcgggtgctctcctggtgaactaagtagaagtgagttggagcggttgacacgagtatttacccagaaaattcatgatcttatcggaacgcatacagatgtccctgctcctgacatggggaccaatgcacaaaccatggcatggatgctggatgagtactcgaaatttcatggtcactccccagcagtcgtcactgggaagccaatagatcttggcggatcactgggcagggatgcagcaacagggcgaggcgtaatgtatgctaccgaggccctactcgctgaatatggaaaatgcatttctggatcaacttttgtgatccaaggttttggcaatgttggttcatgggctgctcgacttattcacgagaaaggtggtaagattattgcaattggggatgtgacaggttcaattagaaacacggctggtatagacatacctgctttggtgaagcataggaatgaaggtcatgcgatgaaagacttcgatggtgcggaagttttggattcaaccgagttgttagtgcatgactgtgatgttcttgtcccctgcgccttaggtggagttcttaacaaggataatgcaccagacgtgaaggccaaatttgtaatcgaagctgctaaccatccaactgatccagaggcagacgagattctcgccaagaagggggtagtagtattacctgatatatatgctaattcaggtggcgtggtcgttagctactttgaatgggtgcagaacattcaaggtttcatgtgggatgaggaaaaagtaaacgatgaactagaaaagtacatgagcagtgcttttcaacacatgaaggccatgtgcaagtctctggattgcgaccttaggatgggggccttcaccttaggagttaacagggttgctcgtgccaccctcttgagaggctgggaggcatga

SEQ ID NO: 57219 - protein, 411 aa, Zea mays
MNALAATTRNFRRASKLLGLDSKLEQSLLIPFREIKVECTIPKDDGTLTTFVGFRVQHDNPRGPMKGGIRYHNEVDPDEVNALAQLMTWKTAVAAVPYGGAKGGIGCSPGELSRSELERLTRVFTQKIHDLIGTHTDVPAPDMGTNAQTMAWMLDEYSKFHGHSPAVVTGKPIDLGGSLGRDAATGRGVMYATEALLAEYGKCISGSTFVIQGFGNVGSWAARLIHEKGGKIIAIGDVTGSIRNTAGIDIPALVKHRNEGHAMKDFDGAEVLDSTELLVHDCDVLVPCALGGVLNKDNAPDVKAKFVIEAANHPTDPEADEILAKKGVVVLPDIYANSGGVVVSYFEWVQNIQGFMWDEEKVNDELEKYMSSAFQHMKAMCKSLDCDLRMGAFTLGVNRVARATLLRGWEA

SEQ ID NO: 57220 - DNA, 1947 bp, Zea mays
  CDS (1)..(1947)
atgaactcgatggatgaaatcaacctgctgcggcaggcgcagcggcagcatcagcatcatctcatggtgcgcggcatcggcgaggagatcgacctcgagatcggccctgtcgacgacccctctttttccggagcttccttagtggccgttacgtccacgcacgacactgtcgttcacgccgacgaccacaagagcctcctcatcccgtgttcgcagcccggcgcggcggacgggctggcgccgcagcagcacctgtcgcagggggaagagcatgacgggatgctcaggtcgccgtcggggcacaccaagaagaagaagaaggtggtcaagaaatggagggaggagtgggcggacacctacaagtgggcctacgtcgccgtgcacgacaccaccaccaggatcttctgctcggtgtgcaaggagtacggccggaagcaccgccggaatccatatggcaacgagggaagcaggaatatgcagatgagtgcgcttgaggagcacaacaatagcttgttgcataaggaggcgctccggttacagatggcctccaaggagaagttgcagcctcccgagattgaggggccggtctatgtcaaagctttatcgaaaacagcagcatcaatacttgaatgtgtcctaaggagggatccccatgaagctgaatatatacagtcgatccaggaggtggttcattccttagaacctgttttggtgaagaatgcccaatatattcaaattttggagcgtttgttggaacctgagagatgctttatcttcagagtgccatggattgatgacagaggtgaagcacacgtcaatagaggtttccgtgtgcaattcagtcaggcgttaggtccatgcaggggtggtcttcggtttcacccatccatgagcttaagtgtggcaaagtttctggcctttgaacatactttaaagaatgctttgtcactatataaacttggaggtgctgctggaggaagtgattttgatccaaagggaaaaagtgataatgagataatgcgcttttgccaaagtttcatggatgagctgtatagatatttgggccctgatcaggattttcccgctgaagatattggtgttggtccaagggaaatgggttacctttttgggcagtatagacgtctttctggtcattttcagggaaattttacaggacctaaaattttctggtcagggtcaagttttcgaacagaagctactggatatggtctggtgttttttgcacgtcttttacttgctgaaatgaataaagagcttaaaggattaagatgtgtgatcagcggttctgggaagatagcaatgcatgttttggaaaagcttttgccttgtggagccattcctattactgtctcagattcaaagggatatttgttagatgaagatgggtttgattatatgaaatattcacttctaagggatattaaggctcagcaaaagagcctcaaggagtacttgaaaacatatccacatgctaagtatattgatgatgcaaaaccatggagccagcagtgtgatgttgcatttccttgtgcatcacataatgagattgaccaaggggaggctgttgcaatcagcaactctggttgtcgtgttcttgtcgagtgttcaaatatgtcgtgcactgttcaagctgttgatatcctaagaaaggcaaaagttattgttgctccagcaaaggcaactgctgctggtggggtagcacttggggagattgaattgaatccagagtttaatttgatgcaattgtcagtggaggattttgagaatagaattcaagatgcaataaagcaaacatatgaaaggtcggtcaaagctgctcaagattacgggatcatgaaagaaagccccgagtttttggtccatggcgcgaacatttgtgctttccttaatatcgcgcaagccatgactgaccagggatgtgtttag

SEQ ID NO: 57221 - protein, 648 aa, Zea mays
MNSMDEINLLRQAQRQHQHHLMVRGIGEEIDLEIGPVDDPSFSGASLVAVTSTHDTVVHADDHKSLLIPCSQPGAADGLAPQQHLSQGEEHDGMLRSPSGHTKKKKKVVKKWREEWADTYKWAYVAVHDTTTRIFCSVCKEYGRKHRRNPYGNEGSRNMQMSALEEHNNSLLHKEALRLQMASKEKLQPPEIEGPVYVKALSKTAASILECVLRRDPHEAEYIQSIQEVVHSLEPVLVKNAQYIQILERLLEPERCFIFRVPWIDDRGEAHVNRGFRVQFSQALGPCRGGLRFHPSMSLSVAKFLAFEHTLKNALSLYKLGGAAGGSDFDPKGKSDNEIMRFCQSFMDELYRYLGPDQDFPAEDIGVGPREMGYLFGQYRRLSGHFQGNFTGPKIFWSGSSFRTEATGYGLVFFARLLLAEMNKELKGLRCVISGSGKIAMHVLEKLLPCGAIPITVSDSKGYLLDEDGFDYMKYSLLRDIKAQQKSLKEYLKTYPHAKYIDDAKPWSQQCDVAFPCASHNEIDQGEAVAISNSGCRVLVECSNMSCTVQAVDILRKAKVIVAPAKATAAGGVALGEIELNPEFNLMQLSVEDFENRIQDAIKQTYERSVKAAQDYGIMKESPEFLVHGANICAFLNIAQAMTDQGCV

SEQ ID NO: 57222 - DNA, 1236 bp, Zea mays
  CDS (1)..(1236)
atgaatgcattggcagcaaccagcaggaacttcaagcaggcagctaagctgctgggcctcgactccaagctggagaagagcttgctcattccattcagggagatcaaggttgaatgcacaatcccaaaagatgatggaactttggcatcctatgttggatttagggttcaacatgataatgctaggggacctatgaagggtggaatcagataccaccatgaggttgatcctgatgaagttaatgccttggcacaattgatgacttggaaaacagcagtagctaacataccatatggaggagccaaaggtggtattggatgtagccctggagacctgagcatctctgagcttgagaggcttacccgagtttttactcagaaaatccatgacttgattggcatccatactgacgttccagctccagatatgggcaccaactcacagacaatggcatggatacttgacgaatactcaaagttccatggttactcacctgctgttgtgacaggaaagcctgtggacctcggaggatcattgggaagagacgccgctactggaaggggagttctgtttgctactgaagctttgcttgcagagcatggcaaaggaattgcaggccagcgtttcgtcatacagggattcggtaacgttggttcctgggcagctcagctgataagtgaagtcggtggcaaggtgattgctatcagtgacgtcacaggcgccgtcaaaaacgtcgatggcctcgacatcgtgcagctagtgaagcactcggcggagaacaaggggatcaagggcttcaaggggggagacgccatcgctccagactcgttgctcactgaagagtgcgacgtcctcatcccagcagcgcttgggggagtcataaacaaggataatgctaacgacataaaggcaaagtacatcatcgaggctgccaatcaccccacagatccagaagcagacgagatcctgtcaaagaaaggcgtcctcatcctccccgacatactggccaactctggtggcgtcacagtgagctacttcgagtgggtacaaaacatccaggggttcatgtgggacgaggagaaggtgaacgcggaactgcggacgtacatgacgcgcgccttcggggacgtgaagcagatgtgccggagccacagctgcgacctccgcatgggcgccttcacgctgggcgtcaaccgcgtcgcgcgcgccaccgtcctcaggggatgggaagcatga

SEQ ID NO: 57223 - protein, 411 aa, Zea mays
MNALAATSRNFKQAAKLLGLDSKLEKSLLIPFREIKVECTIPKDDGTLASYVGFRVQHDNARGPMKGGIRYHHEVDPDEVNALAQLMTWKTAVANIPYGGAKGGIGCSPGDLSISELERLTRVFTQKIHDLIGIHTDVPAPDMGTNSQTMAWILDEYSKFHGYSPAVVTGKPVDLGGSLGRDAATGRGVLFATEALLAEHGKGIAGQRFVIQGFGNVGSWAAQLISEVGGKVIAISDVTGAVKNVDGLDIVQLVKHSAENKGIKGFKGGDAIAPDSLLTEECDVLIPAALGGVINKDNANDIKAKYIIEAANHPTDPEADEILSKKGVLILPDILANSGGVTVSYFEWVQNIQGFMWDEEKVNAELRTYMTRAFGDVKQMCRSHSCDLRMGAFTLGVNRVARATVLRGWEA

SEQ ID NO: 57224 - DNA, 1236 bp, Zea mays
  CDS (1)..(1236)
atgaacgcgctcgccgccaccacccgcaacttccggcgggcatcgaagctgctcggcctcgactccaagctcgagcagagcctgctcatcccgttccgggagatcaaggtggaatgcaccatccccaaagacgacggcagcttggcgacgttcgtggggttccgcgtgcagcatgataacgcccgcgggccgatgaaaggcggcatccgctatcacaatgaggttgatccagatgaagtaaatgcccttgctcaactcatgacatggaagacagctgttgcagcagtgccatatggtggagcaaagggagggatcgggtgctctcctggtgaactaagtagaagtgagttggagcggttgacacgagtatttacccagaaaattcatgatcttatcggaacgcatacagatgtccctgctcctgacatggggaccaatgcacaaaccatggcatggatgctggatgagtactcgaaatttcatggtcactccccagcagtcgtcactgggaagccaatagatcttggtggatcactgggcagggatgcagcaacagggcgaggcgtaatgtatgctaccgaggccctactcgctgaatatggaaaatgcatttctggatcaacttttgtgatccaaggttttggcaatgttggttcatgggctgctcgacttattcacgagaaaggtggtaagattattgcaattggggatgtgacaggttcaattagaaacacggctggtatagacatacctgctttggtgaagcataggaatgaaggtcatgcgatgaaagacttcgatggtgcggaagttttgggttcgaccgagttgctagtgcatgactgtgatgttcttgtcccctgcgccttaggtggagttcttaacaaggataatgcaccagacgtgaaggccaaatttataatcgaagctgctaaccatccaactgatccagaggcagatgagattctcgccaagaaaggagtagtagtattacctgatatctatgccaattcaggtggcgtggtcgttagctactttgaatgggttcagaacattcaaggtttcatgtgggccgaggaaaaagtaaacgatgaactagaaaagtacatgagcagtgcttttcaacacatgaaggccatgtgcaagtctctggattgcgaccttaggatgggggccttcaccttaggagttaacagggttgctcgtgccaccctcttgagaggctgggaggcatga

SEQ ID NO: 57225 - protein, 411 aa, Zea mays
MNALAATTRNFRRASKLLGLDSKLEQSLLIPFREIKVECTIPKDDGSLATFVGFRVQHDNARGPMKGGIRYHNEVDPDEVNALAQLMTWKTAVAAVPYGGAKGGIGCSPGELSRSELERLTRVFTQKIHDLIGTHTDVPAPDMGTNAQTMAWMLDEYSKFHGHSPAVVTGKPIDLGGSLGRDAATGRGVMYATEALLAEYGKCISGSTFVIQGFGNVGSWAARLIHEKGGKIIAIGDVTGSIRNTAGIDIPALVKHRNEGHAMKDFDGAEVLGSTELLVHDCDVLVPCALGGVLNKDNAPDVKAKFIIEAANHPTDPEADEILAKKGVVVLPDIYANSGGVVVSYFEWVQNIQGFMWAEEKVNDELEKYMSSAFQHMKAMCKSLDCDLRMGAFTLGVNRVARATLLRGWEA

SEQ ID NO: 57226 - DNA, 1236 bp, Zea mays
  CDS (1)..(1236)
atgaacgcgctcgccgccaccacccgcaacttccggcgggcatcgaagctgctcggcctcgactccaagctcgagcagagcctgctcatcccgttccgggagatcaaggtggaatgcaccatccccaaagacgacggcagcttggcgacgttcgtggggttccgcgtgcagcatgacaacgcccgcgggccgatgaaaggcggcatccgctatcacaatgaggttgatccagatgaagtaaatgcccttgctcaactcatgacatggaagacagctgttgctgcagtcccatatggtggagcaaagggagggatcgggtgctctcctggtgaactaagtagaagtgagttggagcggttgacacgagtatttacccagaaaattcatgatcttatcggaacgcatacagatgtccctgctcctgacatggggaccaatgcacaaaccatggcatggatgctggatgagtactcgaaatttcatggtcactccccagcagtcgtcactgggaagccaatagatcttggcggatcactgggcagggatgcagcaacagggcgaggcgtaatgtatgctaccgaggccctactcgctgaatatggaaaatgcatttctggatcaacttttgtgatccaaggttttggcaatgttggttcatgggctgctcgacttattcacgagaaaggtggtaagattattgcaaatggggatgtgacaggttcaattagaaacacggctggtatagacatacctgctttggtgaagcataggaatgaaggtcatgcgatgaaagacttcgatggtgcggaagttttggattcaaccgagttgctagtgcatgactgtgatgttcttgtcccctgcgccttaggtggagttcttaacaaggataatgcaccagacgtgaaggccaaatttataatcgaagctgctaaccatccaactgatccagaggcagacgagattctcgccaagaagggggtagtagtattacctgatatatatgctaattcaggtggcgtggtcgttagctactttgaatgggtgcagaacattcaaggtttcatgtgggatgaggagaaagttaacgatgaactagaaaagtacatgagcagtgcttttcaacacatgaaagccatgtgcaaatctctggattgcgaccttaggatgggggccttcaccttaggagttaacagggttgctcgtgccaccctcttgagaggctgggaggcatga

SEQ ID NO: 57227 - protein, 411 aa, Zea mays
MNALAATTRNFRRASKLLGLDSKLEQSLLIPFREIKVECTIPKDDGSLATFVGFRVQHDNARGPMKGGIRYHNEVDPDEVNALAQLMTWKTAVAAVPYGGAKGGIGCSPGELSRSELERLTRVFTQKIHDLIGTHTDVPAPDMGTNAQTMAWMLDEYSKFHGHSPAVVTGKPIDLGGSLGRDAATGRGVMYATEALLAEYGKCISGSTFVIQGFGNVGSWAARLIHEKGGKIIANGDVTGSIRNTAGIDIPALVKHRNEGHAMKDFDGAEVLDSTELLVHDCDVLVPCALGGVLNKDNAPDVKAKFIIEAANHPTDPEADEILAKKGVVVLPDIYANSGGVVVSYFEWVQNIQGFMWDEEKVNDELEKYMSSAFQHMKAMCKSLDCDLRMGAFTLGVNRVARATLLRGWEA

SEQ ID NO: 57228 - DNA, 20 bp, Artificial sequence
  primer
atggctggatcactgtttgc

SEQ ID NO: 57229 - DNA, 21 bp, Artificial sequence
  primer
ttagctgtcctggtaataatc

SEQ ID NO: 57230 - protein, 513 aa, Artificial sequence
  consensus sequence
  Variant (2)..(2): Xaa in position 2 is any amino acid
  Variant (4)..(13): Xaa in position 4 to 13 is any amino acid
  Variant (15)..(15): Xaa in position 15 is any amino acid
  Variant (17)..(22): Xaa in position 17 to 22 is any amino acid
  Variant (24)..(24): Xaa in position 24 is any amino acid
  Variant (26)..(26): Xaa in position 26 is any amino acid
  Variant (28)..(32): Xaa in position 28 to 32 is any amino acid
  Variant (35)..(35): Xaa in position 35 is any amino acid
  Variant (39)..(39): Xaa in position 39 is any amino acid
  Variant (41)..(41): Xaa in position 41 is any amino acid
  Variant (43)..(44): Xaa in position 43 to 44 is any amino acid
  Variant (46)..(52): Xaa in position 46 to 52 is any amino acid
  Variant (53)..(55): Xaa in position 53 to 55 is any or no amino acid
  Variant (57)..(62): Xaa in position 57 to 62 is any amino acid
  Variant (64)..(71): Xaa in position 64 to 71 is any amino acid
  Variant (74)..(74): Xaa in position 74 is any amino acid
  Variant (78)..(81): Xaa in position 78 to 81 is any amino acid
  Variant (83)..(85): Xaa in position 83 to 85 is any amino acid
  Variant (87)..(88): Xaa in position 87 to 88 is any amino acid
  Variant (90)..(91): Xaa in position 90 to 91 is any amino acid
  Variant (93)..(99): Xaa in position 93 to 99 is any amino acid
  Variant (100)..(106): Xaa in position 100 to 106 is any or no amino acid
  Variant (109)..(111): Xaa in position 109 to 111 is any amino acid
  Variant (113)..(113): Xaa in position 113 is any amino acid
  Variant (116)..(116): Xaa in position 116 is any amino acid
  Variant (118)..(121): Xaa in position 118 to 121 is any amino acid
  Variant (122)..(131): Xaa in position 122 to 131 is any or no amino acid
  Variant (133)..(143): Xaa in position 133 to 143 is any amino acid
  Variant (144)..(148): Xaa in position 144 to 148 is any or no amino acid
  Variant (152)..(155): Xaa in position 152 to 155 is any amino acid
  Variant (156)..(156): Xaa in position 156 is any or no amino acid
  Variant (160)..(161): Xaa in position 160 to 161 is any amino acid
  Variant (163)..(164): Xaa in position 163 to 164 is any amino acid
  Variant (168)..(168): Xaa in position 168 is any amino acid
  Variant (170)..(192): Xaa in position 170 to 192 is any amino acid
  Variant (193)..(201): Xaa in position 193 to 201 is any or no amino acid
  Variant (203)..(203): Xaa in position 203 is any amino acid
  Variant (207)..(228): Xaa in position 207 to 228 is any amino acid
  Variant (229)..(234): Xaa in position 229 to 234 is any or no amino acid
  Variant (236)..(276): Xaa in position 236 to 276 is any amino acid
  Variant (277)..(294): Xaa in position 277 to 294 is any or no amino acid
  Variant (296)..(298): Xaa in position 296 to 298 is any amino acid
  Variant (300)..(300): Xaa in position 300 is any amino acid
  Variant (302)..(320): Xaa in position 302 to 320 is any amino acid
  Variant (321)..(324): Xaa in position 321 to 324 is any or no amino acid
  Variant (326)..(326): Xaa in position 326 is any amino acid
  Variant (329)..(329): Xaa in position 329 is any amino acid
  Variant (331)..(334): Xaa in position 331 to 334 is any amino acid
  Variant (336)..(347): Xaa in position 336 to 347 is any amino acid
  Variant (348)..(358): Xaa in position 348 to 358 is any or no amino acid
  Variant (360)..(363): Xaa in position 360 to 363 is any amino acid
  Variant (365)..(365): Xaa in position 365 is any amino acid
  Variant (369)..(369): Xaa in position 369 is any amino acid
  Variant (372)..(373): Xaa in position 372 to 373 is any amino acid
  Variant (375)..(376): Xaa in position 375 to 376 is any amino acid
  Variant (379)..(383): Xaa in position 379 to 383 is any amino acid
  Variant (385)..(388): Xaa in position 385 to 388 is any amino acid
  Variant (389)..(452): Xaa in position 389 to 452 is any or no amino acid
  Variant (454)..(456): Xaa in position 454 to 456 is any amino acid
  Variant (458)..(460): Xaa in position 458 to 460 is any amino acid
  Variant (462)..(477): Xaa in position 462 to 477 is any amino acid
  Variant (478)..(496): Xaa in position 478 to 496 is any or no amino acid
  Variant (498)..(503): Xaa in position 498 to 503 is any amino acid
  Variant (504)..(507): Xaa in position 504 to 507 is any or no amino acid
  Variant (509)..(512): Xaa in position 509 to 512 is any amino acid
PXRXXXXXXXXXXDXGXXXXXXGXRXQXXXXXGPXKGGXRXHXXVXXXXXXXXXXLXXXXXXKXXXXXXXXGGXKGGXXXXPXXXSXXEXXRXXXXXXXXXXXXXXIGXXXDXPAXDXXXXXXXXXXXXXXYXXXXXXXXXXXXXXXXTGKXXXXXGGSXXRXXATGXGXXXXXXXXXXXXXXXXXXXXXXXXXXXXXXXXGXGNVXXXXXXXXXXXXXXXXXXXXXXXXXXXXGXXXXXXXXXXXXXXXXXXXXXXXXXXXXXXXXXXXXXXXXXXXXXXXXXXXXXXXXXXXDXXXPXAXXXXXXXXXXXXXXXXXXXXXXXEXANXPXXXXAXXXXXXXXXXXXXXXXXXXXXXXPXXXXNXGGVXVSXXEXXQNXXXXXWXXXXXXXXXXXXXXXXXXXXXXXXXXXXXXXXXXXXXXXXXXXXXXXXXXXXXXXXXXXXXXXXXXXXVXXXLXXXMXXXXXXXXXXXXXXXXXXXXXXXXXXXXXXXXXXXAXXXXXXXXXXAXXXXG

SEQ ID NO: 57231 - protein, 29 aa, Artificial sequence
  protein pattern
  Variant (3)..(3): Xaa in position 3 is any amino acid
  Variant (7)..(7): Xaa in position 7 is Ile, Leu or Val
  Variant (9)..(9): Xaa in position 9 is any amino acid
  Variant (11)..(20): Xaa in position 11 to 20 is any amino acid
  Variant (22)..(22): Xaa in position 22 is Ala, Gly or Ser
  Variant (23)..(27): Xaa in position 23 to 27 is any amino acid
  Variant (29)..(29): Xaa in position 29 is Ala, Cys, Gly, Asn, Ser, Thr or Val
GPXKGGXRXHXXXXXXXXXXLXXXXXXKX

SEQ ID NO: 57232 - protein, 24 aa, Artificial sequence
  protein pattern
  Variant (3)..(3): Xaa in position 3 is Ala or Gly
  Variant (5)..(5): Xaa in position 5 is Ala or Gly
  Variant (7)..(9): Xaa in position 7 to 9 is any amino acid
  Variant (10)..(10): Xaa in position 10 is Asp, Asn, Ser or Thr
  Variant (12)..(14): Xaa in position 12 to 14 is any amino acid
  Variant (16)..(17): Xaa in position 16 to 17 is any amino acid
  Variant (19)..(20): Xaa in position 19 to 20 is any amino acid
  Variant (21)..(23): Xaa in position 21 to 23 is any or no amino acid
GGXKXGXXXXPXXXSXXEXXXXXR

SEQ ID NO: 57233 - protein, 20 aa, Artificial sequence
  protein pattern
  Variant (2)..(2): Xaa in position 2 is Asp, Gly or Pro
  Variant (3)..(5): Xaa in position 3 to 5 is any amino acid
  Variant (7)..(7): Xaa in position 7 is any amino acid
  Variant (11)..(11): Xaa in position 11 is any amino acid
  Variant (14)..(14): Xaa in position 14 is any amino acid
  Variant (15)..(15): Xaa in position 15 is Phe or Leu
  Variant (17)..(19): Xaa in position 17 to 19 is any amino acid
  Variant (20)..(20): Xaa in position 20 is Asp, Gly or Asn
PXXXXNXGGVXVSXXEXXXX

SEQ ID NO: 57234 - protein, 13 aa, Artificial sequence
  protein pattern
  Variant (3)..(5): Xaa in position 3 to 5 is any amino acid
  Variant (7)..(8): Xaa in position 7 to 8 is any amino acid
  Variant (12)..(12): Xaa in position 12 is any amino acid
GGXXXRXXATGXG

SEQ ID NO: 57235 - DNA, 909 bp, Synechocystis sp.
  CDS (1)..(909): transl_table=11
atggttgcccaacaaacacgaaccgactttgatttagcccaatacttacaagttaaaaaaggtgtggtcgaggcagccctggatagttccctggcgatcgcccggccggaaaagatttacgaagccatgcgttattctctgttggcggggggcaaacgattgcgaccgattttatgcattacggcctgcgaactgtgtggcggtgatgaagccctggccttgcccacggcctgtgccctggaaatgatccacaccatgtccctcatccatgatgatttgccctccatggataatgacgatttccgccggggtaaacccactaaccacaaagtgtacggggaagacattgccattttggccggggatggactgctagcctatgcgtttgagtatgtagttacccacaccccccaggctgatccccaagctttactccaagttattgcccgtttgggtcgcacggtgggggccgccggtttagtggggggacaagttctagacctggaatcggaggggcgcactgacatcaccccggaaaccctaacttttatccatacccataaaaccggggcattgctggaagcttccgtgctcacaggcgcaattttggccggggccactggggaacaacaacagagactggcccgctatgcccagaatattggcttagcttttcaagtggtggatgacatcctcgacatcaccgccacccaggaagagttgggtaaaaccgctggtaaagatgtcaaagcccaaaaagccacctatcccagtctcctcggtttggaagcttcccgggcccaggcccaaagtttgattgaccaggccattgtcgccctggaaccctttggcccctccgccgagcccctccaggcgatcgccgaatatattgttgccagaaaatattaa

SEQ ID NO: 57236 - protein, 302 aa, Synechocystis sp.
MVAQQTRTDFDLAQYLQVKKGVVEAALDSSLAIARPEKIYEAMRYSLLAGGKRLRPILCITACELCGGDEALALPTACALEMIHTMSLIHDDLPSMDNDDFRRGKPTNHKVYGEDIAILAGDGLLAYAFEYVVTHTPQADPQALLQVIARLGRTVGAAGLVGGQVLDLESEGRTDITPETLTFIHTHKTGALLEASVLTGAILAGATGEQQQRLARYAQNIGLAFQVVDDILDITATQEELGKTAGKDVKAQKATYPSLLGLEASRAQAQSLIDQAIVALEPFGPSAEPLQAIAEYIVARKY

SEQ ID NO: 57237 - DNA, 1311 bp, Arabidopsis thaliana
  CDS (186)..(1121)
aacatttataaagttctattagagacggtggataggccatggctactactgttcatctcagctcattctccctcttcatccaatccagaggaagaagagacaactccatatcttccgtcaagagtctcaaaaaacgcacaggtttgtctccctcttctgccctcacctcacaaggtggcagagacatgattccaccagagagaaaatgcaatgatcacaactctgcttttgatttcaagttgtatatgatccgcaaagccgaatctgtaaatgcggctctcgacgtttctgtaccgctccgagaacccctcactgtccaggaagccgtgcggtactcattgctagcgggcggaaaacgtgtgaggcctctgctctgcattgccgtctgcgagcttgtgggaggcgacgaggctactgccatgtcagctgcttgcgcggttgagatgatccacacaagctctcttattcatgacgatcttccgtgcatggacaatgccgacctccgcagaggcaagcccaccaaccacaaggtatatggagaagacatggcggttttggcaggtgatgcactccttgcattggcgtttgagcacatgacggttgtgtcgagtgggttggtcgctcccgagaggatgattcgcgcggtggttgagctggccagggccatagggactacagggctagttgctggacaaatgatagacctagccagcgaaagactgaatccagacaaggttggattggagcatctagagttcatccatctccacaaaacggcggcattgttggaggcagcggcggttttaggggttataatgggaggtggaacagaggaagagatcgaaaagcttagaaagtatgctaggtgtattggactactgtttcaggtggttgatgacattcccgacgtaacaaaatctactgaggaattgggaaagactgcaggaaaagacgtaatggctggaaagctgacgtatccaaggctgataggtttggagagatcaaaggaagttgcagaggaactgaggagagaagcagaggaacaacttctagggtttgatccaagtaaggcggcgcctctggtggctcttgctagctacatcgcttgcagacacaactgaatggactgatcatatcctcaatgcatctaatcttctaacaagtccttttacttagatctatggtcttgtttcttataaatcatctatgccgtgtgatcatctctctcagttgttttcaagttgtattatgtttttgaatcttaataatgtaatgttcgaaaaatatcaataagatttgctcataggaacg

SEQ ID NO: 57238 - protein, 311 aa, Arabidopsis thaliana
MIPPERKCNDHNSAFDFKLYMIRKAESVNAALDVSVPLREPLTVQEAVRYSLLAGGKRVRPLLCIAVCELVGGDEATAMSAACAVEMIHTSSLIHDDLPCMDNADLRRGKPTNHKVYGEDMAVLAGDALLALAFEHMTVVSSGLVAPERMIRAVVELARAIGTTGLVAGQMIDLASERLNPDKVGLEHLEFIHLHKTAALLEAAAVLGVIMGGGTEEEIEKLRKYARCIGLLFQVVDDIPDVTKSTEELGKTAGKDVMAGKLTYPRLIGLERSKEVAEELRREAEEQLLGFDPSKAAPLVALASYIACRHN

SEQ ID NO: 57239 - DNA, 1537 bp, Zea mays
  CDS (243)..(1334)
cattggacccctcgaggccggccggggcccggaacaccacgcctagcaccaagcaccaccaccgcccgggcggccactccacgtctccacttgccgtgctgcaccgacgcggccagcgcctaggcttctcttcacctcaagacaaagcagatcgcaacctctcgagccacccccaatctccaacgttaccgtccccggtcccccgcactttagccccccaagcccaacccaactcgccacccatggccatggcgtttcacttccacccgctggtcgcctcgcgcgtccacctctctccgcacccgttcgccgccgctacgggggcaccctccccctcctcctccgtcgccatcgcggcgcactaccaccaccacggccgccgccgcttctccgccatcgtggccacggccacgaccacggagttcaacttcaaggcatacatggaggagcgagcggtcgcggtgaaccgggcgctggacgcggccatccccgccggggggctccccgcggcgctgcacgacgcgatgcggtacgcgctgctggcgggcgggaagcgcgtgcgccccgcgctgtgcctggccgcgtgcgccgtggtgggcgggccggagtcctgggcgatgccggccgcggcggccgtcgagatggtgcacaccatgtcgctcgtccacgacgacctcccctgcatggacgacgacgacctccgccgcggcaagcccacctgccacgtcgtctacggcgagcccatcgccgtcctcgccggggacgcgctgctctcgctctccttccaccacatggccagcgtcgggtcctaccctccggacgtggacccggagaagcaccccgcccgcgtcgtccgagccattggggagctcgcgcgctgcatcggatccgagggactcgtcgccggccaggttgtcgatctcgagatgacgggcacatcagagacggtgcccctcgaacgcctcgagtacatccacctccacaagaccgccgcattgctcgaggcctcggtggtgattggggcgatcatcggaggcggcacggacgagcagatcgagaggctgcggaagtacgcgaggtcgatcgggctgctgttccaggtggtcgacgacatactcgatgtcaccaagtcgtcagaggagctcggcaagacggcggggaaggacctggcaagcgacaaaacgacgtacccgaagctgctggggctagaaaagtcgcgggagttcgcggaggagttgctctctgatgccgtagagcagcttgcttgcttcgacaaggagaaggcagcgcctctgttgcatctggccaactatatcgcccataggcagaactgagaatttgaggtgattgcgtactctattgtcggacctgttgtaactttgtcaggccgtcgcccgtcgaactggggttcgaggaatatatccaaatcgtcatgtgatgtatactagctgtagctctgtaccttgatggaatggggctgtttagttcgaattccaaaagtatgaaataccgtatccaattatgaacctaattatta

SEQ ID NO: 57240 - protein, 363 aa, Zea mays
MAMAFHFHPLVASRVHLSPHPFAAATGAPSPSSSVAIAAHYHHHGRRRFSAIVATATTTEFNFKAYMEERAVAVNRALDAAIPAGGLPAALHDAMRYALLAGGKRVRPALCLAACAVVGGPESWAMPAAAAVEMVHTMSLVHDDLPCMDDDDLRRGKPTCHVVYGEPIAVLAGDALLSLSFHHMASVGSYPPDVDPEKHPARVVRAIGELARCIGSEGLVAGQVVDLEMTGTSETVPLERLEYIHLHKTAALLEASVVIGAIIGGGTDEQIERLRKYARSIGLLFQVVDDILDVTKSSEELGKTAGKDLASDKTTYPKLLGLEKSREFAEELLSDAVEQLACFDKEKAAPLLHLANYIAHRQN

SEQ ID NO: 57241 - DNA, 1032 bp, Arabidopsis thaliana
  CDS (1)..(1032)
atgctctgtaagattattatcatgcggccgtgttacagcctggttctgtctgcaatgcggctgatacgaccgtccaaccgccgtctaagttcgatcgcaagctccgactctgagttcatttcatacatgaacaataaggctaagtccatcaacaaagcactagacaattcaattccactttgcaacaattctgttcctctttgggagccagtactcgaggttcacaaagctatgaggtacacgcttctctcaggcggcaaacgagtaaggccaatgctctgtttggtcgcttgcgagctcgtaggtggccaagagtcaaccgcaatgcctgcagcctgtgcggttgagatgattcacgcagcgtcgctcatcctagacgaccttccttgtatggatgacgacagcctccgccgtggaatacccaccaaccataaagtttttggcgagaaaacatccatcttggcctctaatgcgctcatgtctttggccgtcaagcagacattggcatcgacctcattgggggtgacttcagagagggttcttcgggctgttcaggagatggcgagagctgttgggacagagggacttgtggcaggccaagcagcggatttggccggagaaaggatgagttttaagaacgaagacgacgaattgagatatcttgagttgatgcatgttcataaaaccgcggttttggttgaagctgcggctgttgtgggagctataatgggaggtgggtctgatgaagagattgagaggcttaagagctacgcgaggtgcgttggactgatgtttcaggtgatggatgatgtactcgatgagaccaagtcttccgaggagcttgggaaaactgccggtaaagatttgatcaccggaaagctgacgtatccgaaggtgatgggtgtggacaatgcgagagaatatgcaaagaggttgaacagagaagcgcaggaacatcttcaggggtttgattctgacaaggtggttcctttgttgtctctcgctgattatattgtcaagagacaaaactga

SEQ ID NO: 57242 - protein, 343 aa, Arabidopsis thaliana
MLCKIIIMRPCYSLVLSAMRLIRPSNRRLSSIASSDSEFISYMNNKAKSINKALDNSIPLCNNSVPLWEPVLEVHKAMRYTLLSGGKRVRPMLCLVACELVGGQESTAMPAACAVEMIHAASLILDDLPCMDDDSLRRGIPTNHKVFGEKTSILASNALMSLAVKQTLASTSLGVTSERVLRAVQEMARAVGTEGLVAGQAADLAGERMSFKNEDDELRYLELMHVHKTAVLVEAAAVVGAIMGGGSDEEIERLKSYARCVGLMFQVMDDVLDETKSSEELGKTAGKDLITGKLTYPKVMGVDNAREYAKRLNREAQEHLQGFDSDKVVPLLSLADYIVKRQN

SEQ ID NO: 57243 - DNA, 930 bp, Synechococcus sp
  CDS (1)..(930)
atgaccgtcgcggcgacttctcccgacaacacttctggcctggccgacatctttgatttcaaggcctatctcgccaaagccaaggcgacggtggagcaagccttggatcagtccttggtgccggagcggccggagtcgctgcgtgaagccatgcgctactcactgctggcaggaggaaagcgtctgcggccaatcctctgcctggccgcctgcgagctggcgggtggggatgctgcccaggccatgccaacggcagtggcgctggagatgattcacaccatgtcgttgatccatgacgaccttccggccatggatgacgacgacctgcggcgtggacgccccacaaaccacaaggtctatggcgaggctgttgcgatccttgccggtgacgcattgctgacccgtgcctttgagatggtggcgctgcgtagtcctggggttccgcccgaacggctgctcaaggtggtgggagagctgtcgttggtggcgggggcccctggcctggtgggcggtcaggtggttgatctggaaagcgagggcaaggaggttgatcttgaaaccctcgagtacatccacctccacaaaaccggcgcgttgttgagcgcctgtgtgatcaccggcgcgatgatcggtggcgctgatgatgagctgattgctgcgttacgggtctacgcccgggggatcggcctggcgttccagatcattgacgacatcctggacatcacggccagcagcgaggtgcttgggaaaacagccggtaaggacctgatcgctgacaaaacgacgtatcccaaacttctcgggctcgaggaatcccgcaaacgggccgctgatctggtgcaggaggccaaaggggtgctcaagccatgggcaagcaaagcccaaccgctgctggccctggcggattacatcaccagccgtgatcgatga

SEQ ID NO: 57244 - protein, 309 aa, Synechococcus sp
MTVAATSPDNTSGLADIFDFKAYLAKAKATVEQALDQSLVPERPESLREAMRYSLLAGGKRLRPILCLAACELAGGDAAQAMPTAVALEMIHTMSLIHDDLPAMDDDDLRRGRPTNHKVYGEAVAILAGDALLTRAFEMVALRSPGVPPERLLKVVGELSLVAGAPGLVGGQVVDLESEGKEVDLETLEYIHLHKTGALLSACVITGAMIGGADDELIAALRVYARGIGLAFQIIDDILDITASSEVLGKTAGKDLIADKTTYPKLLGLEESRKRAADLVQEAKGVLKPWASKAQPLLALADYITSRDR

SEQ ID NO: 57245 - DNA, 903 bp, Prochlorococcus marinus
  CDS (1)..(903): transl_table=11
atggcggaagcagtcatgtttccttttgactttaccgcttatctggctaaggctagaacaagaattgagtctgcattagatgcttccttaggtccagaacgacctaatcaacttagagaagcaatgcgatattcccttcttgctggtggcaaaagactaagaccaattctttgtttagcagcctgcgaattaacaggttctgattctgagaatgcaatctcaacagcagtagcaattgagatgattcatacaatgtcattaattcatgatgacttgccatctatggataatgatgatttgcgtagaggtcgtcctactaatcacaaagtatatggagaagctatagcaatccttgctggggacgcacttttaacaagagcttttgaaatggttgcgcttcgaagtccaaatgtgccgaaggatcgtttactaaaagtagtaggcgaactctctttggtagcaggtgctccaggtttagtcggaggacaagtcgaagatcttgaaagtgaagggaaggcagtcgatcttgatactctggaattcattcatattcataaaacaggagccctacttaaagcatccgttgtatgtggagctctaattggaggagcagatgaagacttgcttatagctcttagtacttatgccaaaggaataggcttagcctttcagatagtagatgatatccttgatgttacagcgagtagtgaagtcttagggaaaacagctggtaaggatctattggctgataaatctacttatccaaagctgcttggcttggatgaatcacgcaaaaaagctaaggaactaattagaaaatccaaagacgttatacatccttggagtgataaggctgccccgcttttatctttagcggattacattattaatagagatagatga

SEQ ID NO: 57246 - protein, 300 aa, Prochlorococcus marinus
MAEAVMFPFDFTAYLAKARTRIESALDASLGPERPNQLREAMRYSLLAGGKRLRPILCLAACELTGSDSENAISTAVAIEMIHTMSLIHDDLPSMDNDDLRRGRPTNHKVYGEAIAILAGDALLTRAFEMVALRSPNVPKDRLLKVVGELSLVAGAPGLVGGQVEDLESEGKAVDLDTLEFIHIHKTGALLKASVVCGALIGGADEDLLIALSTYAKGIGLAFQIVDDILDVTASSEVLGKTAGKDLLADKSTYPKLLGLDESRKKAKELIRKSKDVIHPWSDKAAPLLSLADYIINRDR

SEQ ID NO: 57247 - DNA, 1524 bp, Abies grandis
  CDS (122)..(1267)
gattttccctgctacaaaaatctatgtattgtttcttcagttgcattcaaagatctatagaatttcgagctttgaatttgttttaagagtttatagcaggagctaatcatataaagaggacatggcttacagtgctatggcaaccatgggttacaatggtatggcagctagctgccataccctgcatcctaccagcccattaaaaccttttcatggagcttcaacctcactggaagcttttaatggcgagcatatgggcctcctccgagggtattcgaagaggaagctatcttcatataaaaatccggcatctagatcctcaaacgctacagttgcccagttgcttaatcctccacaaaaagggaagaaggccgttgaatttgatttcaacaagtacatggattccaaggcaatgacagtgaatgaggcgttgaataaggctatcccacttcgttatccccagaaaatatatgaatccatgaggtattctcttctggcaggagggaaacgagttcgtcctgttctgtgcattgcagcatgtgagcttgttggaggaaccgaggagcttgcgattccaactgcctgtgcaatcgaaatgatccacacaatgtctttgatgcatgatgacttgccttgcatagacaatgatgatttacggcgagggaaacctacaaaccataagatcttcggggaagatactgctgttactgcagggaatgcgcttcattcttacgcctttgagcatattgcagtttccacaagcaaaactgtgggggctgataggattttgaggatggtatctgaactgggtagagcaacaggctctgaaggggttatgggtggccagatggtcgatattgccagcgaaggggatccttctattgaccttcagactctggaatggattcatattcacaagactgcaatgctcttggagtgctcggttgtgtgtggggcgatcatcggtggtgcttcggagattgtgatcgagagagctcgaaggtatgcccgttgcgtggggcttctttttcaggttgtggatgacatactcgatgtcacgaaatcatcagacgaactgggcaagactgcaggaaaggatttgattagtgataaggcaacttatccaaagctcatgggtttggagaaagcaaaggagttttctgatgaattgttgaacagagctaagggagagttatcttgcttcgatccagtgaaggcagcacctctgttgggtcttgcagattacgtggcattcagacaaaattgaagagcctcctcaaagcgttcttgtttgttagagtggataatcttggtttaatagttttttaaagtaacagagttagacctgcgttccctgccctccgtatactatctatgatgtagcactgcaacttcttgtattgtgaaaacttgagcacagcattttaattgtgaaatctagtccaactgcaaactcaaaccggatattcagtcgatggcccgtctacaggccgactggccgtgattcaaggcgagcaatactca

SEQ ID NO: 57248 - protein, 381 aa, Abies grandis
MAYSAMATMGYNGMAASCHTLHPTSPLKPFHGASTSLEAFNGEHMGLLRGYSKRKLSSYKNPASRSSNATVAQLLNPPQKGKKAVEFDFNKYMDSKAMTVNEALNKAIPLRYPQKIYESMRYSLLAGGKRVRPVLCIAACELVGGTEELAIPTACAIEMIHTMSLMHDDLPCIDNDDLRRGKPTNHKIFGEDTAVTAGNALHSYAFEHIAVSTSKTVGADRILRMVSELGRATGSEGVMGGQMVDIASEGDPSIDLQTLEWIHIHKTAMLLECSVVCGAIIGGASEIVIERARRYARCVGLLFQVVDDILDVTKSSDELGKTAGKDLISDKATYPKLMGLEKAKEFSDELLNRAKGELSCFDPVKAAPLLGLADYVAFRQN

SEQ ID NO: 57249 - DNA, 1278 bp, Brassica napus
  CDS (11)..(1096)
agaaaccacaatggcttcaatgactctaggttcattggttcaccaccatcatccttctatctttacccgatcttcttccctcacgactcttaaacccatcgtcatcaactcaaaacgcaccgtttcatcatcatcatcttcctacatcgtctcctcttccatcgtcactaaaaaagacaaccacaattacaaatcatcatccttcgacttcatgtcttacatggtcagtaaagccgagtccgtcaacagagccttggacttggccgttcctctccaagaaccactcaagatccacgaagccatgcgctactctctcctcgccggaggcaaacggatcaggccccttctctgcatcgccgcttgcgagctcgtcggaggcgaagcatccgtcgctatgccggcagcttgcgccgtcgaaatgctccacaccatgtccttaatccacgacgatctcccgtgcatcgataacgacgatctccgccgcgggaaacccacgaaccacaaagtcttcggcgaaaacgtcgcccttttggccggagacgcgcttcttccctttgccttcgagcatttagtgtcggcgacgagtcccgtggtttctccggtgagactggttcgaggcgtgggagaattggctaaagccgttggcgtcgaaggcgtcgcggctggacaagtggcggatataagcagcgaagggttggacccaaacgacctcggtttggagcatttggagtttatccatttgcataaaacggcggcgttgcttgaagcctctgcggtgttgggtgggatcgttggaggagggagtgacgatgagatcgagaggctgaggcaattcgcgaggtgtgttggtttgttgtttcaggtggttgacgacatcttggacgtcacgaaatcgtctcaagaattaggtaaaactgctgggaaagatttggttgctgataagctgacgtatccgaagattatggggttggagaaatcgagagagttcgctgagaagttgagtagagatgctcgtgaacagcttttagggtttggttccgaccaggtggctcctttgttggctttggctaattacattgccaatagacagaactgatgtgtgttttctttcttacttgttagaatcattcgagattttattctctggtcttgtttcagattgaattgtataaaatattggagaagctgaaacagattcttgtgcttgtttgttggtgtaacctctatgtttccgtgtactacaagatagttatgtgtttaaaagaaaaaaaaaaaaaa

SEQ ID NO: 57250 - protein, 361 aa, Brassica napus
MASMTLGSLVHHHHPSIFTRSSSLTTLKPIVINSKRTVSSSSSSYIVSSSIVTKKDNHNYKSSSFDFMSYMVSKAESVNRALDLAVPLQEPLKIHEAMRYSLLAGGKRIRPLLCIAACELVGGEASVAMPAACAVEMLHTMSLIHDDLPCIDNDDLRRGKPTNHKVFGENVALLAGDALLPFAFEHLVSATSPVVSPVRLVRGVGELAKAVGVEGVAAGQVADISSEGLDPNDLGLEHLEFIHLHKTAALLEASAVLGGIVGGGSDDEIERLRQFARCVGLLFQVVDDILDVTKSSQELGKTAGKDLVADKLTYPKIMGLEKSREFAEKLSRDAREQLLGFGSDQVAPLLALANYIANRQN

SEQ ID NO: 57251 - DNA, 1268 bp, Glycine max
  CDS (9)..(1118)
gcacgagcatgagttctctgaatcttggaacatggcctcgtcccacctctatgttgaacacaccttcacatctccttcccccttttcacactctcactctcacaacaacgcttcccaaactcgcaagtggaaccccaaaactaatatcttcttttcccctcgtctctgctgtgcccactaaggaacacacagtcacaacccaggaaattcaactccaagacacgccgctcaacttcgatttcaagggctacatgatcgccaaggcccacacggtaaaccaagccttggacgccgccattgcgttgagggacccacacaagatccaccaagccatgcgctactccctcctcgccggcggcaagagggtccgccccgtgctctgcatcgccgcatgcgagctcgtcggtggcacagaggccaccgccatccccgccgcctgcgccgtcgagatgatccacaccatgtcgctcatccacgacgacctgccatgtatggacaacgacgacctccgccgcggaaagccgaccaaccacaaggtctacggcgaggacgtggcggtcctcgccggcgacgcgctcctcgccttcgcgttcgagcacgtggcagcgtccacggagggagtgtcgccgtcacgcgtggttcgagcgattggggaattagcgaagtcgatcggtacggaagggcttgtggcgggacaagtggtggatatagattcggagggggtggcgaatgtggggctggagacgctggaattcattcacgtgcacaaaacggcggcgttgctggaagctgcggttgtgttgggggcaatagtgggaggtgggagcgacgaggaggttgagaaattaaggaagttcgctaggtgcattgggttgttgtttcaggttgtggacgacattctggatgttacgaagtcgtcggaggaattggggaagacggcggggaaggatttggtggctgataaggttacttatcccaagctattggggatagataagtcaaaggaatttgctcaagaattgttaaaggatgccaaggaacaattgtctggcttcgatcctccaaaggcggctcccttgtttgcattaaccaattacattgcttataggcaaaattaaaagtgaaaacattggataccctgttttctcaccggggaaccactcaaataaatttctctgcttccatttccagtcctcaatgctgtactgttctccagcgattatttgtaataaaataaacctctttttttcaaaaaaaaaaaaaaaaaa

SEQ ID NO: 57252 - protein, 369 aa, Glycine max
MSSLNLGTWPRPTSMLNTPSHLLPPFHTLTLTTTLPKLASGTPKLISSFPLVSAVPTKEHTVTTQEIQLQDTPLNFDFKGYMIAKAHTVNQALDAAIALRDPHKIHQAMRYSLLAGGKRVRPVLCIAACELVGGTEATAIPAACAVEMIHTMSLIHDDLPCMDNDDLRRGKPTNHKVYGEDVAVLAGDALLAFAFEHVAASTEGVSPSRVVRAIGELAKSIGTEGLVAGQVVDIDSEGVANVGLETLEFIHVHKTAALLEAAVVLGAIVGGGSDEEVEKLRKFARCIGLLFQVVDDILDVTKSSEELGKTAGKDLVADKVTYPKLLGIDKSKEFAQELLKDAKEQLSGFDPPKAAPLFALTNYIAYRQN

SEQ ID NO: 57253 - DNA, 1441 bp, Glycine max
  CDS (150)..(1202)
gcacgaggttagtgagtgagtccacccaaatgctggtaattcttggactcattggtggaagtgtgtccatgaagaacgtagtagccagtaacaccgtaatgtctcatctctctcactcgtgacactttcttaatccctaacccattgtcatgagtgccctcaatttgaacgcatggccacgccccagatccagatccagatcccgatccccaacctttcacgccgtcaataagttacccttcttcaccgttaccaaacggagagcattctcgctctctgcggtgctcacggtcgagacggaagagaagccaccaatcttcgacttcaagaactacatgctttccaaagcgtccgcggtcaacaagggcctcgacgactccgtttcgctccgcgagcccaagaagatccacgaggcgatgcggtactcgctcctcgccggcggcaagcgcgtgcgccctgtgttatgcgtggcggcgtgcgagctcgtcggcgggcacgaggccacggcgatgcccgccgcctgcgccctcgagatgatccacaccatgtcgctcatccacgacgacctcccctgcatggacaacgacgatctccgccgcggcaagcccaccaaccacacggtcttcggcgaggacgtcgccgtcctcgccggcgacgccctcctggccttcgccttcgagcacatcgccgcctccacccggggggcctcggcgccccggatcctccgcgcgatcggcgagctcgcgcggtcgatcggctccgagggcctcgttgccggccaggtcgtcgacatcaactctgagggcctggccgacgttggcctagagcgcctggagttcatccacgtccacaagaccgccgcgctcctcgagggtgcggttgtcctcggcgccatcctcggcggcggcaccgacgacgaggtcgaaaaattgagaaaattcgctcgctacattggtctactctttcaggttgttgatgacattctcgatgttactaagtcttcccaggaattgggaaagaccgctggaaaagaccttgtggctgataaggttacttaccccaagcttttggggattgagaagtctaaggagtttgctgcgaaactgaacaaggatgctcaggatcagcttgctggctttgaccctgttaaggctgctcctttgattgctttagccaattacattgcttataggcagaactagattattgttcttgtctctactttacaaacaaatcattgtttgttttaggaatatttagttttttatgaaatgaaaatcattggatttacatttatttacatattgcaatgcaactagggattattaaataggagcctcccctgcccttcttctatgtgcctgccatagtcgtcaattttgtatgatgaataactataaatattagaatacctttaatttgtaaaaaaaaaaaaaaaaaa

SEQ ID NO: 57254 - protein, 350 aa, Glycine max
MSALNLNAWPRPRSRSRSRSPTFHAVNKLPFFTVTKRRAFSLSAVLTVETEEKPPIFDFKNYMLSKASAVNKGLDDSVSLREPKKIHEAMRYSLLAGGKRVRPVLCVAACELVGGHEATAMPAACALEMIHTMSLIHDDLPCMDNDDLRRGKPTNHTVFGEDVAVLAGDALLAFAFEHIAASTRGASAPRILRAIGELARSIGSEGLVAGQVVDINSEGLADVGLERLEFIHVHKTAALLEGAVVLGAILGGGTDDEVEKLRKFARYIGLLFQVVDDILDVTKSSQELGKTAGKDLVADKVTYPKLLGIEKSKEFAAKLNKDAQDQLAGFDPVKAAPLIALANYIAYRQN

SEQ ID NO: 57255 - DNA, 1161 bp, Glycine max
  CDS (133)..(1161)
gcacgagccataaccttatctatcgcaaccacctcccaaatcactctcatccaacttcatctctctcttcccccagttgccagatctgaatcacaccttcactcttgcgatttaattactgagtagttgaggatggctccttttgcttttgcaacattgccctcttctcacatctgccgcctcccaaagcccacaaacttgaagtttcgagttcgctgctctactgccgcgtcttctccttcttcggtttccactagatcaaaagctgctggctttgatttgaagacatactgggccaacctaatggtgcagatcaatcagaagctggacgaagctatcccggttcagtttcctccgcagatatatgaagctatgaggtattcagtccttgccaaaggtgccaagcgagccccacctgttatgtgcatctctgcctgtgaactctttggtggcagccgccttgccgcctttcccactgcctgtgcccttgaaatggttcatgcagcttcattgatacacgatgatcttccctgcatggatgactccccctcacgccgtggtcagccttcaaaccataccatctatggtgttgacatggcaattcttgcgggcgatgcactctttccccttggatttcgacacattgtttcacaaactccatcagaccttgtgcctgagtcgcacctccttcgtgtgattgccgagatagcccgctctgtaggatccactggaatggctgcagggcagttcctggaccttgaaggaggacccaatgcagttggatttatacaagaaaaaaagtttggtgaaatgggggagtcttctgcagtgtgtggaggattcttggctggagctgaagatgatgagatagagagactgaggaggtatgggagagctgttggggtattgtatgcagttgtggatgatattatagaagagagattgaaagttgagggagatggtgacaggaaaaacaagggtaagagttatgcagaggtttatggagttgaaaaggcaatagaaaaagctgaagagctcagagcaaaggctaaagaagaattggatggatttgagaagcatggggaacgggtctttcctctctacagttttgtggattatgcttttgatagaagtttcagtgttgatgatgccagtggataa

SEQ ID NO: 57256 - protein, 342 aa, Glycine max
MAPFAFATLPSSHICRLPKPTNLKFRVRCSTAASSPSSVSTRSKAAGFDLKTYWANLMVQINQKLDEAIPVQFPPQIYEAMRYSVLAKGAKRAPPVMCISACELFGGSRLAAFPTACALEMVHAASLIHDDLPCMDDSPSRRGQPSNHTIYGVDMAILAGDALFPLGFRHIVSQTPSDLVPESHLLRVIAEIARSVGSTGMAAGQFLDLEGGPNAVGFIQEKKFGEMGESSAVCGGFLAGAEDDEIERLRRYGRAVGVLYAVVDDIIEERLKVEGDGDRKNKGKSYAEVYGVEKAIEKAEELRAKAKEELDGFEKHGERVFPLYSFVDYAFDRSFSVDDASG

SEQ ID NO: 57257 - DNA, 891 bp, Abies grandis
  CDS (1)..(891)
atgtttgatttcaacaagtacatggattccaaggcaatgacagtgaatgaggcgttgaataaggctatcccacttcgttatccccagaaaatatatgaatccatgaggtattctcttctggcaggagggaaacgagttcgtcctgttctgtgcattgcagcatgtgagcttgttggaggaaccgaggagcttgcgattccaactgcctgtgcaatcgaaatgatccacacaatgtctttgatgcatgatgacttgccttgcatagacaatgatgatttacggcgagggaaacctacaaaccataagatcttcggggaagatactgctgttactgcagggaatgcgcttcattcttacgcctttgagcatattgcagtttccacaagcaaaactgtgggggctgataggattttgaggatggtatctgaactgggtagagcaacaggctctgaaggggttatgggtggccagatggtcgatattgccagcgaaggggatccttctattgaccttcagactctggaatggattcatattcacaagactgcaatgctcttggagtgctcggttgtgtgtggggcgatcatcggtggtgcttcggagattgtgatcgagagagctcgaaggtatgcccgttgcgtggggcttctttttcaggttgtggatgacatactcgatgtcacgaaatcatcagacgaactgggcaagactgcaggaaaggatttgattagtgataaggcaacttatccaaagctcatgggtttggagaaagcaaaggagttttctgatgaattgttgaacagagctaagggagagttatcttgcttcgatccagtgaaggcagcacctctgttgggtcttgcagattacgtggcattcagacaaaattga

SEQ ID NO: 57258 - protein, 296 aa, Abies grandis
MFDFNKYMDSKAMTVNEALNKAIPLRYPQKIYESMRYSLLAGGKRVRPVLCIAACELVGGTEELAIPTACAIEMIHTMSLMHDDLPCIDNDDLRRGKPTNHKIFGEDTAVTAGNALHSYAFEHIAVSTSKTVGADRILRMVSELGRATGSEGVMGGQMVDIASEGDPSIDLQTLEWIHIHKTAMLLECSVVCGAIIGGASEIVIERARRYARCVGLLFQVVDDILDVTKSSDELGKTAGKDLISDKATYPKLMGLEKAKEFSDELLNRAKGELSCFDPVKAAPLLGLADYVAFRQN

SEQ ID NO: 57259 - DNA, 915 bp, Abies grandis
  CDS (1)..(915)
atgtttgatttcaacaagtacatggattccaaggcaatgacagtgaatgaggcgttgaataaggctatcccacttcgttatccccagaaaatatatgaatccatgaggtattctcttctggcaggagggaaacgagttcgtcctgttctgtgcattgcagcatgtgagcttgttggaggaaccgaggagcttgcgattccaactgcctgtgcaatcgaaatgatccacacaatgtctttgatgcatgatgacttgccttgcatagacaatgatgatttacggcgagggaaacctacaaaccataagatcttcggggaagatactgctgttactgcagggaatgcgcttcattcttacgcctttgagcatattgcagtttccacaagcaaaactgtgggggctgataggattttgaggatggtatctgaactgggtagagcaacaggctctgaaggggttatgggtggccagatggtcgatattgccagcgaaggggatccttctattgaccttcagactctggaatggattcatattcacaagactgcaatgctcttggagtgctcggttgtgtgtggggcgatcatcggtggtgcttcggagattgtgatcgagagagctcgaaggtatgcccgttgcgtggggcttctttttcaggttgtggatgacatactcgatgtcacgaaatcatcagacgaactgggcaagactgcaggaaaggatttgattagtgataaggcaacttatccaaagctcatgggtttggagaaagcaaaggagttttctgatgaattgttgaacagagctaagggagagttatcttgcttcgatccagtgaaggcagcacctctgttgggtcttgcagattacgtggcattcagacaaaatctcgagcaccaccaccaccaccactga

SEQ ID NO: 57260 - protein, 304 aa, Abies grandis
MFDFNKYMDSKAMTVNEALNKAIPLRYPQKIYESMRYSLLAGGKRVRPVLCIAACELVGGTEELAIPTACAIEMIHTMSLMHDDLPCIDNDDLRRGKPTNHKIFGEDTAVTAGNALHSYAFEHIAVSTSKTVGADRILRMVSELGRATGSEGVMGGQMVDIASEGDPSIDLQTLEWIHIHKTAMLLECSVVCGAIIGGASEIVIERARRYARCVGLLFQVVDDILDVTKSSDELGKTAGKDLISDKATYPKLMGLEKAKEFSDELLNRAKGELSCFDPVKAAPLLGLADYVAFRQNLEHHHHHH

SEQ ID NO: 57261 - DNA, 915 bp, Abies grandis
  CDS (1)..(915)
atgtttgatttcaaggagtacttgcattccaaagcaatatcagtgaatgaggcactggagagggctgtcccacttcgctatcctgaaaaaatacatgaagctatgaggtattctcttctagcaggagggaagcggattcgtcctattctgactattgcagcatgtgagcttgtgggagggagtgaggagctcgccatgccaactgcctgtgcaatggagatgatccacacaatgtctttgattcatgatgatttgccttccatggacaatgatgatttacgccgaggtaagcttacaaaccacaaggtctttggcgaaggcactgctgttcttgcaggggatgcacttctttcatttgcatttgagcacattgcagtgtccacaaggaaaactgtggcgagtcatagggttttgagggtggtatctgaattgggtaaggcaataggctctcaaggggttgctggtgggcaggttgctgatattaccagtgaaggggatccatctgttgggcttgagactctcgaatggattcacattcacaagactgcagtgctcttggagtgcgccgttgtgagtggggcgatcatcggtggcgcttcagagaatgaaattgagagaactggaaggtatgcccgttgcgttgggcttctgtttcaggttgtggatgacatactcgatgtcaccagatcatcagaagaattgggaaagactgcaggaaaggatttggttagtgataaggccacttatcccaagctgatgggtttggagaaagcgaaggaatttgctgatgaattgttggacagagctaaggaggagttatcttgcttcaacccagctaaggctgcacctctgttgggtcttgcagattacattgcattaagacagaacctcgagcaccaccaccaccaccactga

SEQ ID NO: 57262 - protein, 304 aa, Abies grandis
MFDFKEYLHSKAISVNEALERAVPLRYPEKIHEAMRYSLLAGGKRIRPILTIAACELVGGSEELAMPTACAMEMIHTMSLIHDDLPSMDNDDLRRGKLTNHKVFGEGTAVLAGDALLSFAFEHIAVSTRKTVASHRVLRVVSELGKAIGSQGVAGGQVADITSEGDPSVGLETLEWIHIHKTAVLLECAVVSGAIIGGASENEIERTGRYARCVGLLFQVVDDILDVTRSSEELGKTAGKDLVSDKATYPKLMGLEKAKEFADELLDRAKEELSCFNPAKAAPLLGLADYIALRQNLEHHHHHH

SEQ ID NO: 57263 - DNA, 915 bp, Abies grandis
  CDS (1)..(915)
atgtttgacttcaaggagtatctacgttccaaggcaatggcagtgaatgaggcactggatagggctgtaccacttcgttatcctgaaagaatacatgaagctatgaggtattctcttctagcaggagggaagagggttcgtcctgttctgtgcatttcagcatgtgagcttgtgggagggaccgaggaagtcgccatgccaactgcctgtgcaatggagatgatccacacaatgtctttaattcatgatgacttgccttgcatggacaatgatgattttcgcagaggtaagcctacaaaccacaaggtcttcggggaaggcactgctattcttgcaggggatgcactgctttcatttgcatttgaacacattgcagtatccacaagcaaatctgtggggactgataggattttgagggtggtatctgaattgggtagaacaataggctcccaagggcttgtgggtgggcaggttgctgatattacgagtgagggcgatgcttctgttgaccttgacactctggaatggattcacattcataagactgcagtgctattggagtgctcagttatgtgtggggcgatcattagtggtgcttcagacaatgagattgagagaattcaaagatatgcccgtagcgtggggcttctgtttcaggttgttgacgacatactcgacgtcacgaaatcatcaaaagagttgggcaaaactgcaggaaaggatttgatcagtgataaggccacttatccgaagctgatgggtttagagaaagcaaaacaatttgcttcggatttgttgatcagagctaaggaggatttatcttgcttcgacccaatgaaggctgcaccattgttgggtcttgcagattacattgcattcagacaaaacctcgagcaccaccaccaccaccactga

SEQ ID NO: 57264 - protein, 304 aa, Abies grandis
MFDFKEYLRSKAMAVNEALDRAVPLRYPERIHEAMRYSLLAGGKRVRPVLCISACELVGGTEEVAMPTACAMEMIHTMSLIHDDLPCMDNDDFRRGKPTNHKVFGEGTAILAGDALLSFAFEHIAVSTSKSVGTDRILRVVSELGRTIGSQGLVGGQVADITSEGDASVDLDTLEWIHIHKTAVLLECSVMCGAIISGASDNEIERIQRYARSVGLLFQVVDDILDVTKSSKELGKTAGKDLISDKATYPKLMGLEKAKQFASDLLIRAKEDLSCFDPMKAAPLLGLADYIAFRQNLEHHHHHH

SEQ ID NO: 57265 - DNA, 1470 bp, Glycine max
  CDS (238)..(1341)
gcacgaggcgttgtgttgtgtcctgtgctagttgaatctcatctaaccccaaatactaagatcctatcctactactcatttgcttatccatcatcaacaactctcatttctcatcatcacttcccacttacgctcggtaatgtctcatttctcacgcatcaacccctaataataatcccccaaacagaacctttcccacccaatccaaacacagccctaaacccccccaccatcatcatgagtgccgtgaatttgaacacatggccacgccccagcttcattttgaaccaaaccgccacaagaagatccagatcctccccaacctctcatttctttcacggcgtcaataagttaccgtcacccatttcctccctcaccgttgccaaacgctcatttacgctctcggcggtgctgacgaaagaggacaccgtggagacggaagagaagccaccgattttcgacttcaagaactacatggtttccaaagcgagcgcggtgaacaaggccctcgacgacgccgtttcgctccgcgagccgcagaagatccacgaggcgatgcggtactcgctcctcgccggcggcaagcgcgtgaggccggttttgtgcgtggcggcctgcgagctcgtcggcggcgaggaggccacggcgatgcccgccgcctgcgccatcgagatgatccacaccatgtcgctcatccacgatgacctcccctgcatggacaacgacgacctccgccgcggtaagcccaccaaccacaaggtcttcggcgaggacgtcgccgtcctcgccggcgacgcgctcctcgccttcgccttcgagcacatcgccgcctccacccggggcgcctccccggggcggatcgtccgcgcgatcggcgagcttgcgcggtcgatcggctccgagggacttgtcgccggccaggtcgtcgacatcaactccgagggcctggccgacgtggacctcgagcgcctcgagttcatccacgtccacaagactgccgcgctcctcgagggtgcggtggtgctcggcgccatcctcggcggcggcaccgacgacgaggtcgagaaattgagaaaattcgctcgctacattggtctgctctttcaggttgttgatgacattctcgatgttaccaagtcatctcaggaattggggaaaaccgcaggaaaagaccttgtggcagataaggttacttaccccaaacttttgggtattgagaaatctaaggtgtttgctgcgaagttgaacaaagatgctcaggatcagcttgttgggtttgaccctgttaaggctgctcctttgattgctttagccaattacattgcttataggcagaactagattgtttgtttaggaaagtttagatttatgaaatcatattggattaacatttacttattggctattgcaatgcaactagggattataaaataataatacccccttgcccttaaaaaaaaaaaaaaaaaa

SEQ ID NO: 57266 - protein, 367 aa, Glycine max
MSAVNLNTWPRPSFILNQTATRRSRSSPTSHFFHGVNKLPSPISSLTVAKRSFTLSAVLTKEDTVETEEKPPIFDFKNYMVSKASAVNKALDDAVSLREPQKIHEAMRYSLLAGGKRVRPVLCVAACELVGGEEATAMPAACAIEMIHTMSLIHDDLPCMDNDDLRRGKPTNHKVFGEDVAVLAGDALLAFAFEHIAASTRGASPGRIVRAIGELARSIGSEGLVAGQVVDINSEGLADVDLERLEFIHVHKTAALLEGAVVLGAILGGGTDDEVEKLRKFARYIGLLFQVVDDILDVTKSSQELGKTAGKDLVADKVTYPKLLGIEKSKVFAAKLNKDAQDQLVGFDPVKAAPLIALANYIAYRQN

SEQ ID NO: 57267 - DNA, 1101 bp, Oryza sativa (japonica cultivar-group)
  CDS (1)..(1101)
atggctgccttccccccgctcgccgcctcccgcgtccgcatctcccctctcatccccgccgccgcgatggctgggacagcaggggcggcggcggcgtcgtacgcgcagcaccggcggaggttctgcgccatcgtggcgaccgcggcggcgtcaccggtgccggccgcggcggcggcggcggcgacggggtttgattttaacgcgtatatgggtgagaaggctgcggcggtgaaccgggcgctggacgcgtcgatcccggcggacgagccgcccgcggcgctccacgaggcgatgcggtacgcgctgctggcgggcgggaagcgggtgcggcccgcgctgtgcctggcggcgtgcgcggtggtcggggggcgggaggcctgggcgatgcccgccgccgccgccgtcgagatggtgcacaccatgtcgctcgtccacgacgacctcccctgcatggacgacgacgacctccgccgcgggaagcccacctgccacgtcgtctacggggagcccatcgccgtgctcaccggcgacgcgctgctctccctctccttccaccacatggccaggttcgactcctaccctccggacatcgacgctgacaagcaccccgcccgcgtcgtccgcgccattggcgagctcgcgcgctgcataggctccgagggcctagtcgccggccaggttgttgatcttgagatgactggatcgaccgaaactgtacctcttgaacgtcttgagtacatccatctccacaaaactgctgcattgcttgaggcatcagtggttattggggcaatcttgggaggtggctctgatgagcagattgaaagtttgcgcatgtatgcgagatcgataggattgttgttccaggttgttgatgatatacttgatgtgaccaagtcttctgaggagctcggcaagacagcagggaaggacttggcgagtgacaagacgacatacccgaaattacttgggctggagaaatcacgggagtttgcagaaaagttgctttctgatgcaagggaacaactttcaggatttgatcaagagaccgcagcaccacttctgcacctggccaattatattgcctatcggcagaactga

SEQ ID NO: 57268 - protein, 366 aa, Oryza sativa (japonica cultivar-group)
MAAFPPLAASRVRISPLIPAAAMAGTAGAAAASYAQHRRRFCAIVATAAASPVPAAAAAAATGFDFNAYMGEKAAAVNRALDASIPADEPPAALHEAMRYALLAGGKRVRPALCLAACAVVGGREAWAMPAAAAVEMVHTMSLVHDDLPCMDDDDLRRGKPTCHVVYGEPIAVLTGDALLSLSFHHMARFDSYPPDIDADKHPARVVRAIGELARCIGSEGLVAGQVVDLEMTGSTETVPLERLEYIHLHKTAALLEASVVIGAILGGGSDEQIESLRMYARSIGLLFQVVDDILDVTKSSEELGKTAGKDLASDKTTYPKLLGLEKSREFAEKLLSDAREQLSGFDQETAAPLLHLANYIAYRQN

SEQ ID NO: 57269 - DNA, 918 bp, Mesorhizobium loti MAFF303099
  CDS (1)..(918): transl_table=11
atgacgaatgacgacgaaatggcgttcgaaatggcgctcatcaggcgggcagccgccgtcgaggtgctgctgcggcgcttgctcgacgatcgcccgctttcgggagagatcgcgcggcccgaccgcctgatggcggcgatgcgccatggcgtgctgaacggcggcaagcgcctgcgccccttcctggtcatggaaagtgccgcccttttctccgccgatggcgaagcagcactgcgcgtcgcggcggcactcgaatgcgtgcattgctattcactgatccatgacgacctgccggcgatggacgatgatgatctgcgccgcggccagccgaccgtgcacaaggccttcgacgaggcaaccgcgatcctggccggcgacgccttgctgacgctggccttcgacatcgtcgccagcgaggcgaccgtcctgccggcggatcggcgagcggccttggtgctggcgcttgcccgtgcggccggagccggcggcatggtcggtggccagaagctcgacctcgaagccgagcagacaccgcccgacgaagcgggcatcataacgctgcaggcgatgaagaccggcgccctgatccgcttcgcctgcgaggccggcgccatcatcgccggcgctccggccgaggaccgcgaaaggctggccgagttcggctcggccatcggccttgccttccagcttgccgacgacctgctcgatttgaccgccgacgccggccagatgggcaaggcgaccggcaaggacgccgccgccggcaagggaacgctggtggcgttgcatggcgcgaattgggcgcacagccagttgcacggccttgtcgggcaggcccacgcgctgctcgacccctatggcgaccgggcggcgctgctgaaggaggctgcgaccttcgtcgcgacgcgcaacagttga

SEQ ID NO: 57270 - protein, 305 aa, Mesorhizobium loti MAFF303099
MTNDDEMAFEMALIRRAAAVEVLLRRLLDDRPLSGEIARPDRLMAAMRHGVLNGGKRLRPFLVMESAALFSADGEAALRVAAALECVHCYSLIHDDLPAMDDDDLRRGQPTVHKAFDEATAILAGDALLTLAFDIVASEATVLPADRRAALVLALARAAGAGGMVGGQKLDLEAEQTPPDEAGIITLQAMKTGALIRFACEAGAIIAGAPAEDRERLAEFGSAIGLAFQLADDLLDLTADAGQMGKATGKDAAAGKGTLVALHGANWAHSQLHGLVGQAHALLDPYGDRAALLKEAATFVATRNS

SEQ ID NO: 57271 - DNA, 1254 bp, Arabidopsis thaliana
  CDS (1)..(1254)
atgatgatgtcatgtcggaatatagacttgggtacgagtgttcttgatcattcttgtagctcttcttcaacaagtcgtcgattcttgtttggcaattcttcgaagaccgtttgtatgattggtggcagaagctgtgttggaaatttggtatttctccggcgagatttggctacttgcagagctgttccggctaaatccaaggagaattctctggtcaacggtattggtcaagatcaaacagtgatgctcaatctgaggcaagagtcacgaaagccaatatctttggaaactctgtttgaggtcgtagctgatgatttgcagaggttgaacgacaatcttttatcgattgttggtgcagaaaatccggttttgatatctgctgctgagcaaatcttcagcgctggtggcaagaggatgagaccgggtttggtattccttgtatcacgagccactgcggaattagcaggcttaaaggaacttacagtagaacatcggcgtttaggtgagatcattgagatgattcacaccgcaagtttgatacacgatgatgtgttagacgaaagtgatatgcgaagaggaagggaaacggttcacgagctattcggaacaagagtagctgtattagctggggatttcatgtttgctcaagcatcatggtacttagcaaatctcgaaaaccttgaagtcattaagctcataagtcaggtgatcaaagattttgcaagcggtgagataaagcaagcatcgagtttattcgattgtgatgtcaagcttgatgactacatgctaaagagttactacaagacagcttcattagtagctgcaagcaccaaaggagcagcaattttcagtaaagtcgaaagcaaggtcgcagagcaaatgtatcagttcgggaagaatctcggtttatcttttcaagtagttgatgacattctggacttcactcagtccacagagcagttaggtaagcctgcagctaatgacctagccaaaggtaacataacggcgccagtgatcttcgcgctagagaatgagccaaggctaagagagatcattgagtctgagttttgtgagcctggatcgcttgaagaagcgattgaaatagttagaaatcgcggtgggatcaagaaagctcaagaattagcaaaggagaaagctgaacttgcgttaaagaatttgaattgtcttcctaggagtggtttcagatcggctcttgaggatatggtaatgtttaatcttgaaaggattgattag

SEQ ID NO: 57272 - protein, 417 aa, Arabidopsis thaliana
MMMSCRNIDLGTSVLDHSCSSSSTSRRFLFGNSSKTVCMIGGRSCVGNLVFLRRDLATCRAVPAKSKENSLVNGIGQDQTVMLNLRQESRKPISLETLFEVVADDLQRLNDNLLSIVGAENPVLISAAEQIFSAGGKRMRPGLVFLVSRATAELAGLKELTVEHRRLGEIIEMIHTASLIHDDVLDESDMRRGRETVHELFGTRVAVLAGDFMFAQASWYLANLENLEVIKLISQVIKDFASGEIKQASSLFDCDVKLDDYMLKSYYKTASLVAASTKGAAIFSKVESKVAEQMYQFGKNLGLSFQVVDDILDFTQSTEQLGKPAANDLAKGNITAPVIFALENEPRLREIIESEFCEPGSLEEAIEIVRNRGGIKKAQELAKEKAELALKNLNCLPRSGFRSALEDMVMFNLERID

SEQ ID NO: 57273 - DNA, 1044 bp, Arabidopsis thaliana
  CDS (1)..(1044)
atgactacactcaatctatcaatttttccatcagttaaaatatccagctccgcatccatacccggattcatcaaaatccaacctttccttctccgtcggaagctctctaccgttttatcggtcaccgccagagacgaaggtatcatccacaaccatttcgatttcacgtcatacatgatcggaaaagctaatgccgtcaatgaagctctcgactccgccgtctcgctccgagaaccaatcaagatccatgaagcgatacgttactcgcttctcgccagaggcaaacgagtgagacccgtgctctgtatcgcagcgtgtgagttagtgggcggcgaagaatccgtggcgttaccggcggcgtgcgccgtggaaatgatccacacaatgtcgttgatccacgacgatcttccatgtatggataacgacgatctccgccgcggaaaaccaacgaaccacaaagttttcggtgaagacgtcgcggttttagccggagacgcgcttatatcgttcgcgtttgagcacttagcaacgtcaacggctgtttctccggctagagttgttcgagcaatcggagagttagcgaaagccattggatcaaaagggctcgtggcgggtcaagtagtggatctaaccagtggaggaatggaccaaaacgacgtcggcttagaggttcttgagtttatccacgttcataaaaccgccgtgttgttagaggcggctacggtgttaggagccatcgttggtggtggttctgatgaagaagttgagaagctgagaagattcgcgagatgcattggattgttgtttcaggtggtggacgatattttggacgtgacgaagtcgtcggaggaattgggaaagaccgccggaaaagatctgattgccgataagctgacgtatccgaaactaatgggtcttgagaaatctaaagactttgcagataagttgttgagcgatgctcacgaacagcttcatgggtttgattcgagtagagttaaacctttactagctttggctaattacattgccaaaagacagaattag

SEQ ID NO: 57274 - protein, 347 aa, Arabidopsis thaliana
MTTLNLSIFPSVKISSSASIPGFIKIQPFLLRRKLSTVLSVTARDEGIIHNHFDFTSYMIGKANAVNEALDSAVSLREPIKIHEAIRYSLLARGKRVRPVLCIAACELVGGEESVALPAACAVEMIHTMSLIHDDLPCMDNDDLRRGKPTNHKVFGEDVAVLAGDALISFAFEHLATSTAVSPARVVRAIGELAKAIGSKGLVAGQVVDLTSGGMDQNDVGLEVLEFIHVHKTAVLLEAATVLGAIVGGGSDEEVEKLRRFARCIGLLFQVVDDILDVTKSSEELGKTAGKDLIADKLTYPKLMGLEKSKDFADKLLSDAHEQLHGFDSSRVKPLLALANYIAKRQN

SEQ ID NO: 57275 - DNA, 855 bp, Arabidopsis thaliana
  CDS (1)..(855)
atgcggctctcgacgtttcgatctgtaccgctccgagaacccctcacggtccaggaagccgtgcggtactcattgctagcgggcggaaaacgtgtgaggcctctgctctgcattgctgtctgcgagcttgtgggaggcgacgaggctactgccatgtcagctgcttgcgcggtcgagatgatccacacaagctctctcattcatgacgatcttccgtgcatggacaatgccgacctccgtagaggcaagcccaccaatcacaaggtatttggagaagacatggcggttttggccggtgatgcgcttcttgctttggcgtttgagcacatgacggttgtgtcgagtgggttggtcgcttccgagaggatgatccgggcagtggttgagctggcaagggccatagggacaaaagggttagtggcagggcaagtggttgacctaagcagcgaaagattgaatccacacgacgttggattggagcgtctagagttcatccacctccacaaaacggcggcgttgttggaggcagcagcggttataggtgccataatgggaggtggaacagaggaagagatcgaaaagcttagaaagtatgctaggtgtattggactattgtttcaggttgttgatgatattcttgacgtaacaaaatctacagaggaattgggaaagactgcaggaaaagacgtaatggctggaaagctgacgtatccaaggctgataggtttggagagatccagggaagttgcggagaaactgagcagagaagccgaggagcagcttctagggtttgagtctgacaaggcggcgcctctggtagctcttgctagctacatttcttgcagaaacgactga

SEQ ID NO: 57276 - protein, 284 aa, Arabidopsis thaliana
MRLSTFRSVPLREPLTVQEAVRYSLLAGGKRVRPLLCIAVCELVGGDEATAMSAACAVEMIHTSSLIHDDLPCMDNADLRRGKPTNHKVFGEDMAVLAGDALLALAFEHMTVVSSGLVASERMIRAVVELARAIGTKGLVAGQVVDLSSERLNPHDVGLERLEFIHLHKTAALLEAAAVIGAIMGGGTEEEIEKLRKYARCIGLLFQVVDDILDVTKSTEELGKTAGKDVMAGKLTYPRLIGLERSREVAEKLSREAEEQLLGFESDKAAPLVALASYISCRND

SEQ ID NO: 57277 - DNA, 1083 bp, Arabidopsis thaliana
  CDS (1)..(1083)
atggctactactgttcatctcagctcatcctccctcttcagccaatccagaggaagaagagacaactccatatcttccgtcaagagtctccgaaaacgcaccgttttatctctctcttctgccctcacctcacaagacgcagggcacatgattcaaccagagggaaaaagcaacgataacaactctgcttttgatttcaagttgtatatgatccgcaaagccgagtctgtaaatgcggctctcgacgtttccgtaccgcttctgaaaccccttactatccaagaagcggtcaggtactctttgctagcgggcggaaaacgtgtgaggcctctgctctgcattgccgcttgtgagcttgtggggggcgacgaggctactgccatgtcagccgcttgcgcggtcgagatgatccacacaagctctctcattcatgacgatcttccgtgcatggacaatgccgacctccgtagaggcaagcccaccaatcacaaggtatatggagaagacatggcggttttggcgggtgatgcactccttgcattggcgtttgagcacatgacggttgtgtcgagtgggttggtcgctcccgagaagatgattcgcgccgtggttgagctggccagggccatagggactacagggctagttgctggacaaatgatagacctagccagcgaaagattgaatccagacaaggttggattggagcatctagagttcatccatctccacaaaacggcggcattgttggaggcagcggcagttttaggggttataatgggaggtggaacagagcaagaaatcgaaaagcttagaaagtatgctaggtgtattggactactgtttcaggttgttgatgacattctcgacgtaacaaaatctactgaggaattgggtaagacagccggaaaagacgtaatggccggaaagctgacgtatccaaggctgataggtttggagggatccagggaagttgcagagaaactgaggagagaagcagaggaacagcttctagggtttgatccaagtaaggcggcgcctttggtggctcttgccagctacattgcttgcagacacaactga

SEQ ID NO: 57278 - protein, 360 aa, Arabidopsis thaliana
MATTVHLSSSSLFSQSRGRRDNSISSVKSLRKRTVLSLSSALTSQDAGHMIQPEGKSNDNNSAFDFKLYMIRKAESVNAALDVSVPLLKPLTIQEAVRYSLLAGGKRVRPLLCIAACELVGGDEATAMSAACAVEMIHTSSLIHDDLPCMDNADLRRGKPTNHKVYGEDMAVLAGDALLALAFEHMTVVSSGLVAPEKMIRAVVELARAIGTTGLVAGQMIDLASERLNPDKVGLEHLEFIHLHKTAALLEAAAVLGVIMGGGTEQEIEKLRKYARCIGLLFQVVDDILDVTKSTEELGKTAGKDVMAGKLTYPRLIGLEGSREVAEKLRREAEEQLLGFDPSKAAPLVALASYIACRHN

SEQ ID NO: 57279 - DNA, 1035 bp, Arabidopsis thaliana
  CDS (1)..(1035)
atggaaaatcgagaagtttttgtttacattgtcatctccatcttccgctctctccaattcttgttttggagattccgtccacgttacaatgatgttacgtctgcgttgacccgccctctgacttcggccgcaagctatgattttaagttcatgtcgtatatggtcaataaggctaagtccgtcaataaagcactagaagaggctgttcctctccgcgagccagaactcaagatccgtgaggccatgaggtacacgcttctctccgatgggaagcgtgtaagaccaatgctttgcttagctgcatgcgagctcgtggggggacaagagtcaaccgcaatgtccgctgcatgtgcgattgagatgctccacgcgtcgtctctcatcctagacgacctcccttgtatggacaacgacagcctccgacgtggaaaacccactaaccatatagtctttggcgagagtatagccatattagcttctcaagcgctcatagctttggctgtccaaaagaccacgtcatccacctttgcggacgttcccccagagaggattctcaagaccgttcaggagatggttaaagcagtggaagggcttgttgcaggtcaacaggcggatttggctggagaaggtatgagatttgatagtgacactggattagagcatcttgagtttatacatattcataaaacggcggcgttgcttgaagccgcagctgttatgggagctataatgggaggtgggtctgatgaagagattgagaggcttcggagttacgcaagatgtattgggttaatgtttcaggttgtggacgatgtgcttgatgtgaccaaatcgtcggaagagctcgggaaaaccgccggtaaagatttgatcgccggaaaactgacgtatccgagactgatgggagtggagaaatcgaaagaatatgctgagagattgaacatagaagcgcgggaacatcttctagggtttgatatagacaaggtggctcctttggtgtctctcgctgattacattgtcaacagacaaaactga

SEQ ID NO: 57280 - protein, 344 aa, Arabidopsis thaliana
MENREVFVYIVISIFRSLQFLFWRFRPRYNDVTSALTRPLTSAASYDFKFMSYMVNKAKSVNKALEEAVPLREPELKIREAMRYTLLSDGKRVRPMLCLAACELVGGQESTAMSAACAIEMLHASSLILDDLPCMDNDSLRRGKPTNHIVFGESIAILASQALIALAVQKTTSSTFADVPPERILKTVQEMVKAVEGLVAGQQADLAGEGMRFDSDTGLEHLEFIHIHKTAALLEAAAVMGAIMGGGSDEEIERLRSYARCIGLMFQVVDDVLDVTKSSEELGKTAGKDLIAGKLTYPRLMGVEKSKEYAERLNIEAREHLLGFDIDKVAPLVSLADYIVNRQN

SEQ ID NO: 57281 - DNA, 1074 bp, Arabidopsis thaliana
  CDS (1)..(1074)
atggctactactctcagctcatcctctctcttcatccaattcagaggacggagatacaactccctatcatcattcaacaatctccaaaagcgcaccgttttgtcgctttcttgtgctctatcctcacaaggtggagacatgattccaccagagggaaaaagcaatgatcgcaactctgcctttgacttcaagtcgtatatgatccgtaaagccgaatccgtaagtgcggctctcaacgtttcggtacctctccaagaaccactcacgatacaagaggcggtgcggtactcattactagcgggcggaaaacgtgtgaggcctctcctctgcattgctgcttgtgagctcgtgggtggcgacgaggctactgccatgtcagccgcttgtgcagtcgagatgatccacacgagctcgctaatccatgacgacctcccgtgcatggacgatgccgacctccgtagaggcaagcccaccaaccataaagaatttggagaagacatggcggttttggcgggtgatgcactccttgctttagcgtttgagcacatgacgttcgtgtcaaatgggttggttgcccctgagaggatgatccgtgctgtaatggagctggcaaaggccatagggacaaaagggctagtggctgggcaagtgactgacttatgtagccaaggattgaatccagacgacgtcggattggagcgtctagagttcatccacctccacaaaacggccgccttgttggaggcagcggcagttttaggagccataatgggaggtggaacagaggaagagatcgaaaagctaagaaaatatgcgagatgtattgggctgttgtttcaggtggttgatgatattcttgacgtaacggaatctactaaggaattgggcaagacagccggaaaagatgtaatggccgggaagctgacgtatccaaggctgataggcttggagagatccagggaagttgcggagaaactgagaagagaagcagcggaacagcttctagggtttgattccgacaaggcggcgcctcttgtggctcttgctagctacattgcctgcagacacaactga

SEQ ID NO: 57282 - protein, 357 aa, Arabidopsis thaliana
MATTLSSSSLFIQFRGRRYNSLSSFNNLQKRTVLSLSCALSSQGGDMIPPEGKSNDRNSAFDFKSYMIRKAESVSAALNVSVPLQEPLTIQEAVRYSLLAGGKRVRPLLCIAACELVGGDEATAMSAACAVEMIHTSSLIHDDLPCMDDADLRRGKPTNHKEFGEDMAVLAGDALLALAFEHMTFVSNGLVAPERMIRAVMELAKAIGTKGLVAGQVTDLCSQGLNPDDVGLERLEFIHLHKTAALLEAAAVLGAIMGGGTEEEIEKLRKYARCIGLLFQVVDDILDVTESTKELGKTAGKDVMAGKLTYPRLIGLERSREVAEKLRREAAEQLLGFDSDKAAPLVALASYIACRHN

SEQ ID NO: 57283 - DNA, 1083 bp, Arabidopsis thaliana
  CDS (1)..(1083)
atggctaatactgttcatctcagctcatcctctctcttcatccaaaccagaggacgaaaatacaactccatattatcattcaacaatctccaaaaacgcactgttttgtctctctcttgtgctctcacctcacaaggcggcaaagacatgattccaccaaaaggaaaaagcaatgatcgcaactttgcctttgacttcaagtcttatatgatccgtaaagccgaatctgtaagtatggctctcaacgtttcagtacctccccaagatcccctcgcaatccaagaggcggtgcggtactcattactagcgggcggaaaacgtgtgcgacctctgctctgcattgctgcctgtgagcttgtgggaggcgacgaggctactgccatgtcagccgcttgcgcggttgagatgatccacacgagctctctaatccatgacgaccttccgtgcatggacgatgccgacctccgtagaggcaagcccaccaaccacaaggtatttggagaacacatggcggttttggcgggcgatgcactccttgctttggcgtttgagcacatgacggttgtgtcaagtgggttggttgctcctgagaggatgatccgttctgtaactgagctggcaaaggccatcgggacaaaagggttagtggctgggcaagtgagtgacttatgtagccaaggattgaatccatatgacgtcgggttggagcgtctagaattcatccacctacacaaaacggccgccttgttggaggcagcggcggttttaggagctataatcggaggtggaacagaggaagagatccaaaagctaagaaagtatgggagatgtattgggcttttgtttcaggtagttgatgatattattgatgtaacagaatctactgaggaattgggtaagacagccggaaaagacgtaatggcaagaaagctgacgtatccaaggctgataggtttggagagatccagggaagttgcagagaaactgagaagagaagcagcggaacagcttctagggtttgattccaataaggtggcgcctctggtggctcttgctagctacattgcttgcagacacaactga

SEQ ID NO: 57284 - protein, 360 aa, Arabidopsis thaliana
MANTVHLSSSSLFIQTRGRKYNSILSFNNLQKRTVLSLSCALTSQGGKDMIPPKGKSNDRNFAFDFKSYMIRKAESVSMALNVSVPPQDPLAIQEAVRYSLLAGGKRVRPLLCIAACELVGGDEATAMSAACAVEMIHTSSLIHDDLPCMDDADLRRGKPTNHKVFGEHMAVLAGDALLALAFEHMTVVSSGLVAPERMIRSVTELAKAIGTKGLVAGQVSDLCSQGLNPYDVGLERLEFIHLHKTAALLEAAAVLGAIIGGGTEEEIQKLRKYGRCIGLLFQVVDDIIDVTESTEELGKTAGKDVMARKLTYPRLIGLERSREVAEKLRREAAEQLLGFDSNKVAPLVALASYIACRHN

SEQ ID NO: 57285 - DNA, 885 bp, Vibrio cholerae O1 biovar eltor str. N16961
  CDS (1)..(885): transl_table=11
atgattgaggcgttatcctcataccaacagcgaaataaccagcaactggatcagtggctgaaccgtattccctttcaaaccttgcctttaatcgaggcgatgcgttacgggctactgctcggcggcaaacgggcacggccatatttggtgtacatcacggggcaaatgctcggctgtgagcttagcgacttagacactcctgcctcagccgtggagtgtattcacgcctattcgctgatccatgatgatttgcccgccatggatgatgatgagctgcgccgcggcaagcccacttgccatatccagtttgatgaggccaccgccattttgaccggcgacgccctgcaaaccttggcgtttactattttggcggaaggcgatctttctgctgcaggcgaaacacagcgcgtcgccatgctccaagctcttgccgaagcttctggcgcacaaggcatgtgccttggtcaagcgttagatctggcggcggaaaatcgcttaatttcgctagaggaattggaaaccattcatcgcaataaaaccggcgctttaatgcgctgcgcgatccgtttaggtgctttagccgcaggtgaaaaaggccgcgccatgctaccgcatcttgatcgctatgcagaagcggttggcctcgcgtttcaggttcaagatgacattctcgatatcattagcgataccgaaacccttggtaaaccacagggttctgaccaagaattaaataaaagtacctaccctgctcttttaggcttagaaggagcacaacaaaaagcacacactctgttacaagaagcgcttctggctttagaagcaattccctacaatacggagcatctggaagagttcgcccgatatgtcgtcgagcgcaagaactaa

SEQ ID NO: 57286 - protein, 294 aa, Vibrio cholerae O1 biovar eltor str. N16961
MIEALSSYQQRNNQQLDQWLNRIPFQTLPLIEAMRYGLLLGGKRARPYLVYITGQMLGCELSDLDTPASAVECIHAYSLIHDDLPAMDDDELRRGKPTCHIQFDEATAILTGDALQTLAFTILAEGDLSAAGETQRVAMLQALAEASGAQGMCLGQALDLAAENRLISLEELETIHRNKTGALMRCAIRLGALAAGEKGRAMLPHLDRYAEAVGLAFQVQDDILDIISDTETLGKPQGSDQELNKSTYPALLGLEGAQQKAHTLLQEALLALEAIPYNTEHLEEFARYVVERKN

SEQ ID NO: 57287 - DNA, 885 bp, Bacillus halodurans C-125
  CDS (1)..(885): transl_table=11
gtgagtgtacaactgttacaatttttagatgaaattaaagacatcatcgaagagcggatgcctgcacatattgaacgactaaattctcctgacatgctgaaaaattctatgctttactccttgaaggcaggaggaaaacgaattcgaccagcgctgctattggcaacgatgaaaagttttcaaaaggatatttcacaggggattgaccttgcctgtgcgattgagatgattcatacgtactcgctcattcatgatgacctcccatcgatggatgatgatgatattcgccggggaaaaccgacgaaccataaagtgttcggagaagctcatgccattcttgcaggggatgcattattaacgtacagctttgagattgtggccaaaatgaaaggtgttgacccggccaaaacactctgcttgatcgaagagcttgcaagggctgctggaccagaaggaatggtaggcggacaagtagctgatatcgaaggagaaaatcaaaaactaacggtcgagggacttgaatatatccaccatcataaaacaggggcgcttctctcgttcgccattgttgcaggggcaaggcttgcggatgcatctgaacaagatattgagaacatacgtagattttcaagagaattaggcttactctttcaaataaaagatgatattttagatgttgaaggggatcaagctgccattggtaaaccagttggaagcgatgatggaaatcaaaaaagcacctatccaagcctattaaccctcgaaggggcaaaagagaagcttcacttgcatactttgctggcaaaggaatatttatatagtgttcaaatgaaccatcgcttattagaggaattaacggattatgtcgtgaatcgtaaccattag

SEQ ID NO: 57288 - protein, 294 aa, Bacillus halodurans C-125
MSVQLLQFLDEIKDIIEERMPAHIERLNSPDMLKNSMLYSLKAGGKRIRPALLLATMKSFQKDISQGIDLACAIEMIHTYSLIHDDLPSMDDDDIRRGKPTNHKVFGEAHAILAGDALLTYSFEIVAKMKGVDPAKTLCLIEELARAAGPEGMVGGQVADIEGENQKLTVEGLEYIHHHKTGALLSFAIVAGARLADASEQDIENIRRFSRELGLLFQIKDDILDVEGDQAAIGKPVGSDDGNQKSTYPSLLTLEGAKEKLHLHTLLAKEYLYSVQMNHRLLEELTDYVVNRNH

SEQ ID NO: 57289 - DNA, 888 bp, Pasteurella multocida subsp. multocida str. Pm70
  CDS (1)..(888): transl_table=11
atgtaccaactttcacaagacttaccccaactccaacaacgtattaatacttttttagcgcaacaattgaatgtggacagcagcccctctcctcttgccgaagccatgcgttacggtgtgctccttggtggtaaacgtatccgtcctttcctagtgtatgcaacaggacgaatgctcggcgcagacttaaaccaactcgattatgccgcggcgagtgtagaagccgttcatgcctattcattaattcacgacgatctccctgcgatggatgatgatcatttacgtcgtggacaaccaacttgccatattgcttttgatcacgccaccgcgattttagccggtgacgcgttgcaagcctttgcttttgaaatattaactcaagcacctgcattgcaagcagagcaaaaacttgcgttggtacaaacgctaagtcaagcagctggtgtaaaaggaatgtgtttggggcaaagtctcgatctgatttctgagcaaaaacacattagcttaatcgaattagaacaaattcaccgcaataaaacgggggcaatgctttccgcagcgattcagcttgggcgaatttgttctccgcattttaaaaatgatacgctagcacagcaattacaacggtattcggaagccattggcttagcctttcaagtacaagacgatattttagatattgaaggcgagagtgacattattggtaaaaccgtgggttctgatttattagcagataaaagcacctaccccaaattattaggcttagcgggtgccaaacaaaaagcgcaagaactgtatcaaaacgcaatcgcggaattagaaagtattccttttgatacaagtgcacttcgtgctatcgctgaatttgtggtaaatagaaaaagttaa

SEQ ID NO: 57290 - protein, 295 aa, Pasteurella multocida subsp. multocida str. Pm70
MYQLSQDLPQLQQRINTFLAQQLNVDSSPSPLAEAMRYGVLLGGKRIRPFLVYATGRMLGADLNQLDYAAASVEAVHAYSLIHDDLPAMDDDHLRRGQPTCHIAFDHATAILAGDALQAFAFEILTQAPALQAEQKLALVQTLSQAAGVKGMCLGQSLDLISEQKHISLIELEQIHRNKTGAMLSAAIQLGRICSPHFKNDTLAQQLQRYSEAIGLAFQVQDDILDIEGESDIIGKTVGSDLLADKSTYPKLLGLAGAKQKAQELYQNAIAELESIPFDTSALRAIAEFVVNRKS

SEQ ID NO: 57291 - DNA, 888 bp, Pseudomonas aeruginosa PAO1
  CDS (1)..(888): transl_table=11
atgatcgcggcctaccaggcgcgctgccaggcgcgcgtcgatgccgccctggacgccctgttcgtcgctccccgcgaagaactgcaacgcctctacgaggccatgcgctacagcgtgatgaacggtggcaagcgggttcgcccgctgctcgcctacgccgcctgcgaggccctcggcggagcgccgcagcgcgccgacgccgcggcctgcgcggtggagctgatccatgcctactcgctggtccacgacgacctgccggcgatggacgacgacgacctgcgccgtggccagccgaccacccaccgggccttcgacgaagccaccgcgatcctcgccgccgacggcttgcaggcgctggccttcgaagtgctcgccgacacccggcgcaatccgcaggaacatgccgtctgtctggaaatgctcacccgcctggcgcgcgccgcaggctccgccggcatggtcggcggccaggcgatcgacctcggctcggtcggcgtggccctcgaccaggcggccctggaagtcatgcaccggcacaagaccggcgcgctgatcgaagccagcgtgcgcctcggcgccctcgccagcggtcgcgccgagcccgcctcgctggccgccctggagcgctacgccgaagcgatcggcctggccttccaggtgcaggacgacatcctcgacgtggaaagcgacaccgccaccctcggcaagacccagggcaaggaccaggcgcacaacaagccgacctatcccgccctgctcggcctggaggccgccaaaggctatgccctggagctgcgcgacctggccctggccgccctcgacggttttccgccgagcgccgacccgctgcgccaactggcccgctacatcgtcgagcgacgcaactga

SEQ ID NO: 57292 - protein, 295 aa, Pseudomonas aeruginosa PAO1
MIAAYQARCQARVDAALDALFVAPREELQRLYEAMRYSVMNGGKRVRPLLAYAACEALGGAPQRADAAACAVELIHAYSLVHDDLPAMDDDDLRRGQPTTHRAFDEATAILAADGLQALAFEVLADTRRNPQEHAVCLEMLTRLARAAGSAGMVGGQAIDLGSVGVALDQAALEVMHRHKTGALIEASVRLGALASGRAEPASLAALERYAEAIGLAFQVQDDILDVESDTATLGKTQGKDQAHNKPTYPALLGLEAAKGYALELRDLALAALDGFPPSADPLRQLARYIVERRN

SEQ ID NO: 57293 - DNA, 846 bp, Campylobacter jejuni subsp. jejuni NCTC 11168
  CDS (1)..(846): transl_table=11
gtgaatttaaaagaactttttatccatcacttagaaaaaaatctacccaaagttgaaagctttcatccttttttcaatgaagctttagcacttatgttaaaagcaggaggaaagcattttcgcgcacaattgcttttaagcgtagtgcaaagcaataaacctgaacttttaaatcaagctttagatgtagctttagctttggaatttatccatacttattcactcatacacgatgatttacccgctatggataatgcggactttagacgaggaattccaaccttacacaaaagctacgatgaaactacagccatcttagtaggtgatgctttaaataccgaagcttttttagttctaagtcatgctcatttaaaagatgaaatcaaaatcaaactcatcaaaacccttgcctttaatgcaggacttaatggaatggtcataggacaagctattgattgtttttttgaagacaaaagactgagtttaaatgaacttgagtttttgcatacacataaaaccgcaagattgatcgccgcagctttaaaaatgggttgtgaaatttgcgaacttaacaacgaagaaagcaatcaaatttacaaacttggtttaaaactaggactgatttttcaaatcaatgatgatattatcgatgtaactacaagtcaagaacaaagcggaaagcctaccaacaacgatattcataaaaattcttttgtcaatttgcttggacttgaacaagccataaaaacaaaagaaaatcttcttagtgaatgcgaacaagacttagaaaaacttaatgaaaaactcgcacaaatgatacaaaatttaataattcaatacttataa

SEQ ID NO: 57294 - protein, 281 aa, Campylobacter jejuni subsp. jejuni NCTC 11168
MNLKELFIHHLEKNLPKVESFHPFFNEALALMLKAGGKHFRAQLLLSVVQSNKPELLNQALDVALALEFIHTYSLIHDDLPAMDNADFRRGIPTLHKSYDETTAILVGDALNTEAFLVLSHAHLKDEIKIKLIKTLAFNAGLNGMVIGQAIDCFFEDKRLSLNELEFLHTHKTARLIAAALKMGCEICELNNEESNQIYKLGLKLGLIFQINDDIIDVTTSQEQSGKPTNNDIHKNSFVNLLGLEQAIKTKENLLSECEQDLEKLNEKLAQMIQNLIIQYL

SEQ ID NO: 57295 - DNA, 900 bp, Escherichia coli O157:H7 EDL933
  CDS (1)..(900): transl_table=11
atggactttccgcagcaactcgaagcctgcgttaagcaggccaaccaggcgctgagccgttttatcgccccactgccctttcagaacactcccgtggtcgaaaccatgcagtatggcgcattattaggtggtaagcgcctgcgacctttcctggtttatgccaccggtcatatgttcggcgttagcacaaacacgctggacgcacccgctgccgccgtagagtgtatccacgcttactcattaattcatgatgatttaccggcgatggatgatgacgatctgcgtcgcggcttgccgacctgccatgtgaagtttggcgaagcgaacgcgattctcgctggcgacgctttacaaacgctggcgttctcgattttaagcgatgctgatatgccagaagtgtcggatcgcgacagaatttcgatgatttctgaactggcgagcgccagcggtattgccggaatgtgtggtggtcaggcgttggatttagacgcggaaggcaaacacgtacctctggacgcgcttgagcgtattcatcgtcataaaacaggcgcattaattcgcgccgccgttcgccttggtgcattaagcgccggagataaaggacgtcgtgctctaccagtactcgacaagtacgcagagagcatcggccttgccttccaggttcaggatgacatcctggatgtggtgggagatactgcaacgttgggaaaacgtcagggtgccgaccagcagcttggcaaaagtacctaccctgcactcctgggtcttgagcaagcccggaagaaagcccaggatctgatcgacgatgcccgccagtcgctgaaacaactggctgaacagtcgatcgatacttcggcactggaagcgctagcggactacatcatccagcgtaataaataa

SEQ ID NO: 57296 - protein, 299 aa, Escherichia coli O157:H7 EDL933
MDFPQQLEACVKQANQALSRFIAPLPFQNTPVVETMQYGALLGGKRLRPFLVYATGHMFGVSTNTLDAPAAAVECIHAYSLIHDDLPAMDDDDLRRGLPTCHVKFGEANAILAGDALQTLAFSILSDADMPEVSDRDRISMISELASASGIAGMCGGQALDLDAEGKHVPLDALERIHRHKTGALIRAAVRLGALSAGDKGRRALPVLDKYAESIGLAFQVQDDILDVVGDTATLGKRQGADQQLGKSTYPALLGLEQARKKAQDLIDDARQSLKQLAEQSIDTSALEALADYIIQRNK

SEQ ID NO: 57297 - DNA, 876 bp, Streptococcus pneumoniae TIGR4
  CDS (1)..(876): transl_table=11
atgaaaaagcaagaaaaattagctcttgtcgagtcggctttggaagatttttatggagaccagcagtttgcctctagtttacgggagtctgttctctattctattcatgctggtggcaagcgtattcggccttttctcttgttagaagttctggaagccttgcaggttaccatcaaacctgctcacgcgcaggtagctactgccttagagatgattcatacagggagcttgattcacgatgaccttcctgctatggatgatgacgattatcgaagagggcggttaaccaatcacaagaaattcggtgaagctatggccattttggctggagatgccttattcttagactcatatgccttgattgcgcaggcagatttgccaagtcagattaaggtggacttgattgccaacttatcccttgcttcaggtagtctgggtatggtagcagggcaagttttggatatggagggcgaacaccagcacttgtctttggaagaacttcagactattcatgccaataagactgggaagttactagcctatcccttccaagcggcagctattatagctgaattgtcacctgaaatgcaggtgaagctgaaaactgtgggtgaattgattggacttgcttttcaagtcagagatgatgtactggatgtgacagctagttttgaggaaatcggcaagacacctcaaaaggatctgcaggcagaaaaatcaacctatcctgccctgttgggcttggaagagtccattgccttttgtaaccaaaccctggatcaagctaatgaaaaattagaagaaattgcccagcagcttccctttgaaacagaatcgattgtaagtgtagtagaaagtttgagaatcaatggctaa

SEQ ID NO: 57298 - protein, 291 aa, Streptococcus pneumoniae TIGR4
MKKQEKLALVESALEDFYGDQQFASSLRESVLYSIHAGGKRIRPFLLLEVLEALQVTIKPAHAQVATALEMIHTGSLIHDDLPAMDDDDYRRGRLTNHKKFGEAMAILAGDALFLDSYALIAQADLPSQIKVDLIANLSLASGSLGMVAGQVLDMEGEHQHLSLEELQTIHANKTGKLLAYPFQAAAIIAELSPEMQVKLKTVGELIGLAFQVRDDVLDVTASFEEIGKTPQKDLQAEKSTYPALLGLEESIAFCNQTLDQANEKLEEIAQQLPFETESIVSVVESLRING

SEQ ID NO: 57299 - DNA, 915 bp, Agrobacterium tumefaciens str. C58
  CDS (1)..(915): transl_table=11
atggacgctcagatgacgaatttcgaaacgcggctgcgcgaaaacgcggcgaaaaccgaagcgctgcttggccacctgctttccggcgaggcgcgcgcggacgagatcacacgcccgcaaaacctgctagaggccatgcgccatggcgtgctgaacggcggcaaacgcctgcggccttttcttgtcatcgagagtgtcgcccttctgggcggagatgccgaagccggcctccacgtcggcgcagcactcgaatgcctccattgttattcgcttgtccatgacgatctgccagccatggacgacgacgacctgcgccgtggccagccgaccgtgcaccgcaaattcgacgaggcaaccgccatcctcgccggtgacagcctgctgacgcttgctttcgacataatcgcctcggatgacaatccgctggcggccgagcgcaaggccgccctcgttatctcgctcgcgcgtgccgccggtattggtggcatggctggcgggcaggcccttgatctcgctgccgaaaagaaagcgcccgacgaggatggcattattacattgcaggctatgaaaaccggtgccttgctgcgtttcgcctgtgaggccggcgcgatcattgccggcagcaatcaagccgaaaggcagcgactgcgcctcttcggcgaaaagattggcctttccttccagcttgccgacgatcttctggatctgaccgccgatgccgccaccatgggcaaggcgaccggcaaggatgccgcacgcggcaagggcacgctggtggccttacgcggcgaagcatgggcacgcgaaaagcttcaggagcaggtggcggaagccagcgaactcctcgccccctacggcgaaaaggccgcgattctcatcgcggccgcaagattcatcgccgaacggaaaagctga

SEQ ID NO: 57300 - protein, 304 aa, Agrobacterium tumefaciens str. C58
MDAQMTNFETRLRENAAKTEALLGHLLSGEARADEITRPQNLLEAMRHGVLNGGKRLRPFLVIESVALLGGDAEAGLHVGAALECLHCYSLVHDDLPAMDDDDLRRGQPTVHRKFDEATAILAGDSLLTLAFDIIASDDNPLAAERKAALVISLARAAGIGGMAGGQALDLAAEKKAPDEDGIITLQAMKTGALLRFACEAGAIIAGSNQAERQRLRLFGEKIGLSFQLADDLLDLTADAATMGKATGKDAARGKGTLVALRGEAWAREKLQEQVAEASELLAPYGEKAAILIAAARFIAERKS

SEQ ID NO: 57301 - DNA, 915 bp, Sinorhizobium meliloti 1021
  CDS (1)..(915): transl_table=11
atgaaagacgagagatcatcctttccggcgcgcctcaagaccaacgcggtcgcggtcgaagcgctgctcgagacattgctcggtccggccgtgggcacgggcgaaatcgcccgcccggcaaacctgctcggagccatgcgccatggcgtgctcaacggcggcaagcggctgcggccttttctcgtcgccgaaagcacggccctcctcggcggcgatgcggaagcggcgctcagaacaggcgccgcgctcgaatgcatccactgctattcgctcgtccatgacgacctcccggccatggacgacgacgacatgcgccgcggaaagccgacggtgcacgtcgccttcgacgaggcgacggcgatccttgcgggcgacagcctgctgaccttcgccttcgacatcgtcgcggcgccggaaacggcgctctccgaccgtcagaagacgacgctcgtgctggcgctcgcgcgcgccgcggggcatgggggcatggccggcggtcaggcgctcgacctagccgccgaaaagagcgcccccgacgaagcgggcatcgtcctcttgcagtcgatgaagacaggtgccctcatccgcttcgcctgcgaggcgggcgcgatcatcgccgatgcgccggcagaggaccgccgacggctgcgcgccttcggggacaagatcggcctcgccttccagcttgccgacgacctgctcgacctcaccgccgatgccgcaatcgtcggcaaggcgaccggcaaggatgccgcacgggggaagggcacgcttgtctccctgcatggccagccctgggccgagcggcggctcgaaagcctggtggccgaggcggaaggcctgctcgaaccctacggaccacgctcggcgatccttgccgaaaccgcccgcttcatcgccaaccgcaggaactga

SEQ ID NO: 57302 - protein, 304 aa, Sinorhizobium meliloti 1021
MKDERSSFPARLKTNAVAVEALLETLLGPAVGTGEIARPANLLGAMRHGVLNGGKRLRPFLVAESTALLGGDAEAALRTGAALECIHCYSLVHDDLPAMDDDDMRRGKPTVHVAFDEATAILAGDSLLTFAFDIVAAPETALSDRQKTTLVLALARAAGHGGMAGGQALDLAAEKSAPDEAGIVLLQSMKTGALIRFACEAGAIIADAPAEDRRRLRAFGDKIGLAFQLADDLLDLTADAAIVGKATGKDAARGKGTLVSLHGQPWAERRLESLVAEAEGLLEPYGPRSAILAETARFIANRRN

SEQ ID NO: 57303 - DNA, 930 bp, Nostoc sp. PCC 7120
  CDS (1)..(930): transl_table=11
atggtagcagctgataacctccggaagatgtcagaggaagccaaatttaatctagtagcttatcttaaagagcggcaaaaactttgtgaagctgctttggatgcagccatacctattatttatccagaaaaaatttatgaatcaatgcgctactctctattagctggaggtaagcgcctgcgtccgattctttgtctggctacctcggaaatgatgggtgggacaatcgaaatagctatgccaacagcttgtgctgtagaaatgatccacaccatgtctttgattcacgacgacttgccagcaatggataacgacgattatcgtcgcggtatgctgacgaatcacaaggtatatggtgaagatattgcgattttggcgggagatggcttattagcctacgcttttgagttcgtagctatccgtactcctgaaagcgtacctagagaccgagtattgcaggtagtagcccgtttaggacgagcattgggagctgctggcttggttgggggtcaagtggttgacttagactcagaaggaaaatcagatacttccttagaaacactcaattttattcataatcacaaaacagcagctcttttagaagcttgtgtagtctgtggcggcattttagctggggcatcatcagaaaatgtacaaagactctcacgatattctcaaaatattgggctagcatttcaaatcattgatgatattcttgatatcacttctactcaagagcaattaggcaagactgcgggtaaagaccttttagcgaagaaagttacctatcctagcctgtggggaattgaacaatcgcgcgtcaaagcccaacagctaattgaggcagcttgtacagaactagaaccatttggagaagatgcacagcccctgaaagcgatcgctcacttcatcactagtcgtaatcactaa

SEQ ID NO: 57304 - protein, 309 aa, Nostoc sp. PCC 7120
MVAADNLRKMSEEAKFNLVAYLKERQKLCEAALDAAIPIIYPEKIYESMRYSLLAGGKRLRPILCLATSEMMGGTIEIAMPTACAVEMIHTMSLIHDDLPAMDNDDYRRGMLTNHKVYGEDIAILAGDGLLAYAFEFVAIRTPESVPRDRVLQVVARLGRALGAAGLVGGQVVDLDSEGKSDTSLETLNFIHNHKTAALLEACVVCGGILAGASSENVQRLSRYSQNIGLAFQIIDDILDITSTQEQLGKTAGKDLLAKKVTYPSLWGIEQSRVKAQQLIEAACTELEPFGEDAQPLKAIAHFITSRNH

SEQ ID NO: 57305 - DNA, 900 bp, Ralstonia solanacearum GMI1000
  CDS (1)..(900): transl_table=11
atgagcgatttcgcccactggatggcctccgtcgttgcacggacggaaagcgcgctcgaacgcgccctgcccggcgaatcggtcgcgccgcagcgcctgcatgcggcgatgcgctatgccacgctgggggcgggcaagcgggtccgccccctgctcgcgcatgctgccggggcgctgggcgaggcatcgcccgaggcgctggacggcgtgagctgcgcggtggagatgatccacgcctattcgctggtccacgacgacatgccctgcatggacgacgatgacctgcgccgaggtcgcccgacggtgcatcgcgcctatgatgaagcgacggcgctgctggtcggcgacgctttgcagacccaggccttcatcgcgctggccgagctgggcgcggtgagcccggccacgcgcgccggactggtcggcgagttggcgcgcgcgtcgggttcgctcggcatggcgggcgggcaggcgatcgatctgcagagcgttggcgtggccctgtcgcaggatgcgctggagaccatgcaccgcatgaagaccggcgcgctgctgcgggcaagcctgcgcatgggcgccctgtgcgccggcgtgaatgccgcggcgctggaacaggtggacgcctacgcgggcgcggtcggactggcgttccaggtggtcgacgacattctcgacgtgacggccgacaccgccacgctgggcaagaccgccggcaaggacgaggccaacgacaagccgacctatgtgtcgatcctcggcctggagcgcgcgcgggcgctggccgatgcgttgcatgccgcggcgggcgcggcggtggcgcagctgtcccgcgaactgggtgaagcgcgcaccgccaggctggccgggatggccgacctgatcgtgtggcgtggccactga

SEQ ID NO: 57306 - protein, 299 aa, Ralstonia solanacearum GMI1000
MSDFAHWMASVVARTESALERALPGESVAPQRLHAAMRYATLGAGKRVRPLLAHAAGALGEASPEALDGVSCAVEMIHAYSLVHDDMPCMDDDDLRRGRPTVHRAYDEATALLVGDALQTQAFIALAELGAVSPATRAGLVGELARASGSLGMAGGQAIDLQSVGVALSQDALETMHRMKTGALLRASLRMGALCAGVNAAALEQVDAYAGAVGLAFQVVDDILDVTADTATLGKTAGKDEANDKPTYVSILGLERARALADALHAAAGAAVAQLSRELGEARTARLAGMADLIVWRGH

SEQ ID NO: 57307 - DNA, 1008 bp, Agrobacterium tumefaciens str. C58
  CDS (1)..(1008): transl_table=11
ttgccgtcttcaaggcgagtccggtcacgctgttgcgccttcggaatcacgaaaaggtttgcctgcattcgtccggcatgccaaagagcgcgcatggacgctcagatgacgaatttcgaaacgcggctgcgcgaaaacgcggcgaaaaccgaagcgctgcttggccacctgctttccggcgaggcgcgcgcggacgagatcacacgcccgcaaaacctgctagaggccatgcgccatggcgtgctgaacggcggcaaacgcctgcggccttttcttgtcatcgagagtgtcgcccttctgggcggagatgccgaagccggcctccacgtcggcgcagcactcgaatgcctccattgttattcgcttgtccatgacgatctgccagccatggacgacgacgacctgcgccgtggccagccgaccgtgcaccgcaaattcgacgaggcaaccgccatcctcgccggtgacagcctgctgacgcttgctttcgacataatcgcctcggatgacaatccgctggcggccgagcgcaaggccgccctcgttatctcgctcgcgcgtgccgccggtattggtggcatggctggcgggcaggcccttgatctcgctgccgaaaagaaagcgcccgacgaggatggcattattacattgcaggctatgaaaaccggtgccttgctgcgtttcgcctgtgaggccggcgcgatcattgccggcagcaatcaagccgaaaggcagcgactgcgcctcttcggcgaaaagattggcctttccttccagcttgccgacgatcttctggatctgaccgccgatgccgccaccatgggcaaggcgaccggcaaggatgccgcacgcggcaagggcacgctggtggccttacgcggcgaagcatgggcacgcgaaaagcttcaggagcaggtggcggaagccagcgaactcctcgccccctacggcgaaaaggccgcgattctcatcgcggccgcaagattcatcgccgaacggaaaagctga

SEQ ID NO: 57308 - protein, 335 aa, Agrobacterium tumefaciens str. C58
MPSSRRVRSRCCAFGITKRFACIRPACQRARMDAQMTNFETRLRENAAKTEALLGHLLSGEARADEITRPQNLLEAMRHGVLNGGKRLRPFLVIESVALLGGDAEAGLHVGAALECLHCYSLVHDDLPAMDDDDLRRGQPTVHRKFDEATAILAGDSLLTLAFDIIASDDNPLAAERKAALVISLARAAGIGGMAGGQALDLAAEKKAPDEDGIITLQAMKTGALLRFACEAGAIIAGSNQAERQRLRLFGEKIGLSFQLADDLLDLTADAATMGKATGKDAARGKGTLVALRGEAWAREKLQEQVAEASELLAPYGEKAAILIAAARFIAERKS

SEQ ID NO: 57309 - DNA, 915 bp, Brucella melitensis 16M
  CDS (1)..(915): transl_table=11
atggaaaagctgcctgtcgatttcaccactcttcttaaccgccgcgccatggaagtagaagctgcccttgccggtcttctggacgaacgcccgcgcaccggcgagattgcccgtccgcagcgtctcatcgccgccatgcgccatggcgtactgaacggcggcaagcgcctgcgcccgtttctcgtcctcgaaagtgctgcccttttcggacagtacggccaggcggtgctgcgcgtcgctgccgcgctggaatgtatccattgctattcgctggtccatgacgatctgccagccatggatgatgacgatctgcgccggggccagccaaccgtgcacaaggcctttgatgaggcagccgccattctggccggtgatagcctgctgacctacgccttcgacattatcgcatccgatgaaacggaactcgacgccaccacccgcataaagcttgtttgcgcgctcacgcgcgcttccggccttggcggcatggcaggcggacaggcgctcgacctgatggcggaaaccagaaaaccggacgaggcaggcatcatcacgcttcaagccatgaagaccggcgcgctgatccgctttgcctgcgaggcgggcgctatcatcgctggcgcatcgcaggaagaccgggagcgcatggcggaattcggctcggcaatcggcctggccttccagcttgccgacgatcttctggacgtgaccgccgacgctggcaccatgggcaaggcaaccggcaaggatgccgccgccggaaaagccacgctggtttcacttcacggcattgactggacccgccagcagctttcaggcctcgtcgcacaggccgaaagcctgctcgcaccctttggagaagacgccgaacccctcaagcaagcggcccgcttcatcgccgagcggcagaattaa

SEQ ID NO: 57310 - protein, 304 aa, Brucella melitensis 16M
MEKLPVDFTTLLNRRAMEVEAALAGLLDERPRTGEIARPQRLIAAMRHGVLNGGKRLRPFLVLESAALFGQYGQAVLRVAAALECIHCYSLVHDDLPAMDDDDLRRGQPTVHKAFDEAAAILAGDSLLTYAFDIIASDETELDATTRIKLVCALTRASGLGGMAGGQALDLMAETRKPDEAGIITLQAMKTGALIRFACEAGAIIAGASQEDRERMAEFGSAIGLAFQLADDLLDVTADAGTMGKATGKDAAAGKATLVSLHGIDWTRQQLSGLVAQAESLLAPFGEDAEPLKQAARFIAERQN

SEQ ID NO: 57311 - DNA, 894 bp, Fusobacterium nucleatum subsp. nucleatum ATCC 25586
  CDS (1)..(894): transl_table=11
atgaatgatttccaagtttatttaaaagaaaaaactgatttttttgaaactgaattaaaaaaagaattaaaagaactttcctatcctgaaactattgctaagggtatggaatatgctattttaaatggtggaaagagattaagaccttttttactttttgtaacattagaattgttaaatgagaatataaataaaggtgtaaaatctgcaatagcattagagatgatacattcatattctcttgttcatgatgatttgccagctcttgacaatgatgattataggagagggaaattaacaacacataaagtttttggtgaagcagagggaatacttataggagattcacttttaacttatgctttttatgttctttctcagaaaaatttagaattgttgtcttctaaacagattgtgaatattatttcaaaaacttctgaatatgcaggaatagatggaatgataggtggacagatgatagatattcaaagtgaaaacaaaaaaatagatttggaaactttaaaatacattcatagtcataaaacaggaaagcttattaaacttcctattgagatagcttgtatcattgctaatttagaaaaagataaaagagaagttttagaagaatatgcagatttaattggtttggcttttcaagttaaagatgatattctggatgttgaaggaacttttgaagatttaggaaaacctgtgggcagtgatgttgatttacataaggctacttatccaagtattttagggatggaagaaagtaaaaaaattttaaataatactgttgaaaaagctaaggaaattattaaaaataaatttggagaagaaaaaggaaaagttttaatttctcttgcagattttataaaagatagaaaaaaataa

SEQ ID NO: 57312 - protein, 297 aa, Fusobacterium nucleatum subsp. nucleatum ATCC 25586
MNDFQVYLKEKTDFFETELKKELKELSYPETIAKGMEYAILNGGKRLRPFLLFVTLELLNENINKGVKSAIALEMIHSYSLVHDDLPALDNDDYRRGKLTTHKVFGEAEGILIGDSLLTYAFYVLSQKNLELLSSKQIVNIISKTSEYAGIDGMIGGQMIDIQSENKKIDLETLKYIHSHKTGKLIKLPIEIACIIANLEKDKREVLEEYADLIGLAFQVKDDILDVEGTFEDLGKPVGSDVDLHKATYPSILGMEESKKILNNTVEKAKEIIKNKFGEEKGKVLISLADFIKDRKK

SEQ ID NO: 57313 - DNA, 975 bp, Methanosarcina mazei Go1
  CDS (1)..(975): transl_table=11
gtgatgcttatgacgcttgttgatgaaattaaaaatcgaagttcccatgttgatgctgcaatcgacgaattgcttccggtaacccggcctgaagagctgtataaagcttcccgttacctcgtggacgccggtgggaagcgccttcgtccggcagtcctcatcctggctgctgaagctgtcggttccaatctcaggtctgttttgcccgcagcagtcgcggtggaacttgtgcacaatttcactctgatccatgacgacattatggatagggatgatatccgcaggggaatgcctgcagttcacgtaaaatggggagaagccggagcaattcttgccggcgacaccctttattccaaagccttcgaaatcctctcaaaagtcgaaaacgagcctgtgagggttttaaagtgcatggatgtcctttcaaagacctgcaccgaaatctgcgaaggccagtggctcgatatggatttcgaaacccggaaaaaggttactgaatccgagtaccttgagatggtggaaaagaagacctctgtcctctatgcagccgcagccaaaatcggcgcccttttaggaggggcttctgacgaagttgccgaggctttatccgagtacggacgcctcataggaataggcttccagatgtatgatgacgtccttgatatgaccgcacctgaagaagttcttggaaaggtaaggggcagcgaccttatggaaggaaaatacacccttattgtcataaatgctttcgagaaaggcgtgaagctggatattttcggaaaaggtgaagcaactctcgaagagaccgaagcggcagtcaggactcttacagaatgcgggtctctcgattatgtgaaaaaccttgcaatttcatatatagaagaaggcaaagaaaaactggatgtcctcagggactgtcctgaaaaaacccttctcctgcagattgctgactatatgatctcacgagaatactaa

SEQ ID NO: 57314 - protein, 324 aa, Methanosarcina mazei Go1
MMLMTLVDEIKNRSSHVDAAIDELLPVTRPEELYKASRYLVDAGGKRLRPAVLILAAEAVGSNLRSVLPAAVAVELVHNFTLIHDDIMDRDDIRRGMPAVHVKWGEAGAILAGDTLYSKAFEILSKVENEPVRVLKCMDVLSKTCTEICEGQWLDMDFETRKKVTESEYLEMVEKKTSVLYAAAAKIGALLGGASDEVAEALSEYGRLIGIGFQMYDDVLDMTAPEEVLGKVRGSDLMEGKYTLIVINAFEKGVKLDIFGKGEATLEETEAAVRTLTECGSLDYVKNLAISYIEEGKEKLDVLRDCPEKTLLLQIADYMISREY

SEQ ID NO: 57315 - DNA, 876 bp, Xanthomonas campestris pv. campestris str. ATCC 33913
  CDS (1)..(876): transl_table=11
gtgagcgcggcgttgtttgagcgctgggttgctcgcaccgaacggcagctggacgcctgccttcccagccccgccctcgccccgcagcgtctgcacgcggccatgcgccacgccgtgctcggtggcggcaagcgcatgcgtccgctgttggtctatgcaagcggtgccttgttcggcgccgaagaaggcagcctggatgcgccggcggtggcggtggaactgatccacgcgtattcgctggtgcacgatgacctacccgcgatggacgatgacgcgctgcgtcgcggccaccctacggtgcacatcgccttcgacgaagccactgcgatcctggccggcgatgccttgcaggcacgcgcattcgaactgctggccgaggcaccggcagatgcggcactgcgggtgggctggttgcagagcctggcatctgccgccggtgcggccggcatgtgtggcgggcaggcgctggatatcgacgccaccgggcaggtgcaggcgctggaggcactgcagcgcatgcatgcactcaagaccggtgcgctgatccgcgccgcggtgcgcatgggcgtgctgacaggcggcgcgggtattgccgaccagcagcgcctggatgcgtttgccgacgcgctggggctcgcgttccaggtgcgtgacgacatcctggatgtggaatcaagctccgcccagctcggcaagactgccggcaaggatgcggcgcagtccaagtccacctaccccgccttgctgggcatggacggcgccaaaaccaagctggcggaactggccagccatatgcatgcgctgttgctgccctacggcgaatccggcgccaccttggccagcctcggccgcttcgcggtcgaccgcgcccactag

SEQ ID NO: 57316 - protein, 291 aa, Xanthomonas campestris pv. campestris str. ATCC 33913
MSAALFERWVARTERQLDACLPSPALAPQRLHAAMRHAVLGGGKRMRPLLVYASGALFGAEEGSLDAPAVAVELIHAYSLVHDDLPAMDDDALRRGHPTVHIAFDEATAILAGDALQARAFELLAEAPADAALRVGWLQSLASAAGAAGMCGGQALDIDATGQVQALEALQRMHALKTGALIRAAVRMGVLTGGAGIADQQRLDAFADALGLAFQVRDDILDVESSSAQLGKTAGKDAAQSKSTYPALLGMDGAKTKLAELASHMHALLLPYGESGATLASLGRFAVDRAH

SEQ ID NO: 57317 - DNA, 924 bp, Thermosynechococcus elongatus BP-1
  CDS (1)..(924): transl_table=11
atgatttccgctgatcccccccaagtccatcccgccggcacatttgatctcaaggcctacctcaaagaacgccaagcccttgtggaagctgcccttgaagcctcgattccggtggcctatccggagaaaatttacgatgcgatgcgctattcactgatggcggggggcaagcggctgcgcccgattctctgtttggccacctgtgaactgatggggggcaccgtggaaatggccatgccgactgcctgtgccttggagatgatccatacgatgtcgctcatccacgatgatctaccggccatggacaatgacgactaccgtcgcggcaagcccaccaatcacaaggtctatggtgaagatattgccattctggcgggggatggcttactggcctatgcctttgagtatgtggtggaacaaaccaagaatgtacccgcggagtatctgttgaaaattgtggcgcggttggggcatgcggtggcagcaacgggcttagtcggtggtcaagtggtggacttagagtgtgaaggacagcccgacattggtctggaaacgctgcattttatccactcccacaaaacgggggccctactggaggcctctgtggtgtctggggcattgctgacgggggcgcatgaatctgacgtggcacgcctgtcccgttatgcggcaaatattggcttggcattccagattgtggatgacattttggatattacttcgacccgcgatgtcctcggtaaaaccgttggtaaagatgtggctgcccaaaaaatgacctacccgcgcctgtggggtctggaaaaatctcgccaagaggctgagcgcttggtggcggaggcgaaggcagagttggctgtatatggggcggccgctgttcctttgcaggcgatcgccgactacattaccagccgtagtcattaa

SEQ ID NO: 57318 - protein, 307 aa, Thermosynechococcus elongatus BP-1
MISADPPQVHPAGTFDLKAYLKERQALVEAALEASIPVAYPEKIYDAMRYSLMAGGKRLRPILCLATCELMGGTVEMAMPTACALEMIHTMSLIHDDLPAMDNDDYRRGKPTNHKVYGEDIAILAGDGLLAYAFEYVVEQTKNVPAEYLLKIVARLGHAVAATGLVGGQVVDLECEGQPDIGLETLHFIHSHKTGALLEASVVSGALLTGAHESDVARLSRYAANIGLAFQIVDDILDITSTRDVLGKTVGKDVAAQKMTYPRLWGLEKSRQEAERLVAEAKAELAVYGAAAVPLQAIADYITSRSH

SEQ ID NO: 57319 - DNA, 885 bp, Oceanobacillus iheyensis HTE831
  CDS (1)..(885): transl_table=11
gtgaatgaaaacttacaaagatatttagagatatatcgtgagaaattggaagcaacatataatacttatttttcacatttagatatcccgaataatttaaaagaatccatgctatattcattaaatgcaggcgggaagcgattaaggccaatattaatattggctagctatgaggtatacggaaaaacattagataaagtgatgtcctcagcagttgcaatagaaatgattcatacgtattcacttattcatgatgatttgcctgccatggatgatgatgattatcgtcgaggcaagttaacaaatcacaaacaattcaatgaagcaacagcaatattggctggagatgcattactaacgtatagttttcaattaattagttcagatgacctactaacttctgatgaaaaagtggagttaatacgaatattatctgaagcgagtggaccagctgggatggtcgctggtcaaatattggatatggaagctgaaaaacaagctgttacacttgaagaaatggaagaaattcacgcattaaaaactggagagttaattcggtttgcaattattgctggagcatatcttggtggagcaacagacaatcagttaaaacaccttactgattatgcttattatttaggcttaatttttcaagtgcaggacgatatcttagacataactggagatgcgtcgaagattgggaaaccagtgggtagcgatgaactgaatgaaaaaagcacgtatccgaaattattaggattgcaaggtgctatcgatcagaaaaatctctatgttgaaaaagcctacaaaagtctacatttggctggagcagaagattctctgctcgctgaattgacaaagtatttcagtgagcgtgatcattag

SEQ ID NO: 57320 - protein, 294 aa, Oceanobacillus iheyensis HTE831
MNENLQRYLEIYREKLEATYNTYFSHLDIPNNLKESMLYSLNAGGKRLRPILILASYEVYGKTLDKVMSSAVAIEMIHTYSLIHDDLPAMDDDDYRRGKLTNHKQFNEATAILAGDALLTYSFQLISSDDLLTSDEKVELIRILSEASGPAGMVAGQILDMEAEKQAVTLEEMEEIHALKTGELIRFAIIAGAYLGGATDNQLKHLTDYAYYLGLIFQVQDDILDITGDASKIGKPVGSDELNEKSTYPKLLGLQGAIDQKNLYVEKAYKSLHLAGAEDSLLAELTKYFSERDH

SEQ ID NO: 57321 - DNA, 999 bp, Leptospira interrogans serovar Lai str. 56601
  CDS (1)..(999): transl_table=11
ttggtttgtcggactttgctttacaattggaagttttctttcagttttggagttagagtgaattcatcttccttttccaaaatattccattcttacaaaagtacgtttgaaaattttttaaattctcaaactctttcgatactttctaaacaatctgctcctgaactttttgaagctatgaaatatagtctcgtagccggagggaagcgacttagacccgttttggctttggctgcttttggtggacttcaaaatgaaactcaaaacgttcttttacttggagcttctttggaatgtattcatacttattctttgattcacgacgatcttccaagtatggataacgacgattttagaagggggttgccgactcttcataaaaaattttccgaatctacggcgattttggccggagacgctttaaactctttcgcattttattttatttcttggatccgggttgaaaatggtgatcattttttacataggaatctattagaaattttgcatgcaggttgtggggcacctggaatggtttccggacaagtttatgatttacagatggaaagagaaaatgtgaaagaaaatgattcaacaaaccaatccgataagatagagatgcttcaattgactcaccgtttaaaaacgggagcgttgattaagtcagccttattgttagggaaccgtcttcgtaaagattggaaaaaaagagaaacgtctttatctcaatacggagaagatctaggtttactgtttcagattacagacgatattttagacgtggaaggaactcaggaatctttaggaaaaaccccaggtaaggatcaaaaatctggcaagatcacctatcctatgttattcggaatggatcgttgtaaaaagatggtagaagaacttcagaaaaatctaatttttacttcttctgattttgtttccacagaagaagaacaaacattctttcaggagcttccgatttacattggccagagaaaaaattag

SEQ ID NO: 57322 - protein, 332 aa, Leptospira interrogans serovar Lai str. 56601
MVCRTLLYNWKFSFSFGVRVNSSSFSKIFHSYKSTFENFLNSQTLSILSKQSAPELFEAMKYSLVAGGKRLRPVLALAAFGGLQNETQNVLLLGASLECIHTYSLIHDDLPSMDNDDFRRGLPTLHKKFSESTAILAGDALNSFAFYFISWIRVENGDHFLHRNLLEILHAGCGAPGMVSGQVYDLQMERENVKENDSTNQSDKIEMLQLTHRLKTGALIKSALLLGNRLRKDWKKRETSLSQYGEDLGLLFQITDDILDVEGTQESLGKTPGKDQKSGKITYPMLFGMDRCKKMVEELQKNLIFTSSDFVSTEEEQTFFQELPIYIGQRKN

SEQ ID NO: 57323 - DNA, 888 bp, Pseudomonas putida KT2440
  CDS (1)..(888): transl_table=11
atgattggcacctaccaggccagttgccaggcgcgcgtcgacgcagccctcgaaccgctgttcatcgccccgagcaaagagctggaacgcctttacgccgccatgcgctacagcgtgatgaacggcggcaaacgcgtgcgcccgttgctggcctacgcggcctgcgaagccttgggcgccccggccgaacaggccaacggtgcagcctgcgcggtcgagctgatccatgcttactcgctggtgcatgacgacctcccggccatggacgacgacgacctgcgtcgcggccagccgaccacccacaaggcgtttgacgaagcgtgcgccatccttgctggcgacggtttgcagagcctggctttcagtgccctgctcgacccttgcctgagccctcagatcgacagcattcgcctggccatggttcaggtgctggccaaagctgccggcccggccggcatggttggcggccaggccatcgatctcggttcggtgggccagaagctggaccagcaggcgctggagttcatgcaccggcacaagaccggcgcgctgatcgaagccagcgtacgcctcggcgccctggcaagtgcccgtgccgaaccggtgcagctggatgccctgcaaacttatgcacaggccattggcctggcattccaggtgcaggacgacatcctcgacgtggaaagcgacactgctaccttgggcaaacgccaaggtgcagacatagcgcgtgacaaaccgacctacccggccctgctgggcctggaagccgccaaagcctatgcaatcgaactgcgcgaccaggcgctggccgcactgcaagggttcggcgaaaaggccgagccgctgcgggccttggcgcgttatattgtcgaacgccgtaactaa

SEQ ID NO: 57324 - protein, 295 aa, Pseudomonas putida KT2440
MIGTYQASCQARVDAALEPLFIAPSKELERLYAAMRYSVMNGGKRVRPLLAYAACEALGAPAEQANGAACAVELIHAYSLVHDDLPAMDDDDLRRGQPTTHKAFDEACAILAGDGLQSLAFSALLDPCLSPQIDSIRLAMVQVLAKAAGPAGMVGGQAIDLGSVGQKLDQQALEFMHRHKTGALIEASVRLGALASARAEPVQLDALQTYAQAIGLAFQVQDDILDVESDTATLGKRQGADIARDKPTYPALLGLEAAKAYAIELRDQALAALQGFGEKAEPLRALARYIVERRN

SEQ ID NO: 57325 - DNA, 900 bp, Escherichia coli CFT073
  CDS (1)..(900): transl_table=11
atggactttccgcagcaactcgaagcctgcgttaagcaggccaaccaggcgctgagccgttttatcgccccactgccctttcagaacactcccgtggtcgaaaccatgcagtatggcgcattattaggtggtaagcgcctgcgacctttcctggtttatgccactggtcatatgttcggcgttagcataaacacactggacgcacccgctgccgccgtagagtgtatccacgcttactcattaattcatgatgatttaccggcgatggatgatgacgatctgcgtcgcggtttgccgacctgccatgtgaagtttggcgaagcaaacgcgattctcgctggtgacgctttacaaacgctggcgttctcgattctaagcgatgccgatatgccggaagtgtcagatcgcgacagaatttcgatgatttctgagctggcgagcgccagcggtattgccggaatgtgcggtggtcaggcattagatttagacgctgaaggcaaacacgtacctctggacgcgcttgagcgtattcatcgtcataaaaccggcgcattgattcgcgccgccgttcgccttggtgcattaagcgccggagataaaggacgaaatgcactgccagtactcgacaagtacgcagagagcatcggccttgccttccaggttcaggatgacatcctggatgtggtgggagatactgcaacgttgggaaaacgccagggtgccgaccagcaacttggtaaaagtacctaccctgcacttctgggtcttgagcaagcccggaagaaagcccgggatctgatcgacgatgcccgtcagtcgctgaaacaactgactgaacagtcactcgatacctcggcactggaagcgctagcggactacatcatccagcgtaataaataa

SEQ ID NO: 57326 - protein, 299 aa, Escherichia coli CFT073
MDFPQQLEACVKQANQALSRFIAPLPFQNTPVVETMQYGALLGGKRLRPFLVYATGHMFGVSINTLDAPAAAVECIHAYSLIHDDLPAMDDDDLRRGLPTCHVKFGEANAILAGDALQTLAFSILSDADMPEVSDRDRISMISELASASGIAGMCGGQALDLDAEGKHVPLDALERIHRHKTGALIRAAVRLGALSAGDKGRNALPVLDKYAESIGLAFQVQDDILDVVGDTATLGKRQGADQQLGKSTYPALLGLEQARKKARDLIDDARQSLKQLTEQSLDTSALEALADYIIQRNK

SEQ ID NO: 57327 - DNA, 924 bp, Bradyrhizobium japonicum USDA 110
  CDS (1)..(924): transl_table=11
atgaccggcacgtccccgtccgatttcgccaaacgtctggacaagaccgctgatgataccgaggccctgctcgggcgcctcctcgcggacgacatcctgcccgatgaaatcgcccgtcccaagcgactgatggacgcaatgcgctattcgagcctgaacggcggcaagcgcctgcggccgttcctggtggttgaaagcgcagccgtgttcggcgtgccgcgcgaggcggcgctgctcgccggtgcggcgctcgaatgcatccactgctattcgctgatccatgacgacctgccggcgatggacaattcggacctgcgccggggccggcccaccctgcacaagaagaccgacgacgcgaccgcgatcctcgccggcgacggcctgctgacgctcgccttcgatatcgtcacccgcgacgagatccatcgcgacgccaatgtacggctgctgctgacgcgcgcgctggcgcgctgcgccggcatcggcggcatggtcggtggccagattctcgacctcgcaggcgaaggccgtttcggcggcaacgagccgatcgatgtcgcccgcattcagcagatgaagaccggcgcgctgctgcgctacggctgcatcgccggcgcgattctcggccaggccacggccaaggaatatcaggcgctcgacgattacggccgcgcgctcggcgaagccttccagatcgccgacgatctgctcgacgtcgaaggcgatgccgcggcgctcggcaaaccttcgggccaggatgctgcgctcggcaagaccaccttcgtcacccagctcggcatcgaaggcgccaagcagcgcgtgcgcgacctgctcgcgcgggccgacagcgcggtctcgatcttcggcgaccgcgccgccgtgctgcaagccgccgcgcggttcgtcgccgagcgcaagaactga

SEQ ID NO: 57328 - protein, 307 aa, Bradyrhizobium japonicum USDA 110
MTGTSPSDFAKRLDKTADDTEALLGRLLADDILPDEIARPKRLMDAMRYSSLNGGKRLRPFLVVESAAVFGVPREAALLAGAALECIHCYSLIHDDLPAMDNSDLRRGRPTLHKKTDDATAILAGDGLLTLAFDIVTRDEIHRDANVRLLLTRALARCAGIGGMVGGQILDLAGEGRFGGNEPIDVARIQQMKTGALLRYGCIAGAILGQATAKEYQALDDYGRALGEAFQIADDLLDVEGDAAALGKPSGQDAALGKTTFVTQLGIEGAKQRVRDLLARADSAVSIFGDRAAVLQAAARFVAERKN

SEQ ID NO: 57329 - DNA, 891 bp, Lactobacillus plantarum WCFS1
  CDS (1)..(891): transl_table=11
atgaataagcaattattaactgaatttgaatccaagtggcgtcctcagattaatcagtatttagatgagcagcttcaagcgtgttctgaccaatcaaccctgactgacgccatgcgttattcggtactagcaggtggcaaacggttacggccgttattgacgttagccattttagatacttttgatatcacaacgacggctgcaaacttgcgggcaagtgtggccgttgagttgatgcatacttattcgctaattcacgatgatttaccggcgatggataatgatcagctacgacgtggcgaaccgactaaccatgttaagtttggggaagacgttgccattcttgcaggggatgctttacaaccgttgactttcgaatggattgcggatagtgggttaccggcatcgatcgtcgctaatcaaaccttagcattagcgcaggccaccggacctcgcgggatggtggctggtcaagttgctgatgtccttggagcgggacaacatctggctttgccagccttacaacagctgcatcgcgagaagacgggggcgttaattcactacgctgtccaggcagggttgattcaagctcaagtgcaaccaaccgtgcaggaattgctattacaatatgctgatgcctatggattggcgtttcaaatttacgatgatattttagacgtgacgagtacgcctgctcagttaggaaaagctacgcataaggatgccgatgagcataagaatacgtatccaggtttgctggggcttgcaggcgcacgaacagcgttagaacaagcggtaacagctgctcaaacggcgttagtaaaagctagtgctgctagtcaacgaggcatgggcttgcttgcagcttttctaacgtattttacagattaa

SEQ ID NO: 57330 - protein, 296 aa, Lactobacillus plantarum WCFS1
MNKQLLTEFESKWRPQINQYLDEQLQACSDQSTLTDAMRYSVLAGGKRLRPLLTLAILDTFDITTTAANLRASVAVELMHTYSLIHDDLPAMDNDQLRRGEPTNHVKFGEDVAILAGDALQPLTFEWIADSGLPASIVANQTLALAQATGPRGMVAGQVADVLGAGQHLALPALQQLHREKTGALIHYAVQAGLIQAQVQPTVQELLLQYADAYGLAFQIYDDILDVTSTPAQLGKATHKDADEHKNTYPGLLGLAGARTALEQAVTAAQTALVKASAASQRGMGLLAAFLTYFTD

SEQ ID NO: 57331 - DNA, 873 bp, Streptococcus pyogenes SSI-1
  CDS (1)..(873): transl_table=11
atggacaaattagctagaattgacgaagccattcgtcgctactataagacgactagtaacggtgtatctgaagagttgattgatgctatcttgtattctgttgacagtggtggcaagcgcattcgaccacttatcttattagagatgattgagggatttggggtatcgttacagaatgctcattttgatttggctgcagcccttgaaatgattcatacaggaagtctgattcacgatgatttgccagccatggataatgatgattaccgacgtggtagactgaccaatcacaaacaatttggagaagccacggccattttggcgggagatagcttatttttagacccctttgggttaatagctcaagctgaattaaatagcgaggttaaagtagccttaatccaagaactttccctagcttcaggaacttttggcatggttggtggtcagatgctagatatgaaaggggaaaatcaagctttgagtctccctcagttgtcactgattcacctcaataaaaccggaaaattattaacttttccttttaaagcagcagctcttgtaacagaccaggctattactgttcgtcaacaactagagcaggcgggaatgctcatcgggcacgcctttcagattagggatgatattttagacgtgacagctagctttgaagatcttggaaaaacgcctaaaaaggatttatttgcagaaaaagctacttacccaagtttactggggttagaagcctcctaccaactgttgacagagagtttagatcaggctttgacgatttttcagacactagaaaacgatgtaggctttaagcctcaaataattacaaaactgatagaagggttacgacttaatgcctaa

SEQ ID NO: 57332 - protein, 290 aa, Streptococcus pyogenes SSI-1
MDKLARIDEAIRRYYKTTSNGVSEELIDAILYSVDSGGKRIRPLILLEMIEGFGVSLQNAHFDLAAALEMIHTGSLIHDDLPAMDNDDYRRGRLTNHKQFGEATAILAGDSLFLDPFGLIAQAELNSEVKVALIQELSLASGTFGMVGGQMLDMKGENQALSLPQLSLIHLNKTGKLLTFPFKAAALVTDQAITVRQQLEQAGMLIGHAFQIRDDILDVTASFEDLGKTPKKDLFAEKATYPSLLGLEASYQLLTESLDQALTIFQTLENDVGFKPQIITKLIEGLRLNA

SEQ ID NO: 57333 - DNA, 900 bp, Salmonella enterica subsp. enterica serovar Typhi Ty2
  CDS (1)..(900): transl_table=11
atggactttacgcagcagctacaggcttgcgtaacgcaagcgaatcaggcgctgagccgttttatcgcgccactgccctttcagaacactcccgtggtcgaagccatgcagtatggcgcattattaggcggtaaacgcctgcggccatttctggtttacgccaccggtcaaatgtttggcgtcagtacggcaacgctggatgcgccagctgcggcggtcgaatgcattcatgcctattcgctgatccatgacgacctgccagcaatggacgatgacgatttgcgtcgcggcctgccgacttgccatattaaatttggcgaagccaacgcaatcctggcgggagacgcgttgcaaacgctggcgtttaccattatcagcgacgcgccgatgccggaagtcgccgatcgcgatcgtatcgcgatgatcgccgaactggcaaacgccagcggtatcgccggtatgtgcggcggtcaggcattggatctggcggcagaaggccagcggatcactctggacgcgctggaacgcattcatcgccataagaccggcgcgctcattcgcgccgccgttagacttggcgcgttgagcgcgggcgataaaggacggaatactctgccgatacttgaccgctatgcagagagtatcggccttgccttccaggttcaggatgacattctggatgtggtgggcgatactgcaacgttaggtaaacgtcagggcgcagaccagcagcttggcaaaagtacctaccctgcacttctgggtcttgagcaagcccggaataaagcccgggacctgatagaggacgcccgtcagtcgttacatcagctggccgcgcaatcactggacacctcggcactggaagcgctagcgaactacataatccagcgtgataaataa

SEQ ID NO: 57334 - protein, 299 aa, Salmonella enterica subsp. enterica serovar Typhi Ty2
MDFTQQLQACVTQANQALSRFIAPLPFQNTPVVEAMQYGALLGGKRLRPFLVYATGQMFGVSTATLDAPAAAVECIHAYSLIHDDLPAMDDDDLRRGLPTCHIKFGEANAILAGDALQTLAFTIISDAPMPEVADRDRIAMIAELANASGIAGMCGGQALDLAAEGQRITLDALERIHRHKTGALIRAAVRLGALSAGDKGRNTLPILDRYAESIGLAFQVQDDILDVVGDTATLGKRQGADQQLGKSTYPALLGLEQARNKARDLIEDARQSLHQLAAQSLDTSALEALANYIIQRDK

SEQ ID NO: 57335 - DNA, 882 bp, Enterococcus faecalis V583
  CDS (1)..(882): transl_table=11
atgacgaattttagtcaacagcatttaccgttggttgaaaaagtcatggtcgattttatcgcagaatatactgaaaatgagcgtttgaaagaagcaatgctctactcaatacacgcaggtggcaaacgattacgcccgctattagtgttaacaacagtggccgcttttcaaaaagagatggaaacacaagactatcaagtggctgcctctttagagatgattcatacgtattcattaattcatgatgatttaccagcaatggacgatgatgatttacgtcgtggcaaaccaaccaatcataaagtgtttggtgaagcgactgccattttagcaggggacggcttattaacaggtgcatttcagttgctttctttgagtcaattaggcttaagtgaaaaagttttactgatgcaacaactggcaaaggcagcggggaatcaaggcatggtttccggccaaatgggtgatattgaaggagaaaaagtcagcttgactttagaagagttagcggctgttcatgaaaagaaaaccggagcgctaattgaattcgccttaattgctgggggcgtattagccaatcaaacagaagaagtcattggtttactgacacagtttgcgcatcactatggcttggcttttcaaattcgtgatgacttattagatgccacaagtacagaagcagatttaggtaaaaaagtaggccgagatgaagcgttgaataaaagtacgtatccagctcttctagggattgctggcgcgaaagatgcgctaacacatcaattagcagaaggtagcgctgttttagaaaaaatcaaagcaaatgttcccaacttttcagaagaacatttagcaaacttgttaactcagttacaattgagatag

SEQ ID NO: 57336 - protein, 293 aa, Enterococcus faecalis V583
MTNFSQQHLPLVEKVMVDFIAEYTENERLKEAMLYSIHAGGKRLRPLLVLTTVAAFQKEMETQDYQVAASLEMIHTYSLIHDDLPAMDDDDLRRGKPTNHKVFGEATAILAGDGLLTGAFQLLSLSQLGLSEKVLLMQQLAKAAGNQGMVSGQMGDIEGEKVSLTLEELAAVHEKKTGALIEFALIAGGVLANQTEEVIGLLTQFAHHYGLAFQIRDDLLDATSTEADLGKKVGRDEALNKSTYPALLGIAGAKDALTHQLAEGSAVLEKIKANVPNFSEEHLANLLTQLQLR

SEQ ID NO: 57337 - DNA, 882 bp, Chlamydophila caviae GPIC
  CDS (1)..(882): transl_table=11
atggtcgttatgaacatgttcgaaacttatcgaataatgatagaagctggtattgagtcctctttagaagaatttggttctaaagggttatcggtacgcgcacctgtagagtatgctctaacaagcggcggaaaacgcattcgtcctatgttagtttgtatgattgctaaaggtctggatatgagcagagatgttttagacgccgccttagctatagaatttatacatacatctactttaatagctgatgatcttccttgtatggatgatgatgacgagcgtcgtggacgccctacagtacataaagcttttgatgaggcttcagctttattagcatcttatgctttgattcctgctgcatattctcgcattcgtttaaatgcgaaaaaactcaaatctcagggtgtagatcctaaagaagtcgatattgcttacgatatcatttctgatgttacggataagaattttggtgttaacggagttttgggaggacagtatgaagatatgttctttaaaaatgacggtcctgagtatgtccaatctatcatcaataaaaaaacaggcgctcttttcgaaatagcgtgtgtctctggttggttatttggaggcggtgatcctttatgcgttcctcaaataatcgaattttctcaaacttttggtcttctttttcaaatgaaagatgatattttagacatccaccaagacggtcaagatgtggggctaaattacgctttgttatttggtttagacgctgctaaagatcttttaaactcttctatggataagtgcatgatcttattaaagcatcttaaacaacatgggttgaaggacacttcagaattagaaatgcttatagaatatatgggtattcgagattattaa

SEQ ID NO: 57338 - protein, 293 aa, Chlamydophila caviae GPIC
MVVMNMFETYRIMIEAGIESSLEEFGSKGLSVRAPVEYALTSGGKRIRPMLVCMIAKGLDMSRDVLDAALAIEFIHTSTLIADDLPCMDDDDERRGRPTVHKAFDEASALLASYALIPAAYSRIRLNAKKLKSQGVDPKEVDIAYDIISDVTDKNFGVNGVLGGQYEDMFFKNDGPEYVQSIINKKTGALFEIACVSGWLFGGGDPLCVPQIIEFSQTFGLLFQMKDDILDIHQDGQDVGLNYALLFGLDAAKDLLNSSMDKCMILLKHLKQHGLKDTSELEMLIEYMGIRDY

SEQ ID NO: 57339 - DNA, 1320 bp, Streptomyces rochei
  CDS (1)..(1320): transl_table=11
atgcgtcccacccacgcgaaggaccaccctgtggcctcgccgccgcggccggtcgcggcaacggtggcccagctcccgcgcggcccggtggccggcgacggcgcggggcagggaagggccgaggcgtgcgccacggcgggcggcccgtttccggccggtcccgccgaggtgcggctgatcgacgccgacgtgccgggcgccgtcggccgggtgctcgacgaggcactggcggagcgcctgcgccgcgcgcggacggcggatccactgttcgcacgggacgtggccgaacggatgacgcggttcacccttgagggtggaaagcgcacccgcgcacagttggcgtggtgggcctcgcgggcctgcgccggccgggacgcggccgtcgcggccgcggccctgcaaatcggcgccgccctggaactgctccagacgtgcgcgctcgtccacgacgatgtgatggaccgggccacgctgcgacggggacggcccacgctgcacacagagctggcctcgggccacgaggaccgggtgggccccgagcgggcccggcggttcgggcagtcggcagcggttctcgccggggacctggctctggcctgggccgacgatctggtggcggagacgccgctggcagtgtggaaggccgtggtggtgcgccggctgtggagcgacatgcgcacggagatggtggcgggccagtacctggacctgcacggtcaggccacagcggcacggagcctggcccgcgcgctgcgcgccgcctgcctgaagagcgccctgtactcggtcgagcggcccctggccctgggggcggccgtggccggcgcggacgatgtgacgctgcgccggctgtgcgacgccggacgctgtgccgggatggcgttccagctccgcgacgacctggacgacgtcttcggggatccgctggagacgggcaaggcgagcggcggcgacatccgggagggcaagtcgacctatctggtcgcggtcgcccgcgcccgggccgaggccgccggcgacggcaccgccctcgccgtgctggaccggtggctcggtgacacggccctcaccgagcgcggactggacgaggtgcgggaggtgctcgtggcgacgggcgcgcgcgccaccgtggagaccaagctggaccggctcgccgcgcaggggctgcggcacttcgacggcgccctgctcgacccggaaggcgcggcgccgttgcgggctctgctgctcgcggcggccggggtgctccccggcctagaagccgcctcgcggggccggtacgcgccccttccccgggacggcgcggagagcggcctgtga

SEQ ID NO: 57340 - protein, 439 aa, Streptomyces rochei
MRPTHAKDHPVASPPRPVAATVAQLPRGPVAGDGAGQGRAEACATAGGPFPAGPAEVRLIDADVPGAVGRVLDEALAERLRRARTADPLFARDVAERMTRFTLEGGKRTRAQLAWWASRACAGRDAAVAAAALQIGAALELLQTCALVHDDVMDRATLRRGRPTLHTELASGHEDRVGPERARRFGQSAAVLAGDLALAWADDLVAETPLAVWKAVVVRRLWSDMRTEMVAGQYLDLHGQATAARSLARALRAACLKSALYSVERPLALGAAVAGADDVTLRRLCDAGRCAGMAFQLRDDLDDVFGDPLETGKASGGDIREGKSTYLVAVARARAEAAGDGTALAVLDRWLGDTALTERGLDEVREVLVATGARATVETKLDRLAAQGLRHFDGALLDPEGAAPLRALLLAAAGVLPGLEAASRGRYAPLPRDGAESGL

SEQ ID NO: 57341 - DNA, 954 bp, Rhodopirellula baltica SH 1
  CDS (1)..(954): transl_table=11
gtgagcgtgcaagcgtcgggggatcgtcgtgaacaaccgatcgattccaatgaatcattgaaggactacatggacgctcgccgaccggcggtggaagcggcattgcaagctgcgtgcgaagaccggccgggtgtccccgagcgtctggccgcggcgattcgatacgcggtactggcgcccggcaaacggctccgtccgatgctgacgatcatggccgcggaagcttgcggtggcgatgcggaatcggcaatgccgtcggctgtcgcggtcgaaatgattcatgcttattcgttgattcacgatgacttgccagcgatggatgacgacgatttgcggcgtggtcgaccgacgacgcacatcgaattcgacgaagcgacggcaatcttggctggcgatgccctgcaatcgatggcatttgctcacctgcaccacagcacatcggacgccaccaaatcagccgctctgatcggcacattggcgaccgccgccggaccggccgggttggtcgggggccaagcggacgacttggatgccgagaagtacaccgtcgaggacttcgggggggcggatgctgccctcaaacacctcgaagcaatccaccaccgcaaaacgggggctctgtttacagcctgtgcggcgatgggcgcaatttccgccggagcggatactaatgctgtttcggccttgaccgattacgctaaagcgtttggactcgcgtttcaaatcacggatgatttacttgattgcacgtccacggatgagcgacttggtaaacgaacgggcaaagacgacggccgtggcaagctgacttacccggggttgatgggtctggaccgggcgagagcccacgcggaaagcaccatccacatggcgcacgaatcgttgcagttgttcggaacagctggccagcggttaagaaaactggcggactttgtcttggagcgtacgaattga

SEQ ID NO: 57342 - protein, 317 aa, Rhodopirellula baltica SH 1
MSVQASGDRREQPIDSNESLKDYMDARRPAVEAALQAACEDRPGVPERLAAAIRYAVLAPGKRLRPMLTIMAAEACGGDAESAMPSAVAVEMIHAYSLIHDDLPAMDDDDLRRGRPTTHIEFDEATAILAGDALQSMAFAHLHHSTSDATKSAALIGTLATAAGPAGLVGGQADDLDAEKYTVEDFGGADAALKHLEAIHHRKTGALFTACAAMGAISAGADTNAVSALTDYAKAFGLAFQITDDLLDCTSTDERLGKRTGKDDGRGKLTYPGLMGLDRARAHAESTIHMAHESLQLFGTAGQRLRKLADFVLERTN

SEQ ID NO: 57343 - DNA, 903 bp, Wigglesworthia glossinidia endosymbiont of Glossina brevipalpis
  CDS (1)..(903): transl_table=11
atgaataattttttattatctttaacaaagattcagaatcatattaatttaattttaaaaaaatatttaaatattttttctaaaaaaaatatgaatttaactttagctatgaaatacgcattattaaatggcggtaagagattgagagcatttctagtatattgcataggaaaaatgcttaacgtttcttcaaataatttagattgtatagcggcttcaatagaatgcattcatgcatattcattaattcatgacgatttgccatctatggataatgatagatttcgtagaggtcgtgaatcttgtcatgtaaaatttaatgaatacatcgctatattagctggagattcattgcaatctttagcttttaatatattatctactgtaaatatgccagatgtatctgtaaataatagaatgaaaatgatttctatactttcatatgcatctggagctaaaggaatgtgtttaggacaatctttagatttagaaaatcaaggatcattgatatctattaaacaattggaagaaatttataaatacaaaacaagctttttaatttatgctgcaactagaatgacaatactatctagtaatataaaaaataaaaaaatattaataaatttaataaaatattctaaatcaataggtttagcgtttcaaattcaagatgatattttaaatgtaattggatcaaaaaaaattactggaaaatgtcaaggatcggataaaaaattaaataaaaatacttattcaagtttaattggaataaaattatctaaagaaaaagcatttaatttatataaaaaatcattatcttatttagaatatattaatgaattaggttataatactgaatcactaataaaattagcgcattatattataataagaaataagtaa

SEQ ID NO: 57344 - protein, 300 aa, Wigglesworthia glossinidia endosymbiont of Glossina brevipalpis
MNNFLLSLTKIQNHINLILKKYLNIFSKKNMNLTLAMKYALLNGGKRLRAFLVYCIGKMLNVSSNNLDCIAASIECIHAYSLIHDDLPSMDNDRFRRGRESCHVKFNEYIAILAGDSLQSLAFNILSTVNMPDVSVNNRMKMISILSYASGAKGMCLGQSLDLENQGSLISIKQLEEIYKYKTSFLIYAATRMTILSSNIKNKKILINLIKYSKSIGLAFQIQDDILNVIGSKKITGKCQGSDKKLNKNTYSSLIGIKLSKEKAFNLYKKSLSYLEYINELGYNTESLIKLAHYIIIRNK

SEQ ID NO: 57345 - DNA, 912 bp, Bordetella pertussis Tohama I
  CDS (1)..(912): transl_table=11
atgaagcaaagtcatctcgcctgcgccgactggctgcgggaacgcgcgcagcatgtcgagcacgtgctcgacgaattgctgcctggcgccgatatcgctcccacgcggctgcacgaagccatgcgctatgcggtgctgggcggcggcaagcgggtgcgcgcggccctggtctacgcggccgggcaggcctgccccgtcaacggcagcacgctggccgtcggggcgtcgatggaccgcgccgccgcggccgtcgagctgatccacgcctattcgctggtgcacgacgacctgccgtgcatggacgacgacacgctgcgccgcggccggcccacggtgcatgtgcaattcgacgaggccacggccatgctggccggcgatgccctgcagcctctggccttcgaactgctggccggcatgccgatcgcgcccgcgctggtggtgcaggccgcccaggtcctggcgcgcgccgccggcagccagggcatggccggcgggcaggccatcgacctgcacagcgtgggccgcatgctcacgcgcgacgaactgcagaccatgcacagcatgaagaccggcgccatgctggcgtgcagcgtgacgctgggaggcatcgtggccggcgccagctcgaccgcgcgccaggcgctcgacagctacgcgcaggcgatcggcctggcgttccaggtcgtcgacgatatcctcgatgtgacggccgacaccgccagcctgggcaagacggccggcaaggatgcggccgacaacaagccgacctatgtatccttgctgggcctggagcaggcccgcgcgctggcgcaggagttgcgccaggcggcccaccaggctctggcgccgctgggcgagtccggcgcgcggctgggccaactggcagatttcatcgtactcagagaccgctga

SEQ ID NO: 57346 - protein, 303 aa, Bordetella pertussis Tohama I
MKQSHLACADWLRERAQHVEHVLDELLPGADIAPTRLHEAMRYAVLGGGKRVRAALVYAAGQACPVNGSTLAVGASMDRAAAAVELIHAYSLVHDDLPCMDDDTLRRGRPTVHVQFDEATAMLAGDALQPLAFELLAGMPIAPALVVQAAQVLARAAGSQGMAGGQAIDLHSVGRMLTRDELQTMHSMKTGAMLACSVTLGGIVAGASSTARQALDSYAQAIGLAFQVVDDILDVTADTASLGKTAGKDAADNKPTYVSLLGLEQARALAQELRQAAHQALAPLGESGARLGQLADFIVLRDR

SEQ ID NO: 57347 - DNA, 912 bp, Bordetella parapertussis 12822
  CDS (1)..(912): transl_table=11
atgaagcaaagtcatctcgcctgcgccgactggctgcgggaacgcgcgcagcatgtcgagcacgtgctcgacgaattgctgcctggcgccgatatcgctcccacgcggctgcacgaagccatgcgctatgcggtgctgggcggcggcaagcgggtgcgcgcggtcctggtctacgcggccgggcaggcctgccccgtcaacggcagcacgctggccgtcggggcgtcgatggaccgcgccgccgcggccgtcgaactgatccacgcctattcgctggtgcacgacgacctgccgtgcatggacgacgacacgctgcgccgcggccggcccacggtgcatgtgcaattcgacgaggccacggccatgctggccggcgatgccctgcagccgctggccttcgaactgctggccggcatgccgatcgcgcccgcgctggtggtgcaggccgcccaggtcctggcgcgcgccgccggcagccagggcatggccggcgggcaggccatcgacctgcacagcgtgggccgcatgctcacgcgcgacgaactgcagaccatgcacagcatgaagaccggcgccatgctggcgtgcagcgtgacgctggggggcatcgtggccggcgccagctcgaccgcgcgccaggcgctcgacagctacgcgcaggcgatcggcctggcgttccaggtcgtcgacgatatcctcgatgtgacggccgacaccgccagcctgggcaagacggccggcaaggatgcggccgacaacaagccgacctatgtatccttgctgggcctggaccaggcccgcgcgctggcgcaggagttgcgccaggcggcccaccaggccctggcgccgctgggcgagtccggcgcgcggctgggccaactggcagatttcatcgtactcagagaccgctga

SEQ ID NO: 57348 - protein, 303 aa, Bordetella parapertussis 12822
MKQSHLACADWLRERAQHVEHVLDELLPGADIAPTRLHEAMRYAVLGGGKRVRAVLVYAAGQACPVNGSTLAVGASMDRAAAAVELIHAYSLVHDDLPCMDDDTLRRGRPTVHVQFDEATAMLAGDALQPLAFELLAGMPIAPALVVQAAQVLARAAGSQGMAGGQAIDLHSVGRMLTRDELQTMHSMKTGAMLACSVTLGGIVAGASSTARQALDSYAQAIGLAFQVVDDILDVTADTASLGKTAGKDAADNKPTYVSLLGLDQARALAQELRQAAHQALAPLGESGARLGQLADFIVLRDR

SEQ ID NO: 57349 - DNA, 921 bp, Prochlorococcus marinus str. MIT 9313
  CDS (1)..(921): transl_table=11
atgaacgagacaaggttcatggcggcggcggtcagcaccttcttcgacttccctgcttatttggctgcggccaaagccagcgttgaagaggcattggatgattcgcttggccctgagcgccctgagcaactcagggaggccatgcgctactcccttttggcgggtggtaagcgtttacgccccatcctttgcctagcagcttgcgaacttgctggaggtgaaccggcagaggctctgccgacagcagtggctttggaaatgattcacacgatgtcgctgattcatgacgatctccccgccatggataacgacgatttacgccgcggtcgtcccaccaatcacaaggtttatggcgatgctgttgccattctcgcgggtgatgcgctgcttacacgttctttcgagatggttgccttgcgcagtccgggagtacccccagagcggctgttgaaggttgttggcgagctttctctcgttgctggtgctcctggtttggtgggggggcaggttgtggatctggagtgtgagggcaaagaggtggatctggagactttggagttcattcatctccataagaccggggccttgttgagtgcttgtgtgatctgcggagcattgattggtggagcagaagacgatttgattgatgcactacgcatctatgcgagagggattggtttggcgtttcagatcattgatgacatccttgatgtgacagcgagcagtgatgttcttggcaaaactgctggcaaggatctgcttgctgataagaccacctatcccaaattgttgggtttagacgaatcccgccggcgagcagaactccttgtgagcgaagccaaggcagcactagagccttggcaagcttctgctgcacctttgctggcactagccgattacatcaccagccgcgatcgatga

SEQ ID NO: 57350 - protein, 306 aa, Prochlorococcus marinus str. MIT 9313
MNETRFMAAAVSTFFDFPAYLAAAKASVEEALDDSLGPERPEQLREAMRYSLLAGGKRLRPILCLAACELAGGEPAEALPTAVALEMIHTMSLIHDDLPAMDNDDLRRGRPTNHKVYGDAVAILAGDALLTRSFEMVALRSPGVPPERLLKVVGELSLVAGAPGLVGGQVVDLECEGKEVDLETLEFIHLHKTGALLSACVICGALIGGAEDDLIDALRIYARGIGLAFQIIDDILDVTASSDVLGKTAGKDLLADKTTYPKLLGLDESRRRAELLVSEAKAALEPWQASAAPLLALADYITSRDR

SEQ ID NO: 57351 - DNA, 897 bp, Chromobacterium violaceum ATCC 12472
  CDS (1)..(897): transl_table=11
atggccaatgaaagcttcatcggctggatgacctccatccagcaatacatggaacaggcgctggaaaagttgctgccgtcggctgactgcgccccgcaacggctccatgaagcgatgcgctacgcgacgctggagggcggcaagcgcgtgcgcccgctgctggtgttcgccgccggcgagctggtcggcgcgcaagcggacaatctggcccgcatcggcgcggcgctggaaatggtccatgcttactcgctggtccacgacgacatgccctgcatggacaacgacgtgctgcgccgcggcaagcccacctgtcacatcgcctacgatgacgccaccgcgctcctggtcggcgacgcgctgcagacccgcgccttcgagctgatctcccagcccatgccggacatcgcgccggccagccagctggaaatggtccgcgcgctggcccacgccgccggccacgccggcatggcgggcggccaggcgatagacctggccagcgtcggcctgccgctgacgctgccggagctggaattcatgcacatgctgaagaccggcgcgctgatccgcgccgcggtgttggcgggttccatggcgggccgcgagctgtccgccgcagagaaggaggcgctcgacgccttcgccaagcgcatcggcctggccttccaggtggtggacgacattctggactgcgaggcggacaccgcgacgctgggcaagaccgccggcaaggacgccgccaacgacaaacccacctacgtcagcctgctgggcctcgccgaagccaagcggatggcgaaggatttgcacgaccaggccttcgccgcgctggagggcttcggcccgcaggccgaccgcctgaaacaactggccgactacatcgtcgcccgctcgttttga

SEQ ID NO: 57352 - protein, 298 aa, Chromobacterium violaceum ATCC 12472
MANESFIGWMTSIQQYMEQALEKLLPSADCAPQRLHEAMRYATLEGGKRVRPLLVFAAGELVGAQADNLARIGAALEMVHAYSLVHDDMPCMDNDVLRRGKPTCHIAYDDATALLVGDALQTRAFELISQPMPDIAPASQLEMVRALAHAAGHAGMAGGQAIDLASVGLPLTLPELEFMHMLKTGALIRAAVLAGSMAGRELSAAEKEALDAFAKRIGLAFQVVDDILDCEADTATLGKTAGKDAANDKPTYVSLLGLAEAKRMAKDLHDQAFAALEGFGPQADRLKQLADYIVARSF

SEQ ID NO: 57353 - DNA, 888 bp, Gloeobacter violaceus PCC 7421
  CDS (1)..(888): transl_table=11
atgtcacagttcgacctcgacgcttacctgcgccagtgccgctcgcaggtggaagccgccctcgaccgctatttgccccagcagtacccggacaagctctacgaagcgatgcgctattcgctgctggcgggaggcaagcgcctgcggccgattttgtgcctgaccagctgccggatgtccggcggcagtgcggatttggcgatgcccaccgcctgcgccttggagatggtgcacaccatgtcgctcatccacgacgacctgcccgccatggacgacgacgactaccgccggggcaagctcaccaaccacaaagtctacggcgaggacatggccatcctggcgggcgacgccctgctcgcctacgcctttcaactgatcgccgagaaaaccgtgggggcgcagcccgagcgcgtcgtcgaggtgctcggccgtctgggcaaagcggcgagcggcgccggtctggtgggaggccaggtggtcgatctcgaatcggaaggccggacaatcaccctcgaaaccctcgaatacatccacacccacaagaccggtgccttgctcgaggtctcggtgatctccggcgccatcctggccggggccgacggcggggtcgtcgagcggttgacccgctacagccgctgcatcggactggccttccaaatccgcgacgatctgctcgacatcaccgccacccaggctgaactgggcaagaccgccggtaaggacttgcgcgaccgcaaggcgacctacccgagcctgctgggctacgacggcgcgcgcgaccgcgccgagcagttgcgggagcaggcggtggcggaactggcggattttggggcatcggcgcgaccgctgaccgcccttgccgaatttatcgtgcaacggcgccattaa

SEQ ID NO: 57354 - protein, 295 aa, Gloeobacter violaceus PCC 7421
MSQFDLDAYLRQCRSQVEAALDRYLPQQYPDKLYEAMRYSLLAGGKRLRPILCLTSCRMSGGSADLAMPTACALEMVHTMSLIHDDLPAMDDDDYRRGKLTNHKVYGEDMAILAGDALLAYAFQLIAEKTVGAQPERVVEVLGRLGKAASGAGLVGGQVVDLESEGRTITLETLEYIHTHKTGALLEVSVISGAILAGADGGVVERLTRYSRCIGLAFQIRDDLLDITATQAELGKTAGKDLRDRKATYPSLLGYDGARDRAEQLREQAVAELADFGASARPLTALAEFIVQRRH

SEQ ID NO: 57355 - DNA, 918 bp, Photorhabdus luminescens subsp. laumondii TTO1
  CDS (1)..(918): transl_table=11
atgtctgaacaaaattcaacccaatttaaagaacagcttaaaatctgtcaacaacgagtcaataacgttctgataagcacactatcttcagtggcatttgcaaacaacccactagttcatgcaatgcaacatggtactttactcggtggtaaacgcctgcgcccatttttagtttatgccgttggtgaaatgtttggattatccgcaaataatctggatgctccagcagcagccgttgaatgtatccacgccttttcattaattcatgacgatttaccggcgatggataacgatgatttacgccgtggacaaccaacctgccacataaaatttggtgaagctcacgcgattctagcgggagatgcattacaggctctggcgtttgaaatcctatctaaaagagaaatgccggatgttacaacagcagatcgccttgaaatggttgctgaattggcaaccgccagtggtatagccggtatgtgtggtggccaagccctagacttggccgctgaaggcagacacattgatctccatatgctggaacaaattcatcgccataaaacaggtgcgcttattcgttgcgccgtcagaatgggcgcatatggtgcaggccaaagtgggcatgacgccctgcctgaattggatcaatatgcccaagcgattggtctcgcattccaagttcaggacgatattcttgatgtcattggcgataccgaaatgataggaaaacgtcaaggcagtgaccaacagctaggaaaaagcacttaccccgcattactagggttagaacaagcacagaaaaaagcatacgaactgtatcaagaagccttaaaagctttgaataaactggaagataaatcctataacacaacaatgctgcgcgcacttgccagctttattattgaacgtaataactaa

SEQ ID NO: 57356 - protein, 305 aa, Photorhabdus luminescens subsp. laumondii TTO1
MSEQNSTQFKEQLKICQQRVNNVLISTLSSVAFANNPLVHAMQHGTLLGGKRLRPFLVYAVGEMFGLSANNLDAPAAAVECIHAFSLIHDDLPAMDNDDLRRGQPTCHIKFGEAHAILAGDALQALAFEILSKREMPDVTTADRLEMVAELATASGIAGMCGGQALDLAAEGRHIDLHMLEQIHRHKTGALIRCAVRMGAYGAGQSGHDALPELDQYAQAIGLAFQVQDDILDVIGDTEMIGKRQGSDQQLGKSTYPALLGLEQAQKKAYELYQEALKALNKLEDKSYNTTMLRALASFIIERNN

SEQ ID NO: 57357 - DNA, 927 bp, Rhodopseudomonas palustris CGA009
  CDS (1)..(927): transl_table=11
atggccaccggcacttccacgatcgactttgccaagcggctcgacactaccgccgaggaaaccgaagcgctgctcggccggctgttgtccgacgaattgatgtccgacgagatcgcccggccgcgccggctgatggacgcgatccgctactccacgctcggcggcggcaagcggctgcggccgttcctggcggtcgagagcgccgcagtgttcggcatcgatcgtgccgccgcgctcttggtcggcgccgcgctggagtgcatccactgctactcgctgatccacgacgacctgccttcgatggacaacagcgatctgcgccgcggccgtccgacgctgcacaaggcctatgacgacgccactgcgatcctcgccggcgacgcgctgctgaccttcgcgttcgacatcgtcacccgcgacgaagtgcacaacgatccgacggtgcggctgctgctgacacgagtgctggcgcgctgcgccgggctcggcggcatggtcggcggccagatgcttgatcttgccggcgaaggccggttcggcgaccgcgagccggtcgacgtcgcgcggctgcagcagatgaagaccggcgccctgctccgctacggctgcgtcgccggcgcgatcctcggccaggcaagccccgaccagtatcgcgcgctcgacgattacggccgcgcactcggtgaagcgttccagattgccgacgacctgctcgatgtcgaaggcgacgctgccgcgctcggcaagccggccggcgccgatgccgcgctcggcaagaccaccttcgtcacccaactcggcatcgacggcgccaagcagcggctgcgcgacctggtcgcgcgtgccgaccaggcgctggcgccgttcggcgagcgcggcgaggtgctgcgcgccgccgcccgcttcgtcgccgagcggaagagctga

SEQ ID NO: 57358 - protein, 308 aa, Rhodopseudomonas palustris CGA009
MATGTSTIDFAKRLDTTAEETEALLGRLLSDELMSDEIARPRRLMDAIRYSTLGGGKRLRPFLAVESAAVFGIDRAAALLVGAALECIHCYSLIHDDLPSMDNSDLRRGRPTLHKAYDDATAILAGDALLTFAFDIVTRDEVHNDPTVRLLLTRVLARCAGLGGMVGGQMLDLAGEGRFGDREPVDVARLQQMKTGALLRYGCVAGAILGQASPDQYRALDDYGRALGEAFQIADDLLDVEGDAAALGKPAGADAALGKTTFVTQLGIDGAKQRLRDLVARADQALAPFGERGEVLRAAARFVAERKS

SEQ ID NO: 57359 - DNA, 870 bp, Bdellovibrio bacteriovorus HD100
  CDS (1)..(870): transl_table=11
ttggatctcgcaattcagattgatcaggaaatcgccgcgcgcacccaggctgtgaaccagtttgtggaaaaatatctgtctgacatggagctaccagcaggcagcgccatttctgagttgcgaaagtccatgctttattccgccaccaatggcgggaaacgtttccgtccggttctgtccttgctggtcggtgagttgttcggtgctggtaaagagcgcatcttgcctttcgccgctgccgtggaaatgattcatacgtactctttgattcatgatgatctgccatgcatggataacgatgacatgcgccgcgggaagcccaccaatcacaaagtgttcggtgaagactttgcgttgctggccggggacgctcttttgactgaagctttcatgctgattgcggaaaactatggggataacagcttcctggtgggtcacctgacaaggctgttatcttcggcggcaggaattcgaggcatggtcggtggtcaggcgattgacctgcgtgctggtgacaaacaaatgtcactggaagaactgacccatctgcatcgtcttaaaaccggtgcgttgattcgtgtggcggttgagggtgcggctgtgattgccggggcaaagccgactgaaattgaaagtcttaaaaaattcggcgaaggcctgggccttgctttccaagtggccgacgatgttctggatcacggcgaaaaaggtcaggatcttcgcagcttcaccggtatcctgggtcttgagggcacaaagacctatttgaaggatgtcagtgcttcgactttggcggaactgcacaaggtgtctgccgatgctccgcttttggagtatctgatcagctttaatcaaaaccgtcaggtgtaa

SEQ ID NO: 57360 - protein, 289 aa, Bdellovibrio bacteriovorus HD100
MDLAIQIDQEIAARTQAVNQFVEKYLSDMELPAGSAISELRKSMLYSATNGGKRFRPVLSLLVGELFGAGKERILPFAAAVEMIHTYSLIHDDLPCMDNDDMRRGKPTNHKVFGEDFALLAGDALLTEAFMLIAENYGDNSFLVGHLTRLLSSAAGIRGMVGGQAIDLRAGDKQMSLEELTHLHRLKTGALIRVAVEGAAVIAGAKPTEIESLKKFGEGLGLAFQVADDVLDHGEKGQDLRSFTGILGLEGTKTYLKDVSASTLAELHKVSADAPLLEYLISFNQNRQV

SEQ ID NO: 57361 - DNA, 1281 bp, Nasonia vitripennis
  CDS (1)..(1281)
atggcgtgtttaggctcgagtcggctctgcgcagcccgtgcggagaaattgtgccagttccggcgtaacatcgcctcctctgtcaactttcgtcgcgagctcgtcgatcagccgcagcagcagcatccatcagtgcagcaggctgcgccgatcagcggcagcatcgccagcaccaccggcagcagactgtttcagcgatctcagagctcgccgaggtacggaggacgcagctgtcgcacgacgagcatagcccgagcgataagctcgatgcagacgcagcagccgggatcgctgccggactaccgaatcgacccctaccagctcctcgaggatgatctcaagaacgtgtacgaggacataagaagggagttggtcgccaacacgagccacgaggagctgaggacgatagcgacgtactacttcggcggccagggtaaggcgctcagacccatggtcgcgatactcatggcgagagccatcaactacgacaaggatcagagcggtctcttggcctcgcagcggcaggttgcgatgatttccgagatgatccacaacgcctcgctggtgcacgacgacgtcgtcgaccagtcggactttcgccgaggaaagccttccgtcaacgcgctctggagccagaagaaggtgacaatggccggggacttcattctcgctgtggcttcgatgatgattgcgcgcctgcagaacgacgatgtcaccttaacactgagtcaggttatcaccgacttggtccagggcgagttcatgcagctcggctccaaggagacggagaacgagcgcttcgcccactatctcaccaagacctacaggaagacggccagcctcatcgccaattcggccaaagcggttgccatgctgggcggcgcggacgagcgactcgcggagctcgctttccaatacggaagaaacatcggcttggcttttcaactggtcgacgatctgctcgacttcgtgtcctcctcggacgcgatgggcaagccaacggctgccgacttgaagctgggcctcgccacggcgcccgtgctcttcgcctgcgaaagatttcccgagctcaaccccatgataatgcgtcgcttccaagagcccggcgacgtcgagaaggccttcgagctggtccacaagtcccagggcttggagcagacgagatttttggcgaaaaagcactgcgtcgaggccgtcaggctggcgcaaaccttggccgagagtccctaccagaagagcttgatggttgtcagcgacctggtcatcaatcgcatcaagtag

SEQ ID NO: 57362 - protein, 426 aa, Nasonia vitripennis
MACLGSSRLCAARAEKLCQFRRNIASSVNFRRELVDQPQQQHPSVQQAAPISGSIASTTGSRLFQRSQSSPRYGGRSCRTTSIARAISSMQTQQPGSLPDYRIDPYQLLEDDLKNVYEDIRRELVANTSHEELRTIATYYFGGQGKALRPMVAILMARAINYDKDQSGLLASQRQVAMISEMIHNASLVHDDVVDQSDFRRGKPSVNALWSQKKVTMAGDFILAVASMMIARLQNDDVTLTLSQVITDLVQGEFMQLGSKETENERFAHYLTKTYRKTASLIANSAKAVAMLGGADERLAELAFQYGRNIGLAFQLVDDLLDFVSSSDAMGKPTAADLKLGLATAPVLFACERFPELNPMIMRRFQEPGDVEKAFELVHKSQGLEQTRFLAKKHCVEAVRLAQTLAESPYQKSLMVVSDLVINRIK

SEQ ID NO: 57363 - DNA, 1341 bp, Tribolium castaneum
  CDS (1)..(1341)
atgccgagcctgtttgcgataggggaccaccgtctcacaacagtcttgacgatggcttctctaggctctggtagactctgtgctcgggtgcaggaaaaactgtgtcagtggggacaatcggctcaattcaggagggaagcgtcctcctgtgtgcggacaaaactcggattgcaaaccacccccaggatagtgaccaaggagcaccagaaccagcgacaatcacagactttggcggctgctgcggcacagagtgtgtcttcaggatgttggcatccttgcagcaggccggaagttgcagccacagcgcgcagtttcagcacgatgagaacgcagcaacctggttccctccccgaataccaagtggacccctatcaccttttagaagacgacctcaaggacgtttacgtgtatatccgagacgctttgcgaagaagcacttaccaagatgacctctacgagatagctacgtattatttcgatggacatgggaaagcaattagaccaatggtggctatcctcatggctagggcgataaattatcacatatataaagaaaaaagtggtcttttgacgtcgcaaagggaagtagcgatgatttcggaaatgatccacacagcctctctcgtccacgacgacgtcatcgatcagtcagatttccgtcgtggtaaacccagcgtcaacgtgatgtggaatcacaaaaaggtgaccatggctggagatttcatcttagcggttgcctcaatcatgatagctaggttaaaaaataacgacgtcactctagttcttagtcaagttgtctccgacttagttcagggagagttcatgcaactcggatctaaggaaacggaaaacgaacgatttgctcattatctaaccaaaacgtacagaaaaaccgcttctctgatagccaactctgtaaaatctgtgacaatgttagccggtgctgatgagcaactctccgacatttcgtaccaatacggacgcaatttaggtttagcgtttcagttagttgacgatcttctcgattttgtctcgagttctgcagccatgggaaagcccacagcggccgacctgaagctgggcctggccacagcgcccgtgctcttcgcttgcgaaaaattccctgaactgaacccgatgataatgcggcggttccaagagcctggggacgtggaaagggcgtttgacctcgtccacaaatcgcgagggctggagcagacgcagtatttggccaagcagcactgccaggaggccgtgaggcttgcaaaccttctggaggagagtccgtaccaaaaaggactgatagttgcggctgattatgtactaaaccgcatgaaatag

SEQ ID NO: 57364 - protein, 446 aa, Tribolium castaneum
MPSLFAIGDHRLTTVLTMASLGSGRLCARVQEKLCQWGQSAQFRREASSCVRTKLGLQTTPRIVTKEHQNQRQSQTLAAAAAQSVSSGCWHPCSRPEVAATARSFSTMRTQQPGSLPEYQVDPYHLLEDDLKDVYVYIRDALRRSTYQDDLYEIATYYFDGHGKAIRPMVAILMARAINYHIYKEKSGLLTSQREVAMISEMIHTASLVHDDVIDQSDFRRGKPSVNVMWNHKKVTMAGDFILAVASIMIARLKNNDVTLVLSQVVSDLVQGEFMQLGSKETENERFAHYLTKTYRKTASLIANSVKSVTMLAGADEQLSDISYQYGRNLGLAFQLVDDLLDFVSSSAAMGKPTAADLKLGLATAPVLFACEKFPELNPMIMRRFQEPGDVERAFDLVHKSRGLEQTQYLAKQHCQEAVRLANLLEESPYQKGLIVAADYVLNRMK

SEQ ID NO: 57365 - DNA, 888 bp, Clostridium thermocellum ATCC 27405
  CDS (1)..(888): transl_table=11
gtggaatttaaacagcaactggaaaaatatgcagatatagtaaatgaatatcttgacaggtgtattgttcaaaatgagcttcctgaaaagtctttgtacagcgcaatgagatacagtctcatggcgggaggaaagaggcttcggcccgttctttcccttgcggtatgcgatatgctgggaggaagtgttgaacaagtgcttccctttgcgtgcgccgttgagatgattcatacatattctctcatacatgatgatcttccggccatggacaatgacgatttcaggaggggcaggcccacaaatcacaaggtatatggcgaagcgttggcaatacttgcaggcgacggtcttttaaacctggcatttgagattatgctggagaatataataaaaaacggtgacatggagagaaagtcaaaagcggcggcagtaattgcgaaagccgcagggatgaacggcatgattgcgggacaggttattgatcttgagtcggaaggaaagcaagtggacaatgagattttaaatcgtatgcacagactgaaaaccggagcgctgataaaggcgccggtggtttcggcggccatattgtgcggagcggatgcggatgatattcaaaaacttgatgagtttgccgaaaaccttggtctggcctttcagataaaggatgacatattggatgtggaaggcagcagtgagaaacttggcaaaaaggttggcagcgatgccgataataacaaatccacatatgttaccgtttacggtttggaaaaatcaaaggaaatactttccgatgtcacgaaaaaggccgttgatgcccttgaaaagttcggggaaaaagcggattttttaagaagtcttgcgaaatatttgctggaaagggaaaattga

SEQ ID NO: 57366 - protein, 295 aa, Clostridium thermocellum ATCC 27405
MEFKQQLEKYADIVNEYLDRCIVQNELPEKSLYSAMRYSLMAGGKRLRPVLSLAVCDMLGGSVEQVLPFACAVEMIHTYSLIHDDLPAMDNDDFRRGRPTNHKVYGEALAILAGDGLLNLAFEIMLENIIKNGDMERKSKAAAVIAKAAGMNGMIAGQVIDLESEGKQVDNEILNRMHRLKTGALIKAPVVSAAILCGADADDIQKLDEFAENLGLAFQIKDDILDVEGSSEKLGKKVGSDADNNKSTYVTVYGLEKSKEILSDVTKKAVDALEKFGEKADFLRSLAKYLLEREN

SEQ ID NO: 57367 - DNA, 888 bp, Clostridium difficile 630
  CDS (1)..(888): transl_table=11
ttggaatttaaacaatgtctaaaagaaaaagcaagttttgtagaaaaagtacttaaagaatatatgcctaaagaagaagggtatcaaaaaactgttattgaagctatgaactatagcttaagtgctggaggtaaaagattaagaccaatacttacattggaggcttgtaaaatagttggaggtaatgaagatgaagctattccttttgctattgcaattgaaatgatacatacatattcactaatacatgatgatttgccagctcttgacaatgatgatttaagaagaggaagaccaacaaatcataaagtatatggagaagctatggggattttagcaggagatgctttgttaaactatgcttttgaagtaatgcttgcaggctcaatcaataaagaaaatccagaaaagtatctaaaagctataaatgaaattgccaaaggtgctggtatatatggaatgataggtggtcaagtagtagatgtagaaagcgaaaacaaacaaattgaaaaagaaaaattagattatatacatatgaataaaactgctgcaatgatggtaggctgtatgagagcaggagctactataggtggagcaaattctgaacaaatggaagaaataactaaatatgcaaaaaatatcggattatcattccagatagtagatgatatactagacatagtaggagatgaagctaagttaggtaaaaaggttggaagtgatatagaaaatcataagtcaacatacccatctcttttaggtttagataaatctaaagaaattgcacataatttgattgatgaagcaaagaaaagtatagaaaaattatctgatgatgtagattttttaaagggattggctgaatatataatagatagagaatactaa

SEQ ID NO: 57368 - protein, 295 aa, Clostridium difficile 630
MEFKQCLKEKASFVEKVLKEYMPKEEGYQKTVIEAMNYSLSAGGKRLRPILTLEACKIVGGNEDEAIPFAIAIEMIHTYSLIHDDLPALDNDDLRRGRPTNHKVYGEAMGILAGDALLNYAFEVMLAGSINKENPEKYLKAINEIAKGAGIYGMIGGQVVDVESENKQIEKEKLDYIHMNKTAAMMVGCMRAGATIGGANSEQMEEITKYAKNIGLSFQIVDDILDIVGDEAKLGKKVGSDIENHKSTYPSLLGLDKSKEIAHNLIDEAKKSIEKLSDDVDFLKGLAEYIIDREY

SEQ ID NO: 57369 - DNA, 885 bp, Herminiimonas arsenicoxydans
  CDS (1)..(885): transl_table=11
atgcaatcgtttgacggctggatgaaagctacgcagggggaaatggaattggcactggtgcagcatttgccgccggtggcactaacgcctgctcgcctgcatgaagccatgcattacgcagtactggatggcggcaaacgcgtgcgtcccttgctggtgtacgccgccggtgccttgttcgatgcggatgccgctgaactggcgcgcgctgccgctgcggttgaaatgatccatgcgtattcgctggtgcatgacgatatgccgtgcatggatgacgatgccttgcgtcgcggcaaaccgaccgtgcatgtgaaatacgacgaagcatgtgccttgctggtcggcgatgccttgcagtcgcaggcgtttgacgtattggcagatggcgggattgatcctgtgcggcaattggcgatggtgcgcctgctggccaaagcttccggttcgctcggcatgtgcggcgggcaggctatcgatctggcaagtgtgggtttgaatttgtcgctggaagaattggaacagatgcatcgcttgaaaaccggtgccttgctgcgcgtatcggtattgctgggcgcactcgccggcaaatctttatccgcagaagaaacacaggcgctggacagttatgcggctgccatcggcctggcatttcaggtagtggacgatgtgctggatgcgactgcagattcagccacgctgggtaaaaccgctggcaaggatgcggcagacaacaagccgacgtacgtatcgatactgggtctggaacaatcgcggaccctggcagaaaaattgcgcaacgatgctcatcgtgcgctggagcagtttggagaaaaagcacgacgcttgcgagagctcgcagacttgatcgtgcagcggaaggcctag

SEQ ID NO: 57370 - protein, 294 aa, Herminiimonas arsenicoxydans
MQSFDGWMKATQGEMELALVQHLPPVALTPARLHEAMHYAVLDGGKRVRPLLVYAAGALFDADAAELARAAAAVEMIHAYSLVHDDMPCMDDDALRRGKPTVHVKYDEACALLVGDALQSQAFDVLADGGIDPVRQLAMVRLLAKASGSLGMCGGQAIDLASVGLNLSLEELEQMHRLKTGALLRVSVLLGALAGKSLSAEETQALDSYAAAIGLAFQVVDDVLDATADSATLGKTAGKDAADNKPTYVSILGLEQSRTLAEKLRNDAHRALEQFGEKARRLRELADLIVQRKA

SEQ ID NO: 57371 - DNA, 843 bp, Dichelobacter nodosus VCS1703A
  CDS (1)..(843): transl_table=11
atgaatttaaacaattatcgcgaccgcgtcgaacacgctttggaacgcgcgttgccgcatgatgaaagcctactgacaaaagccatgcgctacagcacattaaacgccggcaaacgtttgcgggcggcattgatttatgccgttgcagaagatttttctttgccgttgtcgctggttgataacgccgcctgcgcgcttgaatgcattcatgcttattcgctgattcatgatgatttgccggcgatggataatgatgatttgcgccgcggtaaagccagttgtcataaagctttcgatgaggcaaccgcgattttagccggcgatgcgcttaatacgttggcgtttgcattattggcgcgcgatgaaaaaaatggtttggcgcaaattcgttgtttgagcgctgctgcgggcgcgatggtgtgcggacaaagtttggatatgatttataccggcaccgcaattgacgtgcaaaaattgcaaatcattcatcaaaaaaaaaccggcgccctcctcaccgccgcgttgcatttgggcgcactgccgtcgccggattacgcgcattatcaaacgcaattaaccgcgattggcgaacatatcggcatcgcctatcaaattatcgatgatatgctcgatgccaccagcgacagccaaacattgggcaaaaccgccggcaaagatgcgcagcaattaaaaaatacctatatgaactttttttcgccggcaaacattcaatctctaatcgcgcatcatgaacaatgcacgcggcagcaattaaatgctttgcccaattgcgggcaacaattaagcgcggtgatcgatttaatttttcatcggcaacaataa

SEQ ID NO: 57372 - protein, 280 aa, Dichelobacter nodosus VCS1703A
MNLNNYRDRVEHALERALPHDESLLTKAMRYSTLNAGKRLRAALIYAVAEDFSLPLSLVDNAACALECIHAYSLIHDDLPAMDNDDLRRGKASCHKAFDEATAILAGDALNTLAFALLARDEKNGLAQIRCLSAAAGAMVCGQSLDMIYTGTAIDVQKLQIIHQKKTGALLTAALHLGALPSPDYAHYQTQLTAIGEHIGIAYQIIDDMLDATSDSQTLGKTAGKDAQQLKNTYMNFFSPANIQSLIAHHEQCTRQQLNALPNCGQQLSAVIDLIFHRQQ

SEQ ID NO: 57373 - DNA, 885 bp, Candidatus Protochlamydia amoebophila UWE25
  CDS (1)..(885): transl_table=11
atgatggatgttgccaattatttacaaacacaaagtcagcttattgaaaaacgcctggatcaacttgtctccaaacgtcacggccctcaccaaaatttaattgaagctgctcgttatgctcttttaagtggaggaaaaaggctacgtccaattttagctttgacaactgttcagacacttcatggagatattcaagaagctttatctcctgcttgcacattagaacttatccatacttattctcttattcatgatgacttaccttgcatggataatgatgattatcgaagaggaaaactgactgttcatcgccaatattcagaaggccacgccgttttaacgggagacttccttttaacatacgcatttgaacttttagcgaccgataaatatttgacatctgaaaaaaaagttaaacttattactattttatccagacaaagcggatacgatggaatgattggcgggcaagccttggatttagccagcgagggacaaaaaattaatcttgaaacccttcgattacttcatcgtaataaaacagctgctttgattacagcatctgttgaattcggaggaattttagcaaatgcaacagaagaacagctcgctcatatccgggagtttggtgaaaatattgggctggcttttcaaatcactgatgatatccttgatatcacatcaagcgaagccaaacatgggcgaaaaattgggtctgacatcctaaaagataaatcgacttatgtatccttacttggaatagaacaagccaaagcatacgctttaaatttttatcaaaaggccattaatgctttaaaactccttccctatgataattcttttctaatacatttagctgactttattattcatcgtcattattga

SEQ ID NO: 57374 - protein, 294 aa, Candidatus Protochlamydia amoebophila UWE25
MMDVANYLQTQSQLIEKRLDQLVSKRHGPHQNLIEAARYALLSGGKRLRPILALTTVQTLHGDIQEALSPACTLELIHTYSLIHDDLPCMDNDDYRRGKLTVHRQYSEGHAVLTGDFLLTYAFELLATDKYLTSEKKVKLITILSRQSGYDGMIGGQALDLASEGQKINLETLRLLHRNKTAALITASVEFGGILANATEEQLAHIREFGENIGLAFQITDDILDITSSEAKHGRKIGSDILKDKSTYVSLLGIEQAKAYALNFYQKAINALKLLPYDNSFLIHLADFIIHRHY

SEQ ID NO: 57375 - DNA, 906 bp, Bartonella quintana str. Toulouse
  CDS (1)..(906): transl_table=11
atgtatgaatttaccacccttcttgcaaaacacgcccacagtgttgaaaggcgacttgacacactattaagtgatcaagtccaaaatggtgaaatttcccgtcctgaggccttaataaaagccatgcgctatggtgtgttgaatggtggaaagcgcctgcgtccttttcttgttattcaaagtggtgcactctttgatatccctgctgaatactgtctcgacgtcgcaagtgctttagaatgtgtccactgttattcgctcattcatgatgatcttcccgccatggataacgacacactccgacgtggacaacccactgtccacatagcatttgatgaagccacagcaattctggcaggcaacgccctcttgacttttgcttttgaaatcattgctcataaagccagtacactcccctttgaaaccaaaatcaaactgatcacaactcttgcacaatcagcaggacttggcggcatgataggcggacaaatgcttgacctggaagcagaaaaaaaaccacaagatagcgccatcagtattctgactctccaacacatgaaaacagccgctcttataagctttgcttgccaagcaggagcgatcatcggcaatgcttccaaagaattaaccgaaaaacttgctgcttttggaacctatcttggtttagcgtttcaattgacagacgatcttcttgatatcaccgccagcactgaaatcctagggaaaaccgctggtaaagatgaaacagcacaaaaagccacttttgttcgtctttatggcattcaagaaacacaaaaaaaacgagatggactcatcgctaaagcagaagcgcttctgctgccttttggcaccaaagcaaaaccactccaacaagcggcccattttagtgcaacacgcaaaaattaa

SEQ ID NO: 57376 - protein, 301 aa, Bartonella quintana str. Toulouse
MYEFTTLLAKHAHSVERRLDTLLSDQVQNGEISRPEALIKAMRYGVLNGGKRLRPFLVIQSGALFDIPAEYCLDVASALECVHCYSLIHDDLPAMDNDTLRRGQPTVHIAFDEATAILAGNALLTFAFEIIAHKASTLPFETKIKLITTLAQSAGLGGMIGGQMLDLEAEKKPQDSAISILTLQHMKTAALISFACQAGAIIGNASKELTEKLAAFGTYLGLAFQLTDDLLDITASTEILGKTAGKDETAQKATFVRLYGIQETQKKRDGLIAKAEALLLPFGTKAKPLQQAAHFSATRKN

SEQ ID NO: 57377 - DNA, 909 bp, Acinetobacter sp. ADP1
  CDS (1)..(909): transl_table=11
gtgacatcgatttcacatgtaaatgcaaatgtcttgcaagcagctcaggaacgtatccagcaagatttaactacagcgctagatgcttttgatttaccagagcctttaaaatcggctgtctatcataccgtgatgctgggtggaaaacgtgttcgacctgccttatgttatgcagttgcatcaatggagaaaaatccaaattatgctgctgctcgtcgtgcagcagttgccgttgaattgatccactgctattcacttgcgcatgatgacttgccttgtatggacaacgatttgctgcgtcgcggacaaccgacctgccatgtggcttttggcgaagatactgcattgttggcaggtgatattttgcagtcgatggcatttgaggtgctgggcagtcgattatttgatcagcaaaattccgtcgatgcctcgattgtactcagacagatgcagattttggcaacagcaagctctaagatggtttgtggtcaagttcttgatttgcaggcagaaggaaaggaaattgatcaggagcaactggaaaacattcatcgtaataaaacaggtgcgctcatacaggccgcactcatgatgggtgcagtgaccctatttagtgggatggatcaggctattcctcatttacgtcagtttgggcaacggattggtctggcatttcaggtacaggatgatattctggatattatttcgagtaccgaaacattaggtaaaacggctggtaaagatcagcaggttcaaaaatcaacttatccagcattgatgggcctggacgctgcgcagaattatgccaaaaacttgcatgatcaggctttggcttctctggattattttggtgatgctgctatcgagttacagcagatcgtgcagtttttattatcgcgaaaaagttaa

SEQ ID NO: 57378 - protein, 302 aa, Acinetobacter sp. ADP1
MTSISHVNANVLQAAQERIQQDLTTALDAFDLPEPLKSAVYHTVMLGGKRVRPALCYAVASMEKNPNYAAARRAAVAVELIHCYSLAHDDLPCMDNDLLRRGQPTCHVAFGEDTALLAGDILQSMAFEVLGSRLFDQQNSVDASIVLRQMQILATASSKMVCGQVLDLQAEGKEIDQEQLENIHRNKTGALIQAALMMGAVTLFSGMDQAIPHLRQFGQRIGLAFQVQDDILDIISSTETLGKTAGKDQQVQKSTYPALMGLDAAQNYAKNLHDQALASLDYFGDAAIELQQIVQFLLSRKS

SEQ ID NO: 57379 - DNA, 912 bp, Erwinia carotovora subsp. atroseptica SCRI1043
  CDS (1)..(912): transl_table=11
atgaccgatttcagcgcgcaactgaatgcgcattatcaacgcactaaccgtatgttggggcatttcatcaccagcctcccctttcagagtagtccactagtcaatgcgatggagtatggctcactcttagggggcaaacgcctgcgtccgtttctggtttatactacaggcgaactgtttgatatgccgctagagagcctggacgcccctgctgctgctgtagaatgtatccatgcctattcattgattcatgacgatctgccggcgatggacgacgacgatttacgccgtggacagccgacctgccacatcaaatttggtgaagccactgccattctcgcgggcgatgcattgcaaacgctggcattctctattctggccgacgcaccgatgacgcaggtctctgaccgcgatcggctggcaatgatctcagaattagcgcaggcaagtggcgtagcaggtatgtgcggcggtcaggctttcgatctggaagcagaaggccatcaggtcaatctggctgcattagagcgaattcatcgccacaaaacaggtgccttgatccgcgccgccgttcgactgggcgcactggcagccggtgacgctggccgcgacgccttaccttatctggatcgctacgctaacgcgattgggctcgccttccaggttcaggacgatattctcgatgttgttggcgacagcgcgacaacaggcaaacgtcagggtgcagaccagcagttaggtaaaagcacctatcccagtttactggggttagataatgcacgaaaaaaagcacaggagctctatcaggaatcactggcatcgctggacgatctcgtcgcatccagcccgatccccctgaatattgcgccactacaagcgctggcgaatttcatcgttgaacgcgataagtaa

SEQ ID NO: 57380 - protein, 303 aa, Erwinia carotovora subsp. atroseptica SCRI1043
MTDFSAQLNAHYQRTNRMLGHFITSLPFQSSPLVNAMEYGSLLGGKRLRPFLVYTTGELFDMPLESLDAPAAAVECIHAYSLIHDDLPAMDDDDLRRGQPTCHIKFGEATAILAGDALQTLAFSILADAPMTQVSDRDRLAMISELAQASGVAGMCGGQAFDLEAEGHQVNLAALERIHRHKTGALIRAAVRLGALAAGDAGRDALPYLDRYANAIGLAFQVQDDILDVVGDSATTGKRQGADQQLGKSTYPSLLGLDNARKKAQELYQESLASLDDLVASSPIPLNIAPLQALANFIVERDK

SEQ ID NO: 57381 - DNA, 897 bp, Desulfotalea psychrophila LSv54
  CDS (1)..(897): transl_table=11
ttgaatataaaaaattatcttgagcaaaagcgaagccttgttgaagaggccatggatcgttttatgctcgaagaatctgggcccttcaaaaaacatatagaggcaatgcgttacagcctttttgcaggcggaaaacgaattcgcccgatactctgtctagccgcagcagacagcatctgtgcgcaggagagaacacaagaaaacctccttcccgttgcctgcgcgcttgaatgtattcacacctactccctcatccatgatgacctaccagccatggacgatgatcaattacgccgaggaaaggcgacgaaccacgttctttacggcgaagcaggagccattctcgcaggagacggtctactctcctgggcttttgacctgatcgccgatagaggtaagggtaacctgaccgctgaaaaacgacttgatatttgccatatggtggccagagcagcaggatccctcggcatggtaggagggcagcaactcgatattcaaagcgaaaacaaagagatcgattttgacaccctagccaccattcaccgcagcaaaacgggagccctaataacctgttctataatgagcggggccattggtgccggagcaaatgccaaacaactccacgccttggaagagtacggcaataatattggtcttgcctttcagatcatcgatgatctgctggatgcaacggcgaccacagaggagttgggcaagacggcaggcagtgatgctgaacatggcaaggccacctatcccctctttttcggtatcgacaagacccgggaaaaagcaaaagcagccgttgacaatgccataaaagccctcaccttatttgatcatagggcagatcctctgagaggacttgccaactatatatattcccgaaccaactag

SEQ ID NO: 57382 - protein, 298 aa, Desulfotalea psychrophila LSv54
MNIKNYLEQKRSLVEEAMDRFMLEESGPFKKHIEAMRYSLFAGGKRIRPILCLAAADSICAQERTQENLLPVACALECIHTYSLIHDDLPAMDDDQLRRGKATNHVLYGEAGAILAGDGLLSWAFDLIADRGKGNLTAEKRLDICHMVARAAGSLGMVGGQQLDIQSENKEIDFDTLATIHRSKTGALITCSIMSGAIGAGANAKQLHALEEYGNNIGLAFQIIDDLLDATATTEELGKTAGSDAEHGKATYPLFFGIDKTREKAKAAVDNAIKALTLFDHRADPLRGLANYIYSRTN

SEQ ID NO: 57383 - DNA, 921 bp, Yersinia pseudotuberculosis IP 32953
  CDS (1)..(921): transl_table=11
atgtcggatacccatgcacctgttgattttaaacaacaacttgccgctcatcagcagcgagtcaatcaggctctgctggatttcattgctcccctgccgtttggcaatagcaatttaatcgaggccatgcgctatggtgcggtaatcgggggtaagcgtctccgcccctatctggtctatgccacagggcaaatgtttggtttgtcactcgccaacttagacgccccggcggcggcaattgaatgtattcatgcctattcattaatacatgatgatctgcccgccatggacgatgatgatttacgccgtgggcagccgacttgccacgttaagtttggcgaggcccacgctattttggccggtgatgcactgcaaacgctggccttttctattttggctgaagcccccatgcccgatgtcgctgataaagatcgcctatcgatgattatcgagttggctcaagctagtggggctgcggggatgtgtgcgggtcaggcgctagatctggaagcagaaactcgccctgttttattaggtgaccttgagcaaatccaccgtcataaaaccggtgcgttgattcgtgcggcagttcgccttggcgccctggcagccggtgaagctggccgtaaaacattattgtcactcgatcgttacgccgaggccatcggtttagcctttcaagtccaggacgatattttagacgtcattggcgacacagctacaattggtaaacgtcaaggctcagaccaacaactaggcaaaagtacttatccggcgctacttggtctggattgtgcccaaacaaaagcgatggatctttatcaggaggcactagaggccttggatgaattggcaaaacagtcctataacacggattcattgcaggcattagctcgtttcattattgagcgtaataattaa

SEQ ID NO: 57384 - protein, 306 aa, Yersinia pseudotuberculosis IP 32953
MSDTHAPVDFKQQLAAHQQRVNQALLDFIAPLPFGNSNLIEAMRYGAVIGGKRLRPYLVYATGQMFGLSLANLDAPAAAIECIHAYSLIHDDLPAMDDDDLRRGQPTCHVKFGEAHAILAGDALQTLAFSILAEAPMPDVADKDRLSMIIELAQASGAAGMCAGQALDLEAETRPVLLGDLEQIHRHKTGALIRAAVRLGALAAGEAGRKTLLSLDRYAEAIGLAFQVQDDILDVIGDTATIGKRQGSDQQLGKSTYPALLGLDCAQTKAMDLYQEALEALDELAKQSYNTDSLQALARFIIERNN

SEQ ID NO: 57385 - DNA, 894 bp, Symbiobacterium thermophilum IAM 14863
  CDS (1)..(894): transl_table=11
ttgaggggcgagtttcagcagtacatggccgcgcggcggcagcaggtggaggcggcgctggaccggtacaccgccgggctcgacgcgccttcccggctggtggaggccatgcggtacagcctccttgccggaggcaagcggctccggccgatcctgaccattgccgcgtccgagctcttcggtctggaggcggccgacgtgatgcccggcgcctgcgccctggagatgattcacacctactcgctcatccacgacgacctgccctgcatggacgacgacgacctgcgccggggccgtcccacctgccacaaggtctacggcgaggccatggctgtgctcgcgggggacgcgctgctcacccaggccttcgcgctgatggccgagcaggcagccgtcccgcgcgtcgggccggcgcgcgcggtgcgggctgccgcggagctcgcccacgccgcgggagccgagggcatggtcggcgggcaggtggaggacttggcgtgggagggccgccaggcggacgaaccgcagctcaggcggatccactccctgaagaccggcgcgctgttccgcgccgccgtgcgtatgggcggcatcctcgccggtgcaggcgaggaggacctggaccggctggggcgctacgcgacgcacttcgggcttgccttccagatctgggacgacgtgctggacgtgaccggcgacgccgccctgacggggaagggcgtcggccgcgacgcccggctggacaagtccacctacgtcaccctgcacggcgtggaaggcgcgcgcgagcgcgcctaccaggccgtccgactggcgctggaggagctggagcccttcggcggagcgggctgggtgctcagggccttggcagaatctgtggttgaccgcgtcgcctga

SEQ ID NO: 57386 - protein, 297 aa, Symbiobacterium thermophilum IAM 14863
MRGEFQQYMAARRQQVEAALDRYTAGLDAPSRLVEAMRYSLLAGGKRLRPILTIAASELFGLEAADVMPGACALEMIHTYSLIHDDLPCMDDDDLRRGRPTCHKVYGEAMAVLAGDALLTQAFALMAEQAAVPRVGPARAVRAAAELAHAAGAEGMVGGQVEDLAWEGRQADEPQLRRIHSLKTGALFRAAVRMGGILAGAGEEDLDRLGRYATHFGLAFQIWDDVLDVTGDAALTGKGVGRDARLDKSTYVTLHGVEGARERAYQAVRLALEELEPFGGAGWVLRALAESVVDRVA

SEQ ID NO: 57387 - DNA, 903 bp, Mannheimia succiniciproducens MBEL55E
  CDS (1)..(903): transl_table=11
gtgatgagacttatgtatcaattttcaaatgatttacaacaagcgcaacaacgcattaaccgatttctagaagctcaattcgatgaaataaatacccgtccctcgccgctggccgatgcaatgaaatacggattattattaggcggcaaacgcattcgtccgtttttggtttatgccaccggccgtatgttgggcgcggatacggcacaactggattatgccgccgccgctatcgaagctattcatgcttattccttaattcatgacgatttaccggcgatggataatgacagtttacgccgcggacagccgacctgccatattgcctttgatcatgccaccgctattttagccggtgacgcgctacaggcttttgctttcgaaattctgacaaaatccaccgcactttccgccgaacaaaaactccgtttaattcaggttttaagtcataattccggtgtcttcggtatgtgcctggggcaaagccttgatcttatttctgaacataaacagatttcactgagcgaactggaacaaattcatcgcaacaaaacaggcgctttactttccgccgcgttaaaaatgggctttatttgttcgtcgcattttgccgacaacgcattggaagccaaactggatcgctatgccgccgctatcggtctggcatttcaggttcaggacgatattttagacatcgagggcgatctggcggcaatcggtaagaatgtcggctcggatttagagtcggataaaagcacttatcctaaattactgggtttagccggtgcaaaacaaaaagcacgagaactttatgttgcggcggtcggtgaattagaacatttaccttttgatacaacggcacttcgtgctttagccgaatttattattaatcgaaaaaattaa

SEQ ID NO: 57388 - protein, 300 aa, Mannheimia succiniciproducens MBEL55E
MMRLMYQFSNDLQQAQQRINRFLEAQFDEINTRPSPLADAMKYGLLLGGKRIRPFLVYATGRMLGADTAQLDYAAAAIEAIHAYSLIHDDLPAMDNDSLRRGQPTCHIAFDHATAILAGDALQAFAFEILTKSTALSAEQKLRLIQVLSHNSGVFGMCLGQSLDLISEHKQISLSELEQIHRNKTGALLSAALKMGFICSSHFADNALEAKLDRYAAAIGLAFQVQDDILDIEGDLAAIGKNVGSDLESDKSTYPKLLGLAGAKQKARELYVAAVGELEHLPFDTTALRALAEFIINRKN

SEQ ID NO: 57389 - DNA, 891 bp, Bacillus licheniformis ATCC 14580
  CDS (1)..(891): transl_table=11
gtgaccggtaaacttgaaggatttttaaaatcgagaaaaacagtaattgaagagcgccttccgatgtatattaaagacttgcaagcgccgtccatcctcaaggaatccatgctgtactcattggaagccggggggaaacggctgagaccgatattggttcttgcgcttcttcatgcgtacggaaaagacgaagaagccggaattccagtcggatgcgcggttgaaatgatccatacgtattcattaatccatgacgacctcccttgtatggatgacgatgacctcagaagaggtaagccgacaaaccacaaaatttacggggaggcgacggccattctcgcgggagacgccttattaaccgaaagcttcaaaatgatcacttccaatatgccttctgatgtatccgctgaaaagcgcatcagactggtgaacgagctgatttcggcagcgggggccgaaggcatggtcggcggtcagattttagatatggaagcggaatcaaagtctgtatctcttgatgaactgcagcgaatccacgaaggaaaaacggctaaactcctcagcttcagcgtcattgcgggagccattcttgcagatgcatctgaaaaagagatcgaaaagctgcgcgaattcagccatcatatcggcatcggctttcagatcagagatgacattttggaccttgaaggctcggaggataagatcggcaaacggatcggatccgacgcttcaaacggaaagtcgacgtatccgtcgctcctttcgcttgagggcgccagccaaaaacttgatgaacatattgaaaaagcaaaacagctgatttcagagcttccgcttgaaaaagagcttatgtacgagttctgcgatatgattgccgctagggatcattga

SEQ ID NO: 57390 - protein, 296 aa, Bacillus licheniformis ATCC 14580
MTGKLEGFLKSRKTVIEERLPMYIKDLQAPSILKESMLYSLEAGGKRLRPILVLALLHAYGKDEEAGIPVGCAVEMIHTYSLIHDDLPCMDDDDLRRGKPTNHKIYGEATAILAGDALLTESFKMITSNMPSDVSAEKRIRLVNELISAAGAEGMVGGQILDMEAESKSVSLDELQRIHEGKTAKLLSFSVIAGAILADASEKEIEKLREFSHHIGIGFQIRDDILDLEGSEDKIGKRIGSDASNGKSTYPSLLSLEGASQKLDEHIEKAKQLISELPLEKELMYEFCDMIAARDH

SEQ ID NO: 57391 - DNA, 903 bp, Methylococcus capsulatus str. Bath
  CDS (1)..(903): transl_table=11
atgaaccctgaacgatctctgagcgatttcatgcggtccagccaggagcgggtggaacgagcgctggatgcacgcctgccggccgccgaccgcatgccggagcggctccatcaagccatgcgctactcggtgctgggtggcggcaagcgcatgcgccccctgctcacctacgccaccggccagaccatcggcgtggcggcggacctgctcgacggccccgcctgcgcggttgaattcatccatgtctattcgctgattcacgacgatctgccggcgatggacgacgacgacctgcgtcgaggcaaaccgacctgccacaaggcctatgacgaggccaccgcgatactcgcgggagacggcctgcaggccctggccttccacgtcctcgcccaggatcccagcatcgccgtgccggcggaaaaccgcatcgccatgatcgaaaccctggcaaaagccagcggccccgccggcatggtcggcggccaggcgatcgacctggcttcggtgggtaagaagctggacctgccggggctggagaacatgcatatccgcaagaccggcgccctgatccgtgccagcgtgcggctggcctgcctggcccgtcccggtctgccggctgaacaattcgaccgcctggaccactacgccaagtgcatcggcctcgctttccagatccaggatgacatcctcgacgaagagagcgacacccagaccttgggaaaaactcgaggcaaggaccgcgaccacaacaagcccaactacccggccttgctggggctgagcggcgccaaagaaaaagcggaagaaatgcacgaggcagccctggaaagcctggccggcttcggccccgaagccgatctgctgcgcgaactcgcccgcttcatcatccagcggcagagctag

SEQ ID NO: 57392 - protein, 300 aa, Methylococcus capsulatus str. Bath
MNPERSLSDFMRSSQERVERALDARLPAADRMPERLHQAMRYSVLGGGKRMRPLLTYATGQTIGVAADLLDGPACAVEFIHVYSLIHDDLPAMDDDDLRRGKPTCHKAYDEATAILAGDGLQALAFHVLAQDPSIAVPAENRIAMIETLAKASGPAGMVGGQAIDLASVGKKLDLPGLENMHIRKTGALIRASVRLACLARPGLPAEQFDRLDHYAKCIGLAFQIQDDILDEESDTQTLGKTRGKDRDHNKPNYPALLGLSGAKEKAEEMHEAALESLAGFGPEADLLRELARFIIQRQS

SEQ ID NO: 57393 - DNA, 882 bp, Staphylococcus epidermidis RP62A
  CDS (1)..(882): transl_table=11
atgaagaaactacagatgaataaattaataaatataattaatacatcactgaataagtcaatacaatcatcaccattaaaaactaatttagaagaaagtatgaaatattcattaaatgctggtggtaaaagaatcagaccagtcatattattattaacactaaaaatgcttaacaaagattatcaacaaggactaaatagtgctttagcattggaaatgattcatacttattctttaattcatgatgatttaccagcaatggataatgacgattaccgtagaggaaaattaacaaatcataaagtttatggtgaatggaaagccattcttgctggtgatgcattattaacaaaagcttttgaattagtttctaatgatactaccattgaagatagtgtgaaagtaagtattataaaaagactttcaaaagcaagtggacatttgggaatggtgggtggccaagcgcttgatatggaaagtgaagggaagtcaattcgtttagaaactttagaatcaattcatgaaactaagacaggcgctttactaaatttttcagttatggctgcggtagacattgctcaagtagaacaaaatattgctaagaatttagatgaatttagtcatcatttaggaatgatgtttcaaattaaagatgatttactggatgtgtatggtgatgaatcaaaacttggcaaaaaagtaggcagtgatatagtaaatcataaaagtacttatgtttctttacttggaaaagaaggagcagaagaaaagttaaacaatcatcaatatcttgctatgaactgcttaaatcaaatttctgatcaatatgatacttctgaattaagtgatattgtagatttattctataacagagaccattaa

SEQ ID NO: 57394 - protein, 293 aa, Staphylococcus epidermidis RP62A
MKKLQMNKLINIINTSLNKSIQSSPLKTNLEESMKYSLNAGGKRIRPVILLLTLKMLNKDYQQGLNSALALEMIHTYSLIHDDLPAMDNDDYRRGKLTNHKVYGEWKAILAGDALLTKAFELVSNDTTIEDSVKVSIIKRLSKASGHLGMVGGQALDMESEGKSIRLETLESIHETKTGALLNFSVMAAVDIAQVEQNIAKNLDEFSHHLGMMFQIKDDLLDVYGDESKLGKKVGSDIVNHKSTYVSLLGKEGAEEKLNNHQYLAMNCLNQISDQYDTSELSDIVDLFYNRDH

SEQ ID NO: 57395 - DNA, 897 bp, Neisseria gonorrhoeae FA 1090
  CDS (1)..(897): transl_table=11
ttgaatccgacgaatgatttgaaagcgtggcaacagagggcgcaggcgcagacagagctgctgctggaacgctttttgccgtctggaaacgaaatcccgcacacgctgcacgaagcgatgcgctatgcggctttggacggcggcaagcgtctgcgcccgatgctggtgctggcggcttcggaattgggcggggccatggcggatgcggtcggacaggcaatggcggcaatcgaaatgatccacgtctattctttggttcacgacgatatgccggcgatggacaacgacagcctgcggcgcggcaaaccgacctgccacatcaaatatggcgaagccaccgcccttctgaccggcgacgctttacaaacccaagccttcgacgtgttgagccgtccgacagaactgcccgccgcacgccagttggcaatgttgtcggtgttggcaaaagcgggcggcagcgcgggtatggcgggcggacaggcaatcgatttggcaaatgtcggcaaacaaatggttcaagccgatttggaacggatgcacagcctgaaaacgggggcgttgatccgtgcggcggttttattgggggcgacggcgtgtcccgatctgtccgacgcggaacttgccgtattggacgcttacgcggcaaaactgggtttggcgttccaagtcatcgacgatgtgttggattgtgaagcggacacggcgactttgggcaagacggcgggcaaagatgccgacaacgacaagccgacttatgtgaaactgatgggcttggaagcggcgcgctcatacgcacacaaactggttgccgaagcagtcgcgctgctcgaacccttcggcgacaaagccctgcgcctgcggcagttggcagaatttgcagtcgcacgcaaatattaa

SEQ ID NO: 57396 - protein, 298 aa, Neisseria gonorrhoeae FA 1090
MNPTNDLKAWQQRAQAQTELLLERFLPSGNEIPHTLHEAMRYAALDGGKRLRPMLVLAASELGGAMADAVGQAMAAIEMIHVYSLVHDDMPAMDNDSLRRGKPTCHIKYGEATALLTGDALQTQAFDVLSRPTELPAARQLAMLSVLAKAGGSAGMAGGQAIDLANVGKQMVQADLERMHSLKTGALIRAAVLLGATACPDLSDAELAVLDAYAAKLGLAFQVIDDVLDCEADTATLGKTAGKDADNDKPTYVKLMGLEAARSYAHKLVAEAVALLEPFGDKALRLRQLAEFAVARKY

SEQ ID NO: 57397 - DNA, 888 bp, Pseudomonas fluorescens Pf-5
  CDS (1)..(888): transl_table=11
atgattaccgcctatcaggcctccagccaggcccgcgtcgacgctgcaatgcacaccctgttcaccgcccctagccccgaacttgcccgcctctatgaagccatgcgctacagcgtgatgaatggcggcaagcgcgtgcgcccgctgctggcctacgccgcctgcgaggccctgggcggcaagcccgagcaagccaacggcgccgcctgcgcggtggagctgatccacgcctattccctggtgcacgacgacctgccggccatggacgatgacgacctgcgccgcggccagcccactacccacaaggctttcgatgaagcctgcgcgatcctcgccggcgacggcctgcagagcctggccttcagcgccctgctggacccggccctgagcgacgccagcgccgagatccgcctgcgcatggtcaccaccctggcccaggccgcgggcccggcgggcatggtcggcggccaggccatcgacctcggctccgtggggctcaagctggaccagcaggccctggaatacatgcatcggcacaagaccggggcactgatcgaagccagcgtgatccttggcgccctggccagcggccgggccgaaaagggcgagctcaaggccctgcaaacctacgctcaggccattggcctggcgttccaggtgcaggacgacattctcgatgtcgaaagcgacaccgccaccctgggcaagcgccagggcgccgatatcgcccgggacaagccgacctacccggccttgctgggcctggccgcggccaaggagtacgccctggaactgcgcgaccaggcgctgcatgccctgcgtccgtttgacgcagcggccgagccgctgcgcgagctggcgcgctatatcgtcgaacgccgcagctga

SEQ ID NO: 57398 - protein, 295 aa, Pseudomonas fluorescens Pf-5
MITAYQASSQARVDAAMHTLFTAPSPELARLYEAMRYSVMNGGKRVRPLLAYAACEALGGKPEQANGAACAVELIHAYSLVHDDLPAMDDDDLRRGQPTTHKAFDEACAILAGDGLQSLAFSALLDPALSDASAEIRLRMVTTLAQAAGPAGMVGGQAIDLGSVGLKLDQQALEYMHRHKTGALIEASVILGALASGRAEKGELKALQTYAQAIGLAFQVQDDILDVESDTATLGKRQGADIARDKPTYPALLGLAAAKEYALELRDQALHALRPFDAAAEPLRELARYIVERRS

SEQ ID NO: 57399 - DNA, 903 bp, Colwellia psychrerythraea 34H
  CDS (1)..(903): transl_table=11
atgactacattaatttcttacgcccattatcaagagcgcattaatgactttttagccgctaagctcgaaggccttaccatcaatgatcctaagcttattgaagccatgcgttatggtttgcttattggtggaaaacgcatgcgtccttacttagcctatattaccggcgaagcagtttcagctgatttgaacgatattgacgcagtagccggtgctttagagtgtattcacgcttactcacttttgcatgatgacttacctgcgatggatgacgatgatttaagacgcggtaaaccgacttgtcataaagcatttgatgaagcaacagcaatactagcgggcgatgctttgcagacacttgcttttgatattttagctaatcatacgttttcaatgaatcaaagtactgctggaatgcctatccaggtaaaactaattcaacaattagttaaagcttctggttatcaagggatgtgtggcggacaagcacttgatttagcggcaacgggtaaaaacatttcactaggtgaattggaagttttacattcgcttaaaactggcgctttattggaagcatcagtattaatgccagcaatgtgcagtggacaagtcacccgtgaatataaaataatattaagcgagtacgcacaactcattggcttagcctaccaagtgcaagatgatattattgacttaacatcaaccgaagaagaactaggtaaacccgttggatctgatatagcagcgaacaaaagcacttatcctgcactgctcggtttacaaggtgcacaagacaaagcggaaaacttattacaacaagcgcttcaagctttgagcagattaccttacaatacccaatctttagcagattttgccacttttattgttaaacgcagccactag

SEQ ID NO: 57400 - protein, 300 aa, Colwellia psychrerythraea 34H
MTTLISYAHYQERINDFLAAKLEGLTINDPKLIEAMRYGLLIGGKRMRPYLAYITGEAVSADLNDIDAVAGALECIHAYSLLHDDLPAMDDDDLRRGKPTCHKAFDEATAILAGDALQTLAFDILANHTFSMNQSTAGMPIQVKLIQQLVKASGYQGMCGGQALDLAATGKNISLGELEVLHSLKTGALLEASVLMPAMCSGQVTREYKIILSEYAQLIGLAYQVQDDIIDLTSTEEELGKPVGSDIAANKSTYPALLGLQGAQDKAENLLQQALQALSRLPYNTQSLADFATFIVKRSH

SEQ ID NO: 57401 - DNA, 894 bp, Dechloromonas aromatica RCB
  CDS (1)..(894): transl_table=11
gtgagcatcaagcccttcgccgaatggatggcggtcacccaggaccgcgcagaatccgcgctcggccgctttttgcccggccccgactgcattcccgcccgcctgcacgaagccatgcgctacgccaccctcggcggcggcaagcgcgtccgtccgctgctcgcccacgccgccggcgaattgaccggtgcgacgccggaggccctcgacatcgtcggctgcgccgtcgaaatgatccacgcctattcgctggtccatgacgacctgccgtgcatggacgatgacgtgctgcgccgcggccgtccgacctgccacgtcgaattcgacgaaccgaccgcgctgctcgtcggtgacagcctgcagaccatggccttcgaactgctcgccagccagccgcttggcgaaccgaagcaacaactcgaaataatcgccctgctcgcccacgccagcggttcgcgcggcatggccggcggccaggccatcgacctcgcctcggtcggcaaaccgctgacccagcccgaactcgaactgatgcacgcgctgaaaaccggcgccctgatccgcgccgccgtgttgcttggcgccctggctggccagcccctttcggccgacgaacgaaccagcctcgaccgtttcgccaagcgcgccggcctgctctttcaggtggtcgatgacatcctcgactgcaccgccagcaccgctacgctgggcaagactgccggcaaggacgaggcggccgacaaaccgacctacgtcgccctgctcggccttgacgcggcccgcacctacgccgacgaactgcgcgccgacgcccgcgacgccctgagcatcttcggcgagcgtgccagccgcctcaatcagttggccgacttcatctgccaccggcaattctga

SEQ ID NO: 57402 - protein, 297 aa, Dechloromonas aromatica RCB
MSIKPFAEWMAVTQDRAESALGRFLPGPDCIPARLHEAMRYATLGGGKRVRPLLAHAAGELTGATPEALDIVGCAVEMIHAYSLVHDDLPCMDDDVLRRGRPTCHVEFDEPTALLVGDSLQTMAFELLASQPLGEPKQQLEIIALLAHASGSRGMAGGQAIDLASVGKPLTQPELELMHALKTGALIRAAVLLGALAGQPLSADERTSLDRFAKRAGLLFQVVDDILDCTASTATLGKTAGKDEAADKPTYVALLGLDAARTYADELRADARDALSIFGERASRLNQLADFICHRQF

SEQ ID NO: 57403 - DNA, 885 bp, Ralstonia eutropha JMP134
  CDS (1)..(885): transl_table=11
atgaccgaattcgcaagctggatgcgggcgcagggggcccggaccgaggccgcgctggaccaaacgttgccaaatgccgacaccgtgccgcatacactgcatgaggccatgcgctatgctgtgctcggcggtggcaagcgcgtgcggccgctgctggtgcatgccgccggtgaagtgacgggtgcgagcgccgaggcctgcgacgccgcagcctgcgcggtggagatgatccacgcctactcgcttgtacacgacgacatgccctgcatggatgacgacgacctgcgccgcggccgcccgaccgtgcacaaggcctatgacgaagccacggcgctgctcgtcggcgacgcgctgcagacgcaggcgttcatcgtgctggcgcaggcacaatcggtacaggccgaggcgcggctgaagctcgtggccgaactggccgtggcatctggctcggtcggcatggccggtggccaggccatcgacctgcagaacgtgggcaaggccatgtcgcgcgatgcgctggaggccatgcaccgcatgaagaccggtgcgctgctgcgcgcaagcgtgcgcatgggcgcgctctgtggtgaaatcgacgcgcagggactgtcggcgctggaccggtatgccgcagccgtgggtttggcgtttcaggtagtagacgatattctggacgtcaccgccgataccgccacgcttggcaagaccgccggcaaggacgccgcgcatgacaagccgacctatgtctcgctgatggggctggaagcggcgcgcgcactggcggccgagctgcgcgagtccgcgcatgcggcactggccggtttcggcgcacgcgcgggccgcctggccgatctggcggacctgatcgtgctgcgcacacattga

SEQ ID NO: 57404 - protein, 294 aa, Ralstonia eutropha JMP134
MTEFASWMRAQGARTEAALDQTLPNADTVPHTLHEAMRYAVLGGGKRVRPLLVHAAGEVTGASAEACDAAACAVEMIHAYSLVHDDMPCMDDDDLRRGRPTVHKAYDEATALLVGDALQTQAFIVLAQAQSVQAEARLKLVAELAVASGSVGMAGGQAIDLQNVGKAMSRDALEAMHRMKTGALLRASVRMGALCGEIDAQGLSALDRYAAAVGLAFQVVDDILDVTADTATLGKTAGKDAAHDKPTYVSLMGLEAARALAAELRESAHAALAGFGARAGRLADLADLIVLRTH

SEQ ID NO: 57405 - DNA, 891 bp, Thiobacillus denitrificans ATCC 25259
  CDS (1)..(891): transl_table=11
gtgatgagtgatttttccgcctggacacaggcatgccaggcgcgtatcgaacacgtgctggccgagcggctgccgccgtccgacattgcaccgaagcggctgcacgaggccatgcgctacgcggtgctgggcggcggaaaacgcgtgcgtccgctgctggcgttcgccgccggcgacgtcacgggcgccgccgtcgaacaggtgcagcacgcggcggccgcggtcgaattgattcacgcctattcgctcgttcacgacgacatgccggcgatggacgacgacgcgctgcgccgcggcaagcccaccgtccatgtcgagttcgacgagccgaccgcgctgctcgtgggcgacgcgctgcagagcctcgccttcgacatcctggcgagccccggactggcgcaggccgcttcgacgcaactcgcgatggtgcagctgctggcccgggcgtccggctcgcgcggcatggccggcggccaggcgatcgacctcgcgaacgtcggcaagtctctcgacctcaccgaactcgaattcatgcacatccacaagacgggcgccctgatccgcgcgtcggtcctgctcggcgccgagtgcggcacgctgtcggagcctgcgcgcacggcgctcgaccattacgcgaaatgcatcggcctcgccttccaggtcgtcgacgatgtgctcgacgccgaggcgtcgaccgcgacgctcggcaaaaccgcgggcaaggacgcggcgaacaacaagccgacctacgtcagtctgctcggcgtccaacgcgcccgcgaacgggccctggaattgcgcgccgacgcctgcgccgcgctcgatccgctcggtccgtccgcgcgacgcctgcgcgagctggcggatttcgtcgtcgagcggacgttctga

SEQ ID NO: 57406 - protein, 296 aa, Thiobacillus denitrificans ATCC 25259
MMSDFSAWTQACQARIEHVLAERLPPSDIAPKRLHEAMRYAVLGGGKRVRPLLAFAAGDVTGAAVEQVQHAAAAVELIHAYSLVHDDMPAMDDDALRRGKPTVHVEFDEPTALLVGDALQSLAFDILASPGLAQAASTQLAMVQLLARASGSRGMAGGQAIDLANVGKSLDLTELEFMHIHKTGALIRASVLLGAECGTLSEPARTALDHYAKCIGLAFQVVDDVLDAEASTATLGKTAGKDAANNKPTYVSLLGVQRARERALELRADACAALDPLGPSARRLRELADFVVERTF

SEQ ID NO: 57407 - DNA, 930 bp, Anabaena variabilis ATCC 29413
  CDS (1)..(930): transl_table=11
atggtagcagctgataacctccagaagatgtcagaggaagccaaatttaatctagtagcttatcttaaagagcggcaaaaactttgtgaagcggctttggatgaagccatacctgttatttatccagaaaaaatttatgaatcgatgcgctactccttattagctggaggtaagcgcttgcgtccgattctttgtctggctacttcggaaatgatgggtggaacaatcgaaatagctatgccaacagcttgcgctgtggaaatgatccacaccatgtctttgattcacgacgacttgccagcaatggataacgacgattaccgtcgcggtatgctgacgaatcacaaggtatatggtgatgatattgcgattttggcgggagatggcttattagcctatgctttcgagttcgtagctatccgtactcctgaaagcgtgcctagagaccgagtattgcaggtagtagcccgattgggacgagcattaggagctgctggcttggttgggggtcaagtagttgacttagactcagaagggaaatcagatatttccttagaaacgctcaattttattcataatcacaaaacagcagctcttttagaagcttgtgtggtctgtggcggcattttagctggggcatcatcagaagatgtacaaagactttcacggtattctcaaaatattgggctagcatttcaaatcatcgatgatattcttgatatcacttctactcaagagcaattaggcaagactgcgggtaaagaccttttagcgaagaaagtcacctatcctagcctatggggaattgaacaatcacgggtcaaagcccaacagctaattgaagcagcttgtgcagaactagaaccatttggagaagatgcacagcctctgaaagcgatcgctcacttcatcactagccgtaatcactaa

SEQ ID NO: 57408 - protein, 309 aa, Anabaena variabilis ATCC 29413
MVAADNLQKMSEEAKFNLVAYLKERQKLCEAALDEAIPVIYPEKIYESMRYSLLAGGKRLRPILCLATSEMMGGTIEIAMPTACAVEMIHTMSLIHDDLPAMDNDDYRRGMLTNHKVYGDDIAILAGDGLLAYAFEFVAIRTPESVPRDRVLQVVARLGRALGAAGLVGGQVVDLDSEGKSDISLETLNFIHNHKTAALLEACVVCGGILAGASSEDVQRLSRYSQNIGLAFQIIDDILDITSTQEQLGKTAGKDLLAKKVTYPSLWGIEQSRVKAQQLIEAACAELEPFGEDAQPLKAIAHFITSRNH

SEQ ID NO: 57409 - DNA, 888 bp, Carboxydothermus hydrogenoformans Z-2901
  CDS (1)..(888): transl_table=11
atggagtttgaaagcctttttaaaagatatcggaaaatggtagaagaaggtattgggcgttttctgcccccggatgatacctatccgccagtaattcaccaagcgatgaactacagccttaaagctggtgggaaaaggttaagaccagtcctgatgctggctgcaggggaatggagtgggattgctccggaaaaattgctcccggcggcggtaggggtggagtgtctgcacacctattcgcttattcacgatgacctgccggcaatggataacgatgattttcgcaggggaaagccaactaaccacaaagtttttggggaagccattgctattttagcgggagatgctttattaaccaaagcttttgaactaactgccaagaccttggaacaggggatacccgcggagcgggtggtccgggtaattcaagaactggcggtagcttccggctccgaggggcttattgcaggccaggtggtggatttaagctccagtgaagccaaaaaagaccccgaggttttgttatatattcatcttaacaaaactgctcgcctgatacgctatagtttaattgccggagggattttggcgggagctaccgaagaagaaattaaagctctggatgattacgggcgccatttgggcctagcttttcaaattgttgatgacctgttggatgtagttggtgattttcaaaagattggaaaaccggtggggagtgacgaaaaaaatcaaaagcttacctatgtttcgctttttggtattgaggaaaccaaaaaaagggcggaagaagaaattaatgcggcaaagaatgttttaaagccctatggtgagaaaagcagcttttttataaagcttgctgaatttatcctaaaaagagaatcttag

SEQ ID NO: 57410 - protein, 295 aa, Carboxydothermus hydrogenoformans Z-2901
MEFESLFKRYRKMVEEGIGRFLPPDDTYPPVIHQAMNYSLKAGGKRLRPVLMLAAGEWSGIAPEKLLPAAVGVECLHTYSLIHDDLPAMDNDDFRRGKPTNHKVFGEAIAILAGDALLTKAFELTAKTLEQGIPAERVVRVIQELAVASGSEGLIAGQVVDLSSSEAKKDPEVLLYIHLNKTARLIRYSLIAGGILAGATEEEIKALDDYGRHLGLAFQIVDDLLDVVGDFQKIGKPVGSDEKNQKLTYVSLFGIEETKKRAEEEINAAKNVLKPYGEKSSFFIKLAEFILKRES

SEQ ID NO: 57411 - DNA, 891 bp, Synechococcus sp. CC9605
  CDS (1)..(891): transl_table=11
atgagcgccgagttcgatttcaaggcctatctcggcaaggccaaagagcaggtggaagcggccctagatggatccctcggtcctgagcggccggagtccctcagggaagcgatgcgctactcgctgcttgcaggtggcaagcgcctgcgcccgattctctgcctcgccgcctgtgagctggccggcggggaagcgacacaggccctgcccacggcggtggcgctggaaatgatccacaccatgtcgttgattcacgacgacctgccggcgatggatgacgacgacctgcgccgtggtcgtcccaccaaccacaaggtgtacggcgaagccgtggccatccttgctggggatgccctgttgacccgcgccttcgaaatggtggcgctgcgcagtccgggtgtgccggctgagcggttgctcaaggtggtgggagaactctcgttggtggctggcgccccgggcctggtgggcggccaggtggtggatctggaaagcgagggcaaggaggtggatcttgaaaccctcgagtacatccacctccacaaaaccggagccctgttgagcgcttgtgtaatcaccggggcgatgatcggcggggctgatgaggcgctgatcaaggctctgcgcacctatgccagggggatcggcctcgccttccagatcatcgacgacatcctcgacatcactgccagcagcgaggttctgggcaaaaccgccggcaaggacctcatcgccgacaagaccacctatcccaagcttctggggcttgatgagtcccgccgccgggccgatgcgttggtgaacgaagcgaaagaatcgcttcaaccctgggccgagaaggccgtgcccctgctggcgttggccgacttcatcaccagccgcgaccgatga

SEQ ID NO: 57412 - protein, 296 aa, Synechococcus sp. CC9605
MSAEFDFKAYLGKAKEQVEAALDGSLGPERPESLREAMRYSLLAGGKRLRPILCLAACELAGGEATQALPTAVALEMIHTMSLIHDDLPAMDDDDLRRGRPTNHKVYGEAVAILAGDALLTRAFEMVALRSPGVPAERLLKVVGELSLVAGAPGLVGGQVVDLESEGKEVDLETLEYIHLHKTGALLSACVITGAMIGGADEALIKALRTYARGIGLAFQIIDDILDITASSEVLGKTAGKDLIADKTTYPKLLGLDESRRRADALVNEAKESLQPWAEKAVPLLALADFITSRDR

SEQ ID NO: 57413 - DNA, 894 bp, Geobacter metallireducens GS-15
  CDS (1)..(894): transl_table=11
atggaccttaaaaactatctcaaagaacgctgtgccattgttgatgaagctcttgaacgctccctgcccggtgagggggaccttcccgtttccgttcatcgcgccatgcgctattcggttttcgcaggggggaaacggattcggccggttctgatgctcgccgcctgtgaggcggtgggaggaactccggacttggcgcttcccgctgcgtgcgccatggagatgatccacacctattccctcatccacgacgatctccccgcaatggacgacgacgatttccgccgcggacgtcccacaaaccacaaggttttcggcgaggcaatcgccatccttgccggtgatgcgctccttacggaagcgttcatcctcatgagctctcccgaatacgccgcaaaggccggacatgcccgtattcttccggttatccacgagattggcatctgtgccggttcccgggggatggtcggcggccaagtagtcgacatggagagcgaggggaaaaaggatatcgatctggccacggtccagtacatacacacccacaagaccggcgccctcatgaaggcttcggtcaaggcgggcgcaatactcggcggagcggaaggggacgcccttgcggccatgacccgttacggcgaggccatcggccttgcgttccagattgccgatgacatccttgacatcgagggtaccaccgagcagatcggcaaggatgcggggagcgacgaagcccgggggaaagccacctatccggcggtcatggggcttgccgattccaaacgccgcgcccaggagttggtggatctggccctcgaagccctttcccccttcggcgagaaagcggaacccctgcgggagatcgcccgttacatcgtatcccggaaatcgtaa

SEQ ID NO: 57414 - protein, 297 aa, Geobacter metallireducens GS-15
MDLKNYLKERCAIVDEALERSLPGEGDLPVSVHRAMRYSVFAGGKRIRPVLMLAACEAVGGTPDLALPAACAMEMIHTYSLIHDDLPAMDDDDFRRGRPTNHKVFGEAIAILAGDALLTEAFILMSSPEYAAKAGHARILPVIHEIGICAGSRGMVGGQVVDMESEGKKDIDLATVQYIHTHKTGALMKASVKAGAILGGAEGDALAAMTRYGEAIGLAFQIADDILDIEGTTEQIGKDAGSDEARGKATYPAVMGLADSKRRAQELVDLALEALSPFGEKAEPLREIARYIVSRKS

SEQ ID NO: 57415 - DNA, 915 bp, Desulfovibrio desulfuricans G20
  CDS (1)..(915): transl_table=11
atgtctcatgcggacgaaatgacaccgcaggccatgaagcagcggcttgcggcggaagcgctggaagtggaagcgtatcttggcgggtgccttaaagggcggggaataccctgtgatcttctgaaggccatggattacagcctgcttgccggcggtaagcgtctgcgacccgtgctgtgccttaccacggccggtcttttcggtctggcgcgcgatgcggtgctgccttttgccgcggccatcgagcttattcatacatattctctggtgcacgacgacctgcccgccatggatgatgacgacctgcggcgcggcatgccatcgaatcataaaaaattcggcgaggccacagccatactggccggtgacggcctgcttaccgaagcgttttgcctgatggcatcggcgggagctgctgtggaagcctccagagtgctttccgccctgtctgtggtggctgctgcggcaggcgccggaggcatggtgggaggtcagatgctggatatggagtacaccggccgcgctgatgtgtctttggacatgcttcgcggtatgcacgccatgaaaacaggtgcgctcatccgctgttcgtgtcttgccggagccctgcttgcaggcgcaccgcatgaagatgccgaacggatatcccactatggagaagccattggagccgcttttcagattgttgatgacattcttgatgaaaccggcgacgaggcgacactgggcaagccggtgggcagtgacagcgggcagggcaagaacacatatccgagcctgctggggcttgagcgcagcagagagctggcgcagcagcaggtggatgccgccgtggcctgcctgtcggggtatgaaggtgaaaatgcgcttttcctcagggcacttgcacagtacattgccgatcgggccatgtga

SEQ ID NO: 57416 - protein, 304 aa, Desulfovibrio desulfuricans G20
MSHADEMTPQAMKQRLAAEALEVEAYLGGCLKGRGIPCDLLKAMDYSLLAGGKRLRPVLCLTTAGLFGLARDAVLPFAAAIELIHTYSLVHDDLPAMDDDDLRRGMPSNHKKFGEATAILAGDGLLTEAFCLMASAGAAVEASRVLSALSVVAAAAGAGGMVGGQMLDMEYTGRADVSLDMLRGMHAMKTGALIRCSCLAGALLAGAPHEDAERISHYGEAIGAAFQIVDDILDETGDEATLGKPVGSDSGQGKNTYPSLLGLERSRELAQQQVDAAVACLSGYEGENALFLRALAQYIADRAM

SEQ ID NO: 57417 - DNA, 906 bp, Synechococcus elongatus PCC 7942
  CDS (1)..(906): transl_table=11
atggtcgcctcttcatcgcttcgcttcgatctcaaaagctacttaaaggagcggcagcgccaagttgaggcagctctaaatgcgatcttgccaccccaagatccaccgttgatctacgagtcgatgcgctattccctgctggcagaaggcaagcggctacggcccattctttgcctcgccagttgcgaactagcgggtggaacggctgcgatcgccctaccgacagcctgtgccttggagatggtgcacaccatgtccctgatccacgacgacctgccgtcgatggacaacgatgattttcggcgcggtcgacccaccaatcacaaggtttacggcgaagacatcgccattctggccggtgatgcactgctgacttacgcctttgaagcgatcgcccgtcacacgcccgaagtgcctgccgatcgcgtcctcaaggtgattgccgccttagcacgagccgttggagccgaagggcttgttggcgggcaagtggtggatctgcaatccgagggacgggatgacgtcaacctcgaaaccctgcactacatccacacccacaaaacgggtgcgctcttggaagtctctgtggtttctggtgccattctggccggcgcaagcgaagagctccaagagcagctgcgcacctatgctcaaaaaattggtctggctttccaagtgatcgacgacatcttggacatcacagcaacggccgaagaactgggtaaaacggcgggcaaggatctggctgcgaaaaaagcaacctaccccagcctgctcggtctggacgcatctcgcgagtatgccgatcagctgattaccgaagcgaaagcagcgatcgcagcctttggtgccgaagccgatccactgcgggcgatcgctgactacattacggcacggaaacactga

SEQ ID NO: 57418 - protein, 301 aa, Synechococcus elongatus PCC 7942
MVASSSLRFDLKSYLKERQRQVEAALNAILPPQDPPLIYESMRYSLLAEGKRLRPILCLASCELAGGTAAIALPTACALEMVHTMSLIHDDLPSMDNDDFRRGRPTNHKVYGEDIAILAGDALLTYAFEAIARHTPEVPADRVLKVIAALARAVGAEGLVGGQVVDLQSEGRDDVNLETLHYIHTHKTGALLEVSVVSGAILAGASEELQEQLRTYAQKIGLAFQVIDDILDITATAEELGKTAGKDLAAKKATYPSLLGLDASREYADQLITEAKAAIAAFGAEADPLRAIADYITARKH

SEQ ID NO: 57419 - DNA, 918 bp, Rhodospirillum rubrum ATCC 11170
  CDS (1)..(918): transl_table=11
gtgggggaccttgggaccgtgagtcatctcaacgaagtcatggccgccgaagcgctggccatcaacgatcacctgtcgcaactgatgccggcgacggacggccccgaggggcgggtcgtcgacgccatgcgctacgccgcccttgagggcggcaagcgtctgcggccgtttctggtcttgcagtcggcgcagttgttttcggtgtcgcgggcctgcgcgctgaatgtcgccgccgccatcgaaatgatccactgctactcgctgatccacgacgacctgccggcgatggataacgatgatctgcgccggggccgccccaccgtccatcggcaatacgacgagccgaccgccatcctggccggcgacgccctgttgaccaaggccttcgaggtcatcgccctgcccggcacccattccgatccggcggtgcgctgcgacttggtcacggagctggcgatcgccgccggcgccaagggcatggtcggcggtcagatgatcgatctgatggccgaacgcggcctgatcgacggcgcgctcgacgttccggcgatcacccgcatgcaccagctcaagactgggcggctgatcagcttctcctcgatcgccggggcgatcctgggcaaggcgccgcgctcgcagcgtcaggccctgttcaattacgcccatgatctgggtctggccttccagatcgccgacgacctgctcgatgtggagggcgataccgccaccctgggcaagaccgccggcaaggacgaggcctcgggcaaatccaccttcgtttccctgcttggcctcgagcgcgcccgcgatcaggccgacatgctggccgaacaggccgtcaatcaccttgacgccttcgacgagaaggccgacctgctgcgcgccgttgcccgtttcgtcgtcgaccgcaaaagctga

SEQ ID NO: 57420 - protein, 305 aa, Rhodospirillum rubrum ATCC 11170
MGDLGTVSHLNEVMAAEALAINDHLSQLMPATDGPEGRVVDAMRYAALEGGKRLRPFLVLQSAQLFSVSRACALNVAAAIEMIHCYSLIHDDLPAMDNDDLRRGRPTVHRQYDEPTAILAGDALLTKAFEVIALPGTHSDPAVRCDLVTELAIAAGAKGMVGGQMIDLMAERGLIDGALDVPAITRMHQLKTGRLISFSSIAGAILGKAPRSQRQALFNYAHDLGLAFQIADDLLDVEGDTATLGKTAGKDEASGKSTFVSLLGLERARDQADMLAEQAVNHLDAFDEKADLLRAVARFVVDRKS

SEQ ID NO: 57421 - DNA, 894 bp, Moorella thermoacetica ATCC 39073
  CDS (1)..(894): transl_table=11
gtgaaaaccacggaacttgaaagctacctggctgaacggcggcaactggtccaggaggccctggcccgcaacctgccacctccggacacctacccgccggcggtgcaccaggccatgcactacagcctttttgccgggggtaaaaggctaaggcctatcctcgtcctggctgccggcgaagccgtgggcagccagccggagcccttattaccggcagcctgcgccgtggaatttatccacacctattcccttatccacgatgacctgccggcgatggataatgacgattaccgccgcggccggccgacatgccataaagtctacggtgaagctatcgccctgctggccggtgatgccctcctgaccctagcttttgaagtcttgagcaggataccggcgaccataccgccggagagaattctccgggcaaccagggagctggctgcctccgccggtagccaggggcttataggcggccaggtggtggatatggaggccgaagggcagccggttactttagaaaaggtaaactacattcataaccataaaaccggtagcctgatccgggcctgcctgcgcctggggggcatcctgggaggcgcgggagaggaacaactggccttactgacccgttacggggaagccctgggcctggccttccagataaccgacgacattctggatattaccggcgatttcagccagacgggcaagcagggcggggtggatgccgcccggggcaaggcgacctacccggcctgcctgggggtggaggcctcccggcaaaaggccggggaattatgcgctgaggcaggagccttggccagggccctgggaccggcggccgaacccctggaactcctggcaggctttgtcctaaggcggcaaggctga

SEQ ID NO: 57422 - protein, 297 aa, Moorella thermoacetica ATCC 39073
MKTTELESYLAERRQLVQEALARNLPPPDTYPPAVHQAMHYSLFAGGKRLRPILVLAAGEAVGSQPEPLLPAACAVEFIHTYSLIHDDLPAMDNDDYRRGRPTCHKVYGEAIALLAGDALLTLAFEVLSRIPATIPPERILRATRELAASAGSQGLIGGQVVDMEAEGQPVTLEKVNYIHNHKTGSLIRACLRLGGILGGAGEEQLALLTRYGEALGLAFQITDDILDITGDFSQTGKQGGVDAARGKATYPACLGVEASRQKAGELCAEAGALARALGPAAEPLELLAGFVLRRQG

SEQ ID NO: 57423 - DNA, 885 bp, Burkholderia thailandensis E264
  CDS (1)..(885): transl_table=11
atgacattcgaccaatggatgcgctcggtgctcgagcgtgtcgagacggccctcggccattatttgccggctgagactgtggcgcccgcgcaactgcacgaggcgatgcgttatgcggtgctcgggggcggcaaacgggtgcgtccgctgctgtgccatgcggcgggcgagctcacgggcgcgtcggaggcggcgctgaacgccgcgtcgtcggcgctcgagatgattcacgtatattcgctcgtgcacgacgacatgccgtgcatggacgacgatgcgctgcgtcgcggcaagccgaccgtccacgtcaagtacgacgagccgaccgcgctcctcgtcggcgacgcgctgcagtcacaggccttcgtcgcgctgaccgacgccgccgcgctgccggccgaccggcaggccgcgctcgtgcgcgagctggcgctcgcgagcggctcgatcggcatggcgggcggtcaggcgatcgatctcgcgagcgtcggcgtcgcgctcacgcgcgacgcgctggagacgatgcaccggatgaagacgggcgcgctgttgcgcgcgtccgtgcgcatgggcgcgcttgcgggcgagacgccgtccgacgacgcgatgcgcgcgctcgacgcctatgcggcggctgtcggcctcgcgttccaggtggtggacgacattctcgacgtcaccaccgattccgcgacgctcggcaagacggccggcaaggacgcggcgaacgacaagccgacctacgtgtcgatcatcggtctcgacgcgtcgcgcgcgcttgccgcgcgactgcgcgccgacgcgcacgccgcgctccagccgttcggcgcgcgcgcgcagcgcctggccgaactggcggacctggtggtgaaccgggtcagctga

SEQ ID NO: 57424 - protein, 294 aa, Burkholderia thailandensis E264
MTFDQWMRSVLERVETALGHYLPAETVAPAQLHEAMRYAVLGGGKRVRPLLCHAAGELTGASEAALNAASSALEMIHVYSLVHDDMPCMDDDALRRGKPTVHVKYDEPTALLVGDALQSQAFVALTDAAALPADRQAALVRELALASGSIGMAGGQAIDLASVGVALTRDALETMHRMKTGALLRASVRMGALAGETPSDDAMRALDAYAAAVGLAFQVVDDILDVTTDSATLGKTAGKDAANDKPTYVSIIGLDASRALAARLRADAHAALQPFGARAQRLAELADLVVNRVS

SEQ ID NO: 57425 - DNA, 927 bp, Syntrophus aciditrophicus SB
  CDS (1)..(927): transl_table=11
atggagagaaaaatgaatcctgaatccgggctggatctgaatgcctacatcaaggaaaaaaagctgcggatcgatgaagccatcgaccgctacctgcccggcgaggaggaatccccgggtgaactttttaaagcgatgcggtacagcctttttgcaggcgggaagaggatccgtcccattctctgtcttgcggctgcagaagctgttggaacttcagtctcttccgattgccttcttccggtggcctgcgccctcgaatacatccatacctattcattgattcatgacgatcttcccgccatggacaatgacgactaccgccggggaaagcccaccagccacaaggttttcggtgatgctctggccattctcgccggggacgctctgctcacggaggcctttgaactgatgacccgaaccgattttcataccggcctggccccggaaattctcctgagagtcatcagggaaatcgctgctgctgccggggctttcggcatggtgggaggacaggtggaagatttgcgtgcggaaggaaaacccggaaatctggacacgctgaaccgaattcataatcggaaaacaggggcaatgatcgtcgtttcccttagagcaggggcgatactttccggaggatcggagcaggccgtttcggcattgacagattacggccacaagatcggcctggttttccagattgccgacgacattctcaacgtggagggagaccggactgtgctgggtaaaagcacggggagtgacgcgagccgtggtaaaatgaccttccctctccttatgggattggaaccatcccgtcagaaggcctttgccctggttgaggaggctctgcgcgatcttgacggttttgacaaccgggcgactcctctgcggctgatggccagatattttgtggagcgccgactttaa

SEQ ID NO: 57426 - protein, 308 aa, Syntrophus aciditrophicus SB
MERKMNPESGLDLNAYIKEKKLRIDEAIDRYLPGEEESPGELFKAMRYSLFAGGKRIRPILCLAAAEAVGTSVSSDCLLPVACALEYIHTYSLIHDDLPAMDNDDYRRGKPTSHKVFGDALAILAGDALLTEAFELMTRTDFHTGLAPEILLRVIREIAAAAGAFGMVGGQVEDLRAEGKPGNLDTLNRIHNRKTGAMIVVSLRAGAILSGGSEQAVSALTDYGHKIGLVFQIADDILNVEGDRTVLGKSTGSDASRGKMTFPLLMGLEPSRQKAFALVEEALRDLDGFDNRATPLRLMARYFVERRL

SEQ ID NO: 57427 - DNA, 882 bp, Staphylococcus aureus subsp. aureus NCTC 8325
  CDS (1)..(882): transl_table=11
atgacgaatctaccgatgaataaattaatagatgaagtcaataatgaattatcggttgcgataaataaatcagtaatggatactcagctagaagaaagtatgttgtattcattaaatgctggaggtaaacgcatccgaccagttctgttattactcactttagattcactaaataccgagtatgagttaggtatgaagagcgcaattgcactagaaatgattcatacatattcacttattcatgatgacctaccagcgatggataatgatgattatcgacgaggaaaattaacaaatcataaagtatatggtgagtggactgcgatattagcaggtgatgctttattaactaaagcatttgaacttatttcaagtgatgatagattaactgatgaagtaaaaataaaagttctacaacggctgtcaatagcaagtggtcatgttggaatggtcggcggtcaaatgttagatatgcaaagcgaaggccaaccaattgatcttgaaactttggaaatgatacacaaaacaaaaacaggagcattattaacttttgcggttatgagtgcagcagatatcgctaatgtcgatgatacaactaaagaacatttagaaagttatagttatcatttaggtatgatgttccagattaaagatgatttattagactgctatggtgatgaagcaaagttaggtaaaaaagtgggcagcgatcttgaaaataataaaagtacgtacgtgagtttattagggaaagatggcgcagaagataaattgacttatcatagagacgcagcagtggatgaactaacgcaaattgatgaacaattcaatacaaaacacttattagaaatcgttgatttattttatagcagggatcactaa

SEQ ID NO: 57428 - protein, 293 aa, Staphylococcus aureus subsp. aureus NCTC 8325
MTNLPMNKLIDEVNNELSVAINKSVMDTQLEESMLYSLNAGGKRIRPVLLLLTLDSLNTEYELGMKSAIALEMIHTYSLIHDDLPAMDNDDYRRGKLTNHKVYGEWTAILAGDALLTKAFELISSDDRLTDEVKIKVLQRLSIASGHVGMVGGQMLDMQSEGQPIDLETLEMIHKTKTGALLTFAVMSAADIANVDDTTKEHLESYSYHLGMMFQIKDDLLDCYGDEAKLGKKVGSDLENNKSTYVSLLGKDGAEDKLTYHRDAAVDELTQIDEQFNTKHLLEIVDLFYSRDH

SEQ ID NO: 57429 - DNA, 870 bp, Desulfitobacterium hafniense Y51
  CDS (1)..(870): transl_table=11
atgtttcaaaaggaattagaagattatgctcgcttagtggattcgtatttggcacaatttccttggccaaccggcacccttgctgaaagcatgaactattctctttccgcagggggtaaacgcatccgccctgttctggctctggccgcggcccatgctgtgggaggggactgtgaagacatccttccggcggtctgtgctttggagctgatacatacctattcattaatccatgatgatcttcctgccatggacaatgatgattaccggcgggggcgtttggccaatcataaagtttttggagaagggcaggccattctggccggtgatgctcttttaacctatgcttttgagctgattgcgcagcctatgagcggagtagagccgcagcgccagctgcgggcgattagggaagttgcccaagcagcggggccggagggaatggtcggcggtcagatgctggatttggaagctgaagaaaagcagttaaaccttgctgagctggagcaggtccatcgtctgaaaaccggagcgatattggtggttgccgcccgtttaggggcaattctcgccggaggaacggaagagaagatcgaagcgttgaccagctatgctcaagccatcggtctggctttccagattaaggacgatattcttgatctggaaagtgatagcgagaccttaggcaagcctgtacatagcgatctccgccagcataaatccacttatccctctttaatgggtttggcaggcgctaagctggaattgaagataaagaccgatgaagctcatgccgccttggcggttttaggagagcgggcgggtttcctgcatgaattggctgattatatagctcaacggaagtattga

SEQ ID NO: 57430 - protein, 289 aa, Desulfitobacterium hafniense Y51
MFQKELEDYARLVDSYLAQFPWPTGTLAESMNYSLSAGGKRIRPVLALAAAHAVGGDCEDILPAVCALELIHTYSLIHDDLPAMDNDDYRRGRLANHKVFGEGQAILAGDALLTYAFELIAQPMSGVEPQRQLRAIREVAQAAGPEGMVGGQMLDLEAEEKQLNLAELEQVHRLKTGAILVVAARLGAILAGGTEEKIEALTSYAQAIGLAFQIKDDILDLESDSETLGKPVHSDLRQHKSTYPSLMGLAGAKLELKIKTDEAHAALAVLGERAGFLHELADYIAQRKY

SEQ ID NO: 57431 - DNA, 888 bp, Saccharophagus degradans 2-40
  CDS (1)..(888): transl_table=11
atgagcacagaattgacccactttcttgccaagtaccgcgagcacactaacggtttgctagaagaacgcttaatcggcctaaagcactacaacaccgacctaatagaagccatgcgctacagcttattgctgggcggtaaacgtgtacgccccgtattagtgtatgccgcagcctacgcaactggcggcatatctgcggccgccgacgattgcgcctgcgcaatagaggccattcacacctatagccttattcacgacgatttaccggcaatggatgacgacgcattgcgccgaggccaacccacctgtcatattgcctacagtgaggcaacagctatactcgcgggtgacgcgctacagtgccaagcttttgaatggctagcgaatagccagcacatgcctgcaagcgctgcattacaggcaattgccgcacttgcgaaggcctctggcgctagcggcatggttttggggcaagctatcgatcttgccgcggttgataaaagcgtagatttgcaacacttagaaaccatgcaccagcacaaaacaggcgcactcatcagcgcaagcgtagaaatgggcgcgattgccgccggtgctacccccacccaaaccgcgcaattacgccaatatgccagcgccattggcttggcgtttcaggtgcaagacgacatactcgacgttaccgccaatacagccacattgggcaaagaagctggcgccgatgcagagcgcaacaagccaacttatgtatcactccttggtttagatggcgccaaacataaggcgagcgaacttttgcagcaggctttggcgtcgatcaaagattttgacgagcgagcggatatactacgccagttggcgacatatattgtgcagcgcgaccattaa

SEQ ID NO: 57432 - protein, 295 aa, Saccharophagus degradans 2-40
MSTELTHFLAKYREHTNGLLEERLIGLKHYNTDLIEAMRYSLLLGGKRVRPVLVYAAAYATGGISAAADDCACAIEAIHTYSLIHDDLPAMDDDALRRGQPTCHIAYSEATAILAGDALQCQAFEWLANSQHMPASAALQAIAALAKASGASGMVLGQAIDLAAVDKSVDLQHLETMHQHKTGALISASVEMGAIAAGATPTQTAQLRQYASAIGLAFQVQDDILDVTANTATLGKEAGADAERNKPTYVSLLGLDGAKHKASELLQQALASIKDFDERADILRQLATYIVQRDH

SEQ ID NO: 57433 - DNA, 891 bp, Methylobacillus flagellatus KT
  CDS (1)..(891): transl_table=11
atgaccgatttccagagctgggcccgccatacccaacaacgtatggaacacacgctggacaacttgcttccagcatcgtacattgcccccacccgcctgcatgaggccatgcgctatgccgtgctgggcggcggcaagcgtgtacgcgcactgcttgcacatgctgctggcgaactctgtggtgccgcccccgaaaaagtggatattgccgctgctgcggtggagctgatccatgcctattccctcgtgcatgacgacatgccgtgcatggacgacgacgacctgcgccgcggcaagccatcctgtcacaagcaatatgacgacgctacggcgctgctggtcggcgatgccttgcagaccctcgcctttcagtccctggcgacgcccggtttgtgtacggaccccggcaggcagctggaaatggtcagtctcctggccatcgccagtggctcacgcggcatggcgggagggcaggccatcgaccttgacagcgtcggcaaggcacttgagcagtccgagctggaatacatgcatatccataaaacaggtgccctgatccgagcagcggccctgctcggcgcacactgcgccaatgatctggaccaggagcggttacatgcgatagatcattacgcccaggccatcggccttgccttccaagtggtggacgatatccttgacgcagaagccgacagtgagaccctgggcaaaacagcgggcaaggatgcccaaagcgacaagccgacttatgtcaccatcctgggcatcgaccatgccaaacagctagcaaaggaactgctggatggcgcgcttgcccagctggcaccttttggcgaagccgcccaccgcttagagcaggtggcgcacttcatcactcaacgtagcttttaa

SEQ ID NO: 57434 - protein, 296 aa, Methylobacillus flagellatus KT
MTDFQSWARHTQQRMEHTLDNLLPASYIAPTRLHEAMRYAVLGGGKRVRALLAHAAGELCGAAPEKVDIAAAAVELIHAYSLVHDDMPCMDDDDLRRGKPSCHKQYDDATALLVGDALQTLAFQSLATPGLCTDPGRQLEMVSLLAIASGSRGMAGGQAIDLDSVGKALEQSELEYMHIHKTGALIRAAALLGAHCANDLDQERLHAIDHYAQAIGLAFQVVDDILDAEADSETLGKTAGKDAQSDKPTYVTILGIDHAKQLAKELLDGALAQLAPFGEAAHRLEQVAHFITQRSF

SEQ ID NO: 57435 - DNA, 882 bp, Burkholderia xenovorans LB400
  CDS (1)..(882): transl_table=11
atgacattcgaacaatggatgcgctcggtgctggagcgcgtcgaaacggcactagaccattatctgccgggcgaggccaccgagcccgccacgctgcatgaagccatgcgctacgcggtgctgggcggcggcaagcgggttcgcccgctgctgtgccacgcggctggcgaactgaccggcgcgcgtgccgaatgcctcgatgcggcagccgctgcgctggaaatgatccacgtgtactcgcttgtccacgacgacatgccatgcatggacgacgacgcgctgcgtcgcggcaagcccacggtacacgtcaagtatgacgaagccacggcattgctggtcggcgacgcgctgcaatcgcaggcgttcgtcgcgctgacctcggacgtgctcgctccggcgcaacaggccgcgctcgtgcgcgaactggcgctggcgagcggctcggtcggcatgtgcggcggccaggccatcgacctggcgagcgtcggccacacgctgacgcgcacgcagctcgaaaccatgcaccgcatgaaaaccggtgccttgctgcgcgccgcggtgcgcatgggcgcgctggctggcgaaacgccggacgcagcggccatgcgctcgctcgacgcatattcggctgctgtcggcctcgcgtttcaggttgtcgacgacattctcgacgtcacgaccgattccgccacgctcggcaaaaccgcaggtaaagacgcgaaggacggcaagccgacctacgtgtcgatcattggactcgacgcgtcgcgtgcgctcgcagcgcaactgcgcagtgacgctcacgccgcgctggcgccgttcggcgcacgcgcgcagcgtcttgccgaattggccgatctggtggtgaaccgggtcagctga

SEQ ID NO: 57436 - protein, 293 aa, Burkholderia xenovorans LB400
MTFEQWMRSVLERVETALDHYLPGEATEPATLHEAMRYAVLGGGKRVRPLLCHAAGELTGARAECLDAAAAALEMIHVYSLVHDDMPCMDDDALRRGKPTVHVKYDEATALLVGDALQSQAFVALTSDVLAPAQQAALVRELALASGSVGMCGGQAIDLASVGHTLTRTQLETMHRMKTGALLRAAVRMGALAGETPDAAAMRSLDAYSAAVGLAFQVVDDILDVTTDSATLGKTAGKDAKDGKPTYVSIIGLDASRALAAQLRSDAHAALAPFGARAQRLAELADLVVNRVS

SEQ ID NO: 57437 - DNA, 885 bp, Ralstonia metallidurans CH34
  CDS (1)..(885): transl_table=11
atgagcgatttcgccacttggatgcgggcgcagggcgcccgcaccgaagccgctttggaagcggccctaccttccacggacacaattccatacaccctccatgaggcgatgcgctatgctgtgctcggcggtggcaagcgtgtgcgccccctgttagtgcacgctgcgggcgaggtggtcggtgcgacacccgaggcctgcgacgccgcagcatgcgccgtcgagatgattcacgcctattcgctggtccacgacgacatgccctgcatggacgacgacgatctgcgccgcggacgccccacggtccacaaggcctatgacgaggccacggccctgctggtcggtgacgcgctgcagagccaggcgtttatcgtgctggcccagaccccggctctggctgcggaagcgcgcctgaaagtggtggcggaactggccgtggcatcgggctcgataggcatgtgcggtggacaagccatcgacctccagaacgttggcaaggccatgacccgcgaggcgctcgaaggcatgcaccgcatgaagaccggcgccctgttgcgcgccagcgtgcgcatgggtgcgttgtgcggaaacatcgaccaggccggccttgtggcgcttgatcgatatgccgcggccgtgggattggcgttccaggtcgtggacgatattctcgacgtcactgccgacacggcaacgcttggcaagacggcgggcaaggatgccgcgaacgacaagccgacctacgtatcgctgcttggcctggatgccgcacgcgagctggctgcccagcttcgcaccgacgcccacgaggcgctggagggattcggcacacgcgctggccggctcgccgaactggccgacctgatcgtgctgcgctcaaactga

SEQ ID NO: 57438 - protein, 294 aa, Ralstonia metallidurans CH34
MSDFATWMRAQGARTEAALEAALPSTDTIPYTLHEAMRYAVLGGGKRVRPLLVHAAGEVVGATPEACDAAACAVEMIHAYSLVHDDMPCMDDDDLRRGRPTVHKAYDEATALLVGDALQSQAFIVLAQTPALAAEARLKVVAELAVASGSIGMCGGQAIDLQNVGKAMTREALEGMHRMKTGALLRASVRMGALCGNIDQAGLVALDRYAAAVGLAFQVVDDILDVTADTATLGKTAGKDAANDKPTYVSLLGLDAARELAAQLRTDAHEALEGFGTRAGRLAELADLIVLRSN

SEQ ID NO: 57439 - DNA, 948 bp, Acidobacteria bacterium Ellin345
  CDS (1)..(948): transl_table=11
atggcacagacatacgcatgcactcaggcgcgattctctgtatccgattgttatacttcttgtttcatgctgaaagaaactctcgaacaggggcgcattctcgccgacgcagctctcgagcggcttttgccgccgggaacgcagcggccgccgagcattcaccaggcgatgcgccatagcgtttttgccgggggcaagcggctgcggcccatcctggtgatggaagcagcgcgcatgattaccggctcgctgcccgatggcgtggacgaactcggcgccgctctcgagatgctccacacctactcgctcattcacgacgacctgcccgcgctcgacaacgacgacctgcgccgcggccgcccgacctgccacgtggcgttcggcgaagccaccgcgatcctcgccggcgacgcgctccagacttacgcctacgaagtgatggcacgcctgcgcacgacggcagaagccagggtccagatcatcgaagaagtcgcgcacgccaccggcaccatcgacggcatgatcggcggccaggtcctcgacctcgaagccgagcacacccacgccgatgctgccacggtggaatacatccaccgctcgaagaccggtgcgctgattactgcaagcgtggtcgcgggcggactttatgccggcgctgacaaagcccaagtccagcgcatccgcgagtttgggaagtcggcggggttggcgttccagatcgtggatgatgtgctcgacgtaacgcagacctcagagcagttgggcaaaaccgccggcaaagatacgaagtcggagaaatccacttggccgtcgttgtatggcgtcgacaagtcgctggagatggccgacgagctggtgtacacagcgaacaaacgccttgatagcttcggcgagcgcgcgacgacgttaaaggaattggcgaagtttctggtggaacgaaagaagtaa

SEQ ID NO: 57440 - protein, 315 aa, Acidobacteria bacterium Ellin345
MAQTYACTQARFSVSDCYTSCFMLKETLEQGRILADAALERLLPPGTQRPPSIHQAMRHSVFAGGKRLRPILVMEAARMITGSLPDGVDELGAALEMLHTYSLIHDDLPALDNDDLRRGRPTCHVAFGEATAILAGDALQTYAYEVMARLRTTAEARVQIIEEVAHATGTIDGMIGGQVLDLEAEHTHADAATVEYIHRSKTGALITASVVAGGLYAGADKAQVQRIREFGKSAGLAFQIVDDVLDVTQTSEQLGKTAGKDTKSEKSTWPSLYGVDKSLEMADELVYTANKRLDSFGERATTLKELAKFLVERKK

SEQ ID NO: 57441 - DNA, 894 bp, Myxococcus xanthus DK 1622
  CDS (1)..(894): transl_table=11
gtggcaacgtttcaactgaactccttcctggccgctcagcaggcgcgcgtcgaggccctgctgaacgagcgcgtggcgcggctcgggccttccgggacgccgccgcagctcgcggaggccatgcgctactccctgctggccggcggcaagcgcctgcgcccggtgctctgcctggccttcgcggacctcgtggcgcgcggaagcgccgtatcggcggtggcgggcgacgcggcgtgcgcgctggagtacgtgcacacgtactcgctggtgcatgacgacctgccggcgatggacaacgacgactaccgccggggccggctcaccaaccacaaggtgtacggcgaggccatggccatcctggcgggtgacgcgctgttgacggaggccttcacgctggtggccagtgggccggagagcatgcgcgccgcgctgtgccgggagctggcggtggcctcgggcgcggcgggcatggtgggcgggcaggtgctggacaccgccgaggaccggccgtccgcgctggactacctcatccggatgcaccgcatgaagacgggcgccctcatccgggccgcgtgccgcatgggcgtgctggccagcggtggagacgcggacgcattggcgcgcgcggacacctacggtgacgcggtggggctggccttccagattgccgatgacgtgctggacgtgacggccacggcggcggagctgggcaagcccgcgggcgcggacgccgcggccgggcgcttcaccttcccggcggtggtgggcctggaggcgtcgcggacgctggcggaccagaaggtggccgaggccatcgcggccgtacgccctctggaaggcgaggacgggccgctggcggcgttggcgcgctacacggtggagcggaagtcctaa

SEQ ID NO: 57442 - protein, 297 aa, Myxococcus xanthus DK 1622
MATFQLNSFLAAQQARVEALLNERVARLGPSGTPPQLAEAMRYSLLAGGKRLRPVLCLAFADLVARGSAVSAVAGDAACALEYVHTYSLVHDDLPAMDNDDYRRGRLTNHKVYGEAMAILAGDALLTEAFTLVASGPESMRAALCRELAVASGAAGMVGGQVLDTAEDRPSALDYLIRMHRMKTGALIRAACRMGVLASGGDADALARADTYGDAVGLAFQIADDVLDVTATAAELGKPAGADAAAGRFTFPAVVGLEASRTLADQKVAEAIAAVRPLEGEDGPLAALARYTVERKS

SEQ ID NO: 57443 - DNA, 900 bp, Rubrobacter xylanophilus DSM 9941
  CDS (1)..(900): transl_table=11
gtgaggtcggcgagcccggccggggtcgagggctttctggccctgcgcgaggtcatcgaggagtacctggaggggctgcgcttcaccgaagagcccgccctcgagcggctgcaggaggcgatgcgctactcgctgcttgccgggggaaagcgcgtgaggcccctcctctgcatggagagcgccagcctcttcggcgctcccccggagagggtgctcccctccgccgccgccatagagctgatccatacgttctccctcatccacgacgaccttcccgcgatggacaacgacgacttccgcaggggcaagcccaccagccacaagaagttcggggaggcgatggccatcctggcgggcgacgccttcttcggggagtccctcgccctcatcaccgaccaccaggaggggagcgccgagcaggtgctcgcggtcgtccgggagctcgcccacgccaccgggctcgccgggctagcgggcggccaggcgctagacctggagcacaccggccgccgggcgggcccaaaggagctggagctcacccaccaccacaagaccggggccctcatccgggcctccgcccggataggcgccatcctggccggggcgggcgaggaggggctcgaggccatctcgcggtacgccacggagcttgggctgtgcttccagatagtggacgacgtgctggacgcggtgggcagcagcgagcggctgggcaagcgggccgggggggacgccgagcggggcaaggccacgtttgtgagcgtgtttgggctcgagggggccaggagggaggccgacgccgcctgcgagcgggcgctgcgggcgctcgggcgcctggaaggccgggacacctcgaggctcgaggccctggccctcttcgtacgcgacagggaccgctga

SEQ ID NO: 57444 - protein, 299 aa, Rubrobacter xylanophilus DSM 9941
MRSASPAGVEGFLALREVIEEYLEGLRFTEEPALERLQEAMRYSLLAGGKRVRPLLCMESASLFGAPPERVLPSAAAIELIHTFSLIHDDLPAMDNDDFRRGKPTSHKKFGEAMAILAGDAFFGESLALITDHQEGSAEQVLAVVRELAHATGLAGLAGGQALDLEHTGRRAGPKELELTHHHKTGALIRASARIGAILAGAGEEGLEAISRYATELGLCFQIVDDVLDAVGSSERLGKRAGGDAERGKATFVSVFGLEGARREADAACERALRALGRLEGRDTSRLEALALFVRDRDR

SEQ ID NO: 57445 - DNA, 951 bp, Trichodesmium erythraeum IMS101
  CDS (1)..(951): transl_table=11
atgatgctaatgccaaatactggcaatctaattaatcccatgctccctcaatttcaaatagatacaacttttgacctatctaactatttagtagagcgaaaagctctcgttgaaaaagctcttgacaattctatcaaaatagtttatccagagaaaatctatgaggcaatgcgctattctctattagcaggcggtaagcgcttacgtccaattttgtgtttagcgacctgtgaattatcaggtggaaatatagaaatggcaatgcctactgcctgtgcattggagatgatccataccatgtccttgatccatgatgatttaccctcaatggataatgatgactatcgccgaggccaacttacaaatcataaagtttatggtgaagatatcgcaattcttgcaggagatggtttattaagttacgcttttgagtttgtagtcactcaaactaagaatgtactaccaaaacaagttctacaagttattgctcggttgggaaaagcttccggagcagcaggcttagttggaggccaagtagtggacttagcttctgaaggtatttcacaggtatctgaaaaaaccctacattttatccatactcataaaacaggagctcttttagaagctagtgtagtctgtggagcaatacttgcggatgtgtcccaagctaatttatacagacttgaacgctatgctcaaaatattggtttggcttttcaaatagttgatgatattctcgatattactgctacaacagaagagctagggaaaactgctggaaaggatattgaagctaaaaaagcaacctacccggtcatttggggattagaaaaatctcggtttcaggctcaaaaactagttgaaaaggccaaggcagagttagaagtttttggagacaaagtaatgccactaatagccttagcagattttattatcagccgtagtaactag

SEQ ID NO: 57446 - protein, 316 aa, Trichodesmium erythraeum IMS101
MMLMPNTGNLINPMLPQFQIDTTFDLSNYLVERKALVEKALDNSIKIVYPEKIYEAMRYSLLAGGKRLRPILCLATCELSGGNIEMAMPTACALEMIHTMSLIHDDLPSMDNDDYRRGQLTNHKVYGEDIAILAGDGLLSYAFEFVVTQTKNVLPKQVLQVIARLGKASGAAGLVGGQVVDLASEGISQVSEKTLHFIHTHKTGALLEASVVCGAILADVSQANLYRLERYAQNIGLAFQIVDDILDITATTEELGKTAGKDIEAKKATYPVIWGLEKSRFQAQKLVEKAKAELEVFGDKVMPLIALADFIISRSN

SEQ ID NO: 57447 - DNA, 939 bp, Synechococcus sp. CC9311
  CDS (1)..(939): transl_table=11
atgtccgctgcggccactagccccgaaagcgtgccgtcctccggtgagctcctctccacgtttgactttgcgaattacctaaagctctcccgcgatcgtgtggagatagctctggatgcctcgatgggacctgagcgtcctgaatctttgcgtgatgcgatgcgctactcccttctggcagggggaaagcggttgcgcccgattttgtgcctagcggcttgtgaattagtcgggggatcgtccgagttagccatgccaacggcggtggcgctggaaatgatccacaccatgtcgttgattcacgacgacttgccggccatggacaacgatgacctgcgcagggggcgtcccaccaaccacaaggtgtatggagatgccatggccatccttgccggtgatgccatgctcagccgcgcttttgaaatggtggctgtccgcagtgcaaacgttcccgcggatcgcttgttgcgggttgttggtgaattggctcttgtatcgggagcgcctggcttggtcggaggtcaggttgttgatcttgagtccgaggggcaagccgttgatctcgagacccttgagtacatccatcttcacaagaccgcagccttgctgcgtgcctgtgttgtgacaggagctctgatcggaggagcgaatgacgaccaattgcaggcgatgcgcacctatgccaatggcattggtttggccttccagatcattgacgacatcctcgatgtaaccgccagcagtgaagtgctcggtaaaactgccggcaaggatctgcttgccgataaaacgacctatcccaagcttttgggacttgatgcttcgcgggagaaagcgttgcagttggtgcgggagtccaaggccgcgcttgaaccttggcgtgacaaagcggcgcccttgttggctctcgccgactatgtagcgagtcgggattgttga

SEQ ID NO: 57448 - protein, 312 aa, Synechococcus sp. CC9311
MSAAATSPESVPSSGELLSTFDFANYLKLSRDRVEIALDASMGPERPESLRDAMRYSLLAGGKRLRPILCLAACELVGGSSELAMPTAVALEMIHTMSLIHDDLPAMDNDDLRRGRPTNHKVYGDAMAILAGDAMLSRAFEMVAVRSANVPADRLLRVVGELALVSGAPGLVGGQVVDLESEGQAVDLETLEYIHLHKTAALLRACVVTGALIGGANDDQLQAMRTYANGIGLAFQIIDDILDVTASSEVLGKTAGKDLLADKTTYPKLLGLDASREKALQLVRESKAALEPWRDKAAPLLALADYVASRDC

SEQ ID NO: 57449 - DNA, 921 bp, Alkalilimnicola ehrlichei MLHE-1
  CDS (1)..(921): transl_table=11
atgaacaagccttcgaagatccggcacatcgcgacacttgaacgtgtcagccccacctggcgtgcccgggtggagcaggcgctggactactggttgccggaggcgcagacccaccccgcgcgcctgcaccaggccatgcgctattccgcgttgtccggcggcaagcggctgcgcccgatactggtttttgccaccgggcaggccctgggcgcggcccccaccctgctggacggccccgcctgcgcggtggagtgcatccacgcctactcgctcatccacgacgacctgccggccatggacgacgacgagctgcgccggggtcagcccacctgtcacaaggccttcgacgaggccaccgccattttggccggggacgcgctgcagacgctggcctttcacatcctggcccacgacccggggggggtgcagaacagccgcgcccggctgcggatggtcgaggtgctggcgctggccgccggctcccgcggtatggcgggggggcaggccatcgacctggccgccaccgggcagcaactggacgtggcccagctcgaggatatgcacatccacaagacgggcgccctgatccgggccagcgtgcagctcggcgccctggccgccagcccggtggacgaggagctgctccagcggctggaccattacggcaagtgcatcgggctcgccttccagatccgcgacgacatcctggatgtggagggcgagaccgaggccttgggcaaggcccggggctcggaccagcgccaggccaaggccacctaccccgccctgctgggcatgcgcgaggcccgcgagacggctgaccggctggtggaggacgccctggagtcgctggaggggctggaccagagcgccgatgtgctacgcggcattgccgaatactgcattggccggaaccactga

SEQ ID NO: 57450 - protein, 306 aa, Alkalilimnicola ehrlichei MLHE-1
MNKPSKIRHIATLERVSPTWRARVEQALDYWLPEAQTHPARLHQAMRYSALSGGKRLRPILVFATGQALGAAPTLLDGPACAVECIHAYSLIHDDLPAMDDDELRRGQPTCHKAFDEATAILAGDALQTLAFHILAHDPGGVQNSRARLRMVEVLALAAGSRGMAGGQAIDLAATGQQLDVAQLEDMHIHKTGALIRASVQLGALAASPVDEELLQRLDHYGKCIGLAFQIRDDILDVEGETEALGKARGSDQRQAKATYPALLGMREARETADRLVEDALESLEGLDQSADVLRGIAEYCIGRNH

SEQ ID NO: 57451 - DNA, 915 bp, Rhizobium leguminosarum bv. viciae 3841
  CDS (1)..(915): transl_table=11
atggacgcgaaccgggatactttcgagacaaggctgaagaacaacgcccgcgacatcgaggcgctgctcgacgcattgctttcaccgagtgccttttccgatgaaatcgccaggcccgagacgctgcgcgatgccatgcattatgccgtgttgaacggcggcaagcggctgcgcccgtttctggtcgtcgaaagtgccgcccttctcggcggcgacgccgaggcggcacttcgcgtcggcgccgcactcgaatgcgtccactgctactccctcgtgcatgacgacctgccggccatggacgatgacgacctgcgccgcggcaaaccgacagtacacatcaagttcgacgaagcgacggcgatcctcgccggcgacagcctgctgacctatgccttcgacatcatcgccgcgccggaaacgacccttgccgatacgagcaaggcatcgctggtgctggcccttgcccgcgcagccggtctcggcggcatggccggcggccaggcgcttgatctcgcggcggaaaagcaggcgcccgacgaggccggcatcatccgcctgcaggcgatgaaaacgggcgcgctgatccgcttcgcctgcgaagccggcgccgtcatctcgggaagcttggccgaagatcgccgccgcctgcgcgccttcggcgaaaagatcggtcttgctttccagcttgccgacgacattctcgacctgacttcggatgcagcgaccatgggcaaggcgaccggcaaggatgcggcccgcggcaagggaacactcgtcgccctgcgcggcatggaatgggccgagacccagctccgtgagcacgtccgcgatgccgaagcgctgcttgccccttacggcgcccgcgcctcgatcctcattgctgcagcgcatttcatcgccgaccggaagagctga

SEQ ID NO: 57452 - protein, 304 aa, Rhizobium leguminosarum bv. viciae 3841
MDANRDTFETRLKNNARDIEALLDALLSPSAFSDEIARPETLRDAMHYAVLNGGKRLRPFLVVESAALLGGDAEAALRVGAALECVHCYSLVHDDLPAMDDDDLRRGKPTVHIKFDEATAILAGDSLLTYAFDIIAAPETTLADTSKASLVLALARAAGLGGMAGGQALDLAAEKQAPDEAGIIRLQAMKTGALIRFACEAGAVISGSLAEDRRRLRAFGEKIGLAFQLADDILDLTSDAATMGKATGKDAARGKGTLVALRGMEWAETQLREHVRDAEALLAPYGARASILIAAAHFIADRKS

SEQ ID NO: 57453 - DNA, 897 bp, Solibacter usitatus Ellin6076
  CDS (1)..(897): transl_table=11
atggatctgcaccgtatggacctgcgcgattacctcgcccagcagcagcgactggtggattcggaactcgaccgtctcgtccccccggaaagcgccgccccggaaaccatccatcgcgccatgcgctacagcctcttcgccggcggcaagcgcatccgccctatcctctgtatagaggccgcccgcaccgtctccgacgattgcgctggcgtcgccgccgccgcctgctcactcgagctcatccatacctactccctcatccacgacgatctccccgcgctcgataacgacgattaccgccgcggcaagctcaccaaccacaaagtcttcggcgacgccatggccattctcgccggcgattcgctcctcaccctcgccttccaggtcctcgcccagcttgacgcgccggacgctcgcaagacgcgcctcatcgccgagctcgccactgccagcggcaccgtgggcggaatgatcggcggccaggtcgccgatctcgaaggcgaaggcaaaccgcccgacgcacagctgctcgaaaccatccatcgcgccaagaccggagccctcctccgcgcctccctgcgtctcggcgccatcttcgccggcgcagccgagccgcagtacgaagccctctcctgctacggccagcacgtcggcctcgcctttcaaatcgtggacgatatcctcgatgttgaagagtcctccgaagccctcggcaagaccgccggcaaggacgccgcccagcacaagatcacctttcccgccgtctacggccttgaaccttcgcgcgaaatggccgcccgcgagtgcgaacgtgcccacgccgtcctcgctcccttcggcgagcgcgccctgcgcctccacgaactggccgatctgatcgtccgccgcaaatcatga

SEQ ID NO: 57454 - protein, 298 aa, Solibacter usitatus Ellin6076
MDLHRMDLRDYLAQQQRLVDSELDRLVPPESAAPETIHRAMRYSLFAGGKRIRPILCIEAARTVSDDCAGVAAAACSLELIHTYSLIHDDLPALDNDDYRRGKLTNHKVFGDAMAILAGDSLLTLAFQVLAQLDAPDARKTRLIAELATASGTVGGMIGGQVADLEGEGKPPDAQLLETIHRAKTGALLRASLRLGAIFAGAAEPQYEALSCYGQHVGLAFQIVDDILDVEESSEALGKTAGKDAAQHKITFPAVYGLEPSREMAARECERAHAVLAPFGERALRLHELADLIVRRKS

SEQ ID NO: 57455 - DNA, 885 bp, Magnetococcus sp. MC-1
  CDS (1)..(885): transl_table=11
atggagttaaaaccctaccttgcggatcgtaaatacttggtcgagagcgcccttgaccggctactacccgccgccgaccgagagcccagagccttgaccggggctatgcgctatagcctgctcatcggcggtaagcggctgcgacccatcctaaccctagcctgctgcgaagccgttgggggagccctagagcgcgcaatgaactttgcctgcgccatggagtgtgtgcatacctactcccttattcatgatgacctaccggccatggataatgacgatctacgccgaggtcaccccacctgtcaccggcaatatggtgaagccaccgccattttggctggcgatgccctgcttacccatgcctttgagctggccgccaagccggtcacaggggtattgcccgaggcacgcctagagctgattggcgaactggcgatggcagcgggaacctatggtatggtgggggggcaaatgctggacatccagggggagaaacgccccttggaactggtgcagttgcaaaacatccatatccataaaactggcgccctcatccgggttgcctgtctggccggtgcccgcttgggtgggggaacccccgatcaagttaaacaccttaaacgctatggcgaggcgttggggctggcgtttcaaatcaccgatgatattctcgatgaggttggagacaccaaaaccctgggtaaagccaccggcgtggatcgcgctttggataaagccacctaccccaaactcatggggctggcccaggcccgcgaggcggctgaaaatcttatgcaagaggcgacccgctgcctaaccgagttcggcccgcaagccgatcctctgcgcgcactggcgcagtatgtcatcgcccgcacccattaa

SEQ ID NO: 57456 - protein, 294 aa, Magnetococcus sp. MC-1
MELKPYLADRKYLVESALDRLLPAADREPRALTGAMRYSLLIGGKRLRPILTLACCEAVGGALERAMNFACAMECVHTYSLIHDDLPAMDNDDLRRGHPTCHRQYGEATAILAGDALLTHAFELAAKPVTGVLPEARLELIGELAMAAGTYGMVGGQMLDIQGEKRPLELVQLQNIHIHKTGALIRVACLAGARLGGGTPDQVKHLKRYGEALGLAFQITDDILDEVGDTKTLGKATGVDRALDKATYPKLMGLAQAREAAENLMQEATRCLTEFGPQADPLRALAQYVIARTH

SEQ ID NO: 57457 - DNA, 903 bp, Azoarcus sp. BH72
  CDS (1)..(903): transl_table=11
atgaccgccctttccccgcaggacttcgccgcctggatgggcgccatccagcaacgcaccgaagccgcgctggcgggcgtgctgcccgaacccacgatagccccggaacgcctgcacgaagccatgcgctatgcggtgctcggtggcggcaagcgggtgcggccgctgctggtgcacgccgccggcgcaattggcggcgcccagcccgaacggctggaccgcatcgcctgcgcggtcgaactgatccacgcctattcgctggttcacgacgacatgccctgcatggacgacgacgtcctgcgccgcggcaagcccaccgtgcacgtcgaatacgatgacgccaccgcgctgctggtgggcgacgcgctgcagaccctcgccttccaggtgctcgcctccgcgccggtcaccgacatgcccacccgccagctcggcatgatcggcctgctggcgatggcatccggttcgcgcggcatggccggcggccaggcgatcgacctcgccgcggtcgggcgccagctcgacctgcgcgaactcgaattcatgcacatccacaagaccggcgcactgatccgctgctcggtgctgctgggcgcgcaggccggcacggtggatggcgaaacgctggagcggctggaccgctacgccaaactcaccggcctgctgttccaggtggtggacgacatcctcgacgccgaggccgacactgccacgctcggcaagactgcaggcaaggatgcggaccacgacaaacccacctatgtcagcctgctcggcgtcgccgacgcccggcgacttgcccaagacatgctggccgaagcgctcgcggcgctcgaaccgctcggcgcgcgcgccggccatctcgccgccctcgccaattacatcgtgcatcggcccttctga

SEQ ID NO: 57458 - protein, 300 aa, Azoarcus sp. BH72
MTALSPQDFAAWMGAIQQRTEAALAGVLPEPTIAPERLHEAMRYAVLGGGKRVRPLLVHAAGAIGGAQPERLDRIACAVELIHAYSLVHDDMPCMDDDVLRRGKPTVHVEYDDATALLVGDALQTLAFQVLASAPVTDMPTRQLGMIGLLAMASGSRGMAGGQAIDLAAVGRQLDLRELEFMHIHKTGALIRCSVLLGAQAGTVDGETLERLDRYAKLTGLLFQVVDDILDAEADTATLGKTAGKDADHDKPTYVSLLGVADARRLAQDMLAEALAALEPLGARAGHLAALANYIVHRPF

SEQ ID NO: 57459 - DNA, 936 bp, Acidovorax sp. JS42
  CDS (1)..(936): transl_table=11
atgatgtccgcagtgccctctatgcccgccacccttgtgcctgacgccgcccccgggtttgacttcaatgactggatgcgtgcagagctggcgcgtgttgaagaagccttgtcgcgctgggtgtgccacgacgcaccggccggtctgggcgaagccatgcgctatgcggtgctggacggcggcaagcgcctgcgcccgctgctggtgctggcggctagccacgccgtgggtggtcagcccgaggccgcgctgcgtgccgcctgcgcggtggagctgatccacgcttactctctggtgcatgacgacatgccctgcatggacaacgacgtgatgcgccgcggcaagcccacggtgcatgtgcgttttggcgaggcccgcgcgctgctggcgggcgatgcgctgcaggcgctggcgtttgagctgctcacacccgaggacggcgtaccccttgccatgcaggcgcggctgtgccgcgaactggcccaggccgccggcgccgccggcatggcgggcgggcaggccatcgacctggccagcgtggggctgcagctgtctgaagaccagttgcgccacatgcatagcctcaaaaccggtgcgctgctgcaggccagtgtggtgatgggtgcagtctgcggacagccgacaggcgcggcgctgcaggcgctgaccgactacggcgcggccatgggcctggcttttcaggtggtggatgatgtgctggatgtcacccaggactcggccacgctgggcaagacggccggcaaggatgctgccagcgacaagcccacctatgtctcgctgatggggctgcagtccgcccgggcctatgccgatgtgctgcatgcccaggcgctggcggcactggtggccagcggcctgacggacacgcgggccctggcggcgttggccgacatggtggtgcgccgctcgcattga

SEQ ID NO: 57460 - protein, 311 aa, Acidovorax sp. JS42
MMSAVPSMPATLVPDAAPGFDFNDWMRAELARVEEALSRWVCHDAPAGLGEAMRYAVLDGGKRLRPLLVLAASHAVGGQPEAALRAACAVELIHAYSLVHDDMPCMDNDVMRRGKPTVHVRFGEARALLAGDALQALAFELLTPEDGVPLAMQARLCRELAQAAGAAGMAGGQAIDLASVGLQLSEDQLRHMHSLKTGALLQASVVMGAVCGQPTGAALQALTDYGAAMGLAFQVVDDVLDVTQDSATLGKTAGKDAASDKPTYVSLMGLQSARAYADVLHAQALAALVASGLTDTRALAALADMVVRRSH

SEQ ID NO: 57461 - DNA, 933 bp, Nostoc punctiforme PCC 73102
  CDS (1)..(933): transl_table=11
atggtagcaactgataacgttcaaaagacaccaccagaggaagccacatttaacttagtagcctatctcaaagagcgacaaaagctttgtgataatgctttggatcgggctatccccatcatttatccagaaaagatttatgaggcgatgcgctactcgttattagctggcggcaagcgtgtacgtcccattctttgccttgctacctgtgaaatgatgggtggcactatcgaaatggctatgccaacggcttgtgctgtggagatgatccacacaatgtctttgattcatgacgacctcccagcgatggataatgacgattaccgtcggggaaagctgacaaatcataaagtctatggcgaagatgtagcgattttggctggggacggcttgttagcacttgcttttgagttagttgcccttaaaacccccgcaaacgttaacagagagctaaccttgcaggtcattgttcgtcttggtcgggcgctgggggcagctggtttggtcggtggtcaagttgtcgatttagagtgtgaagggaaatcagatatttctctagaaacgctaaatttcattcatagacacaaaacttccgcccttttggaagcttgcgtagtttctggcggaattatcgctggggcatcaactgaagatgtacagcgactaacccgttatgctgaaaatattgggctagcattccaaatcatagatgatattctggatatcacttctacaaaagagcaattaggtaaaacagctggtaaagaccaaaaagcgaagaaagttacctatcctagcctttggggacttgaagaatcgcgcttaaaagcccaagagctagttaaagtagcttgtgcagaattagaaccatttggagacagagccaagccactccaagcgatcgctcattttattaccagccgcaataactag

SEQ ID NO: 57462 - protein, 310 aa, Nostoc punctiforme PCC 73102
MVATDNVQKTPPEEATFNLVAYLKERQKLCDNALDRAIPIIYPEKIYEAMRYSLLAGGKRVRPILCLATCEMMGGTIEMAMPTACAVEMIHTMSLIHDDLPAMDNDDYRRGKLTNHKVYGEDVAILAGDGLLALAFELVALKTPANVNRELTLQVIVRLGRALGAAGLVGGQVVDLECEGKSDISLETLNFIHRHKTSALLEACVVSGGIIAGASTEDVQRLTRYAENIGLAFQIIDDILDITSTKEQLGKTAGKDQKAKKVTYPSLWGLEESRLKAQELVKVACAELEPFGDRAKPLQAIAHFITSRNN

SEQ ID NO: 57463 - DNA, 891 bp, Haemophilus somnus 2336
  CDS (1)..(891): transl_table=11
atgtatcaatttgctcaagatctccaagaatccaaacaacgaattaatttttttttagaaaaacaattcgagtgcattgatagttctccatctcctttagctgaggcgatgaaatatggattattgttaggtggaaaacgtattcgcccctttttagtttatgcaacaggaaaaatgctcggagcgaatttaattcaattagattatgcagcagcggctattgaagctattcatgcttactcactcattcatgatgatcttccggctatggataatgattcactccgtcgtggacacccaacttgccatattgcctttgatcatgctaccgctattcttgccggcgatgctttacaaccttttgcttttgagctgttaactcaaacacccgatttgtctgccgaacaaaaattagctttagttcaaactttagccaatgcttctggtgttaaaggtatgtgtttagggcaaagtttagatttaatctcagagaatcaacaaattaatttatccgcacttgaaaagatacatcgcaataaaacaggtgccttgttgtcagctgcagtgaagatggggtttatttgttctccgcactttgcaaatataaaattagaagaacaattaatgcactactcctctgctgtgggtttagcttttcaagtacaagatgatattttagatattgaaggtgaaagtattgtgattggaaaaactgccggatctgatctccttgccgataaaagtacttatccaaaacttataggtttagatggtgcaaaacagaaggcacaagaactttatcatcaagcactacaagaattggatgctttgccctttgacacttcagcattgcatgcactcgctgagtttgtcgtaaatcggcaaagctaa

SEQ ID NO: 57464 - protein, 296 aa, Haemophilus somnus 2336
MYQFAQDLQESKQRINFFLEKQFECIDSSPSPLAEAMKYGLLLGGKRIRPFLVYATGKMLGANLIQLDYAAAAIEAIHAYSLIHDDLPAMDNDSLRRGHPTCHIAFDHATAILAGDALQPFAFELLTQTPDLSAEQKLALVQTLANASGVKGMCLGQSLDLISENQQINLSALEKIHRNKTGALLSAAVKMGFICSPHFANIKLEEQLMHYSSAVGLAFQVQDDILDIEGESIVIGKTAGSDLLADKSTYPKLIGLDGAKQKAQELYHQALQELDALPFDTSALHALAEFVVNRQS

SEQ ID NO: 57465 - DNA, 882 bp, Listeria monocytogenes str. 1/2a F6854
  CDS (1)..(882): transl_table=11
ttgcaagatttaaccctttttttagaacaatataaaaaagtgattgatgagtcgctttttaaagaaataaacgagcgaaatatcgaacctagactaaaagagtccatgttatattctattcaagcaggcgggaaacggattcgtccaatgctagttttcgctacgcttcaagctttaaaagtaaatccgcttttaggtgtaaaaaccgcaacagcgttagaaatgattcacacatacagccttattcatgatgatttaccagcaatggataacgatgattatcgtcgaggcaagtggactaatcataaagtttttggcgatgcaactgcgattttggcaggagatgctttactaacgctcgctttttctattttagctgaagacgataatttatcttttgagacacgcattgctttgattaaccaaattagttttagtagcggtgcagaaggaatggttggtggtcaacttgcagacatggaagcggaaaacaaacacgtgacgctagaagagttatcatccattcatgcacgaaaaacgggtgaattattaatttatgctgtaacctctgcagcaaaaattgcggaagctgatctagaacaaacgaaacgcttacgaatttttgcagagaatattgggattggatttcaaattagcgacgatattttagatgtaattggtgatgaaacgaaaatgggtaaaaagacaggggccgacgcttttctgaataaaagtacctatcccggattactcacgcttgatggggcaaaaagggcattaaatgagcatgttacgattgcaaagtcagcgctttcagggcatgatttcgatgatgaaattctcttgaaaattgctgatttaatcgcacttagagaaaattaa

SEQ ID NO: 57466 - protein, 293 aa, Listeria monocytogenes str. 1/2a F6854
MQDLTLFLEQYKKVIDESLFKEINERNIEPRLKESMLYSIQAGGKRIRPMLVFATLQALKVNPLLGVKTATALEMIHTYSLIHDDLPAMDNDDYRRGKWTNHKVFGDATAILAGDALLTLAFSILAEDDNLSFETRIALINQISFSSGAEGMVGGQLADMEAENKHVTLEELSSIHARKTGELLIYAVTSAAKIAEADLEQTKRLRIFAENIGIGFQISDDILDVIGDETKMGKKTGADAFLNKSTYPGLLTLDGAKRALNEHVTIAKSALSGHDFDDEILLKIADLIALREN

SEQ ID NO: 57467 - DNA, 891 bp, Bacillus cereus G9241
  CDS (1)..(891): transl_table=11
gtgacaattgcttttgatacttttttgaaagaaagtaaaactttcgtagaagagaagcttgtaagctatgcaaatgaattacaatgtccaaatgtacttcgtgaagcgatggcatattctttggaagcgggtggaaagcgtctccgcccgttacttttatttgcaacattacaagcgtttggtaaagaaaaaaatcttggtgtaggtgcagcttgtgctcttgaaatgatacatacatactcgttagttcatgatgatttaccttgtatggatgatgatgatttaagaagagggaagcccacaaatcataaagtatttggtgaagcgatggcagttttagcaggagatggtttgttgacatatgcttttcaagttattatggcatatgaacaaaaggaaatctctgctgagaaaaaagtaagacttgtacttgagcttgcaaaagcggcagggccagaaggaatggttggcggacaagtggcagatatggaagcggaagggaaacagcttacaatcgatgagttggagtatattcataagcataagactggaaagctacttgaattcgctgtacttgcagggtcgatactgtctgatgcgacagaagaacaggaagaaaaattacttgagtttgcaaaatatatcggcctagctttccaaatccgagatgatattttagatgtggaaggaaccgaagaagagattggaaaaccgattggtagtgatgtttctaacgaaaagagcacatatacgacgttatttactgtagatagagcaaaggatattttagaagaaactattgcaaaagcaaaagatgctattggttccttgcaattacaagatgaatatttactatctatttgtgatttgattgcaaaacgtaataactaa

SEQ ID NO: 57468 - protein, 296 aa, Bacillus cereus G9241
MTIAFDTFLKESKTFVEEKLVSYANELQCPNVLREAMAYSLEAGGKRLRPLLLFATLQAFGKEKNLGVGAACALEMIHTYSLVHDDLPCMDDDDLRRGKPTNHKVFGEAMAVLAGDGLLTYAFQVIMAYEQKEISAEKKVRLVLELAKAAGPEGMVGGQVADMEAEGKQLTIDELEYIHKHKTGKLLEFAVLAGSILSDATEEQEEKLLEFAKYIGLAFQIRDDILDVEGTEEEIGKPIGSDVSNEKSTYTTLFTVDRAKDILEETIAKAKDAIGSLQLQDEYLLSICDLIAKRNN

SEQ ID NO: 57469 - DNA, 930 bp, Crocosphaera watsonii WH 8501
  CDS (1)..(930): transl_table=11
atggttatgacaggtgaagaccgtgtgacgcatacagaagcatcgaattttgagcttgcgtcctatcttaaagagaaaaaacagttagttgaagcggccttggatcaatcccttcacattacccgtcccgaaaaaatctacgaagctatgcgttattccctcttggcagggggaaaacgattacgccccattctctgcctaaccacctgtgaactgatgggtgggaccgtagaaatgtcactccctacagcttgcgccctagaaatgatccataccatgtctttgattcatgacgatctccctgctatggataacgatgattatagacggggaaaattgaccaatcataaggtttatggagaagacatcgctattttagcaggagacgctttattgtcctacgcctttgaatatgttgccacccaaacctgtaatgtagatttccctaacctcatcgatgtcattgcccgtttaggacgtaccgttggggcagcgggattagtcgggggtcaagtgttagacttagaatcggaaggtagaaccgatgtcaccgtagataccttaaaattcatccatatccacaaaacaggggcattattggagacatctgtggtgtctggagccattttagccggagctaagccagaggatatagaaaggctttctcgttacgctcagaacattggtttagcctttcaaatcatcgatgatgttttagacgtaactgccagcagtgaagaattaggcaaaaccgccggaaaagatgaacgggcgcaaaaagctacttatcccagtttatggggcttagaagaatcacaaaaacaagctcaagccctgattgacgatgcgatcgcccaactgagtccctacggccaagcagcccaacccttagaagcgatcgcccaatttattgttgctcgcaaaaactaa

SEQ ID NO: 57470 - protein, 309 aa, Crocosphaera watsonii WH 8501
MVMTGEDRVTHTEASNFELASYLKEKKQLVEAALDQSLHITRPEKIYEAMRYSLLAGGKRLRPILCLTTCELMGGTVEMSLPTACALEMIHTMSLIHDDLPAMDNDDYRRGKLTNHKVYGEDIAILAGDALLSYAFEYVATQTCNVDFPNLIDVIARLGRTVGAAGLVGGQVLDLESEGRTDVTVDTLKFIHIHKTGALLETSVVSGAILAGAKPEDIERLSRYAQNIGLAFQIIDDVLDVTASSEELGKTAGKDERAQKATYPSLWGLEESQKQAQALIDDAIAQLSPYGQAAQPLEAIAQFIVARKN

SEQ ID NO: 57471 - DNA, 870 bp, Exiguobacterium sibiricum 255-15
  CDS (1)..(870): transl_table=11
atgattgtcttaacagagtggaaaacgcaggtggagcaagcactggaaactttcatgaaccgtctcgaagcaccggatcgtctgcgggaagcgatgctgtattcccttgatgcaggggggaaacgtgtccggccggcattgatttatgctgtcctcgatgcttacggcgtcgatcgtaagacgggtgacgcaacagcggcggcgcttgagatgattcatacatattccttgattcatgatgatctaccggcgatggacgatgatgatatgcgacgcggacgtccgaccaatcatattgaattcgatgaggcgaccgccattctcgcaggggatgcgttactgacgaatgcctttacgtgtctactcgaaacgatggccgcagcggaagttaaagtgaaattactcgagcgactcgcagcagcagcgggtgcagccgggatggtcggcggtcaactggatgacatgcttggagagcgcggaggaatcagtgatgcggaagaactggaatcgattcaccgccggaaaacaggagccttgttgatttttgcagtcgaagcaggcggcattttagccggagtcgcagatgaggatctcgaacagttgaaacggtacggccgtcatctcggaattgctttccaaattcaagacgacatcctggatgtgaccggagatgctgacaaaatcgggaaaccggttggcagtgatgaaggaaatgacaaagcaacttatccgaaactgttgggtcttgacggggcgaaaagggcacttgcagcccaagtgacggcagcgaatgaagcaatcgaggctctttccgtcgaagcgacaccgcttaaggatttgctcgacttcgtcgtcaagcgtgaccattaa

SEQ ID NO: 57472 - protein, 289 aa, Exiguobacterium sibiricum 255-15
MIVLTEWKTQVEQALETFMNRLEAPDRLREAMLYSLDAGGKRVRPALIYAVLDAYGVDRKTGDATAAALEMIHTYSLIHDDLPAMDDDDMRRGRPTNHIEFDEATAILAGDALLTNAFTCLLETMAAAEVKVKLLERLAAAAGAAGMVGGQLDDMLGERGGISDAEELESIHRRKTGALLIFAVEAGGILAGVADEDLEQLKRYGRHLGIAFQIQDDILDVTGDADKIGKPVGSDEGNDKATYPKLLGLDGAKRALAAQVTAANEAIEALSVEATPLKDLLDFVVKRDH

SEQ ID NO: 57473 - DNA, 876 bp, Xylella fastidiosa Dixon
  CDS (1)..(876): transl_table=11
gtgagcaaagcgctgttcacgcgctggtgccaacgcaccgacagctacttagaacgaacgttatccatcctcacccaagcgccacagcggctccacgccgcgatgcgatacaccgtactgagtggcggcaaacgcatccgtcccttactggtttacgctgccggccacctgtttcatgtcgatgaacccctactcgacgtaccggctgcggccgtggaactgatccatgcctattccctggtgcatgatgaccttcccgccatggatgacgacctcttacgccgagggcgtcccaccgtccatatcgccttcgacgaagccactgcaatcctcactggcgacgccttgcagaccctggcgtttgaatgcttagccgatgccccagccgacgcctccctgcgtatcgcctggttacagacattgacacacgccgcaggagttgccggcatgtgtggcggccaggcactagatattgacgccactggccaatcccagacactcaaagcactggaagccatgcatgcgttgaagagcggcacattgatgcgagccgccgtgagaatgggtgccctggctggcgacccttccccggaggatctgcactccctggacacctttgcggccacccttggattagcattccaagtgcgtgacgacatcctggatatcgagtctagttccgaacaacttggtaaaacgactggcaaagatgccatacagcagaaatccaccttccccgccctcctgagcgtagaaggtgccaaatgctatttacaagaattggcagaacgcctgtacacccaattgcatccttacggcgaacgtgctgcccccctgaccgcactggcacgcttggctgtagaacgtgctcactga

SEQ ID NO: 57474 - protein, 291 aa, Xylella fastidiosa Dixon
MSKALFTRWCQRTDSYLERTLSILTQAPQRLHAAMRYTVLSGGKRIRPLLVYAAGHLFHVDEPLLDVPAAAVELIHAYSLVHDDLPAMDDDLLRRGRPTVHIAFDEATAILTGDALQTLAFECLADAPADASLRIAWLQTLTHAAGVAGMCGGQALDIDATGQSQTLKALEAMHALKSGTLMRAAVRMGALAGDPSPEDLHSLDTFAATLGLAFQVRDDILDIESSSEQLGKTTGKDAIQQKSTFPALLSVEGAKCYLQELAERLYTQLHPYGERAAPLTALARLAVERAH

SEQ ID NO: 57475 - DNA, 915 bp, Erythrobacter sp. NAP1
  CDS (1)..(915): transl_table=11
atggctctcgcaagtgtcgagaatgacgtgctgggtgatgcgctcaaaagggtgcagggcgagatcgattccgttttcgacgcctttctgccggtcccacatgacacaagcgcgaggctggtcgaggcgatgcgctacgccgcgatgggcggcggcaaacgggtccgcccgctgttgctcgtcagcaccgcggaattgtacggcgttgaccgcaccgctgcgctttgtgccgctgcggcggtcgaggcgatccacgtttactcgctgatccacgacgacttgccatgcatggatgatgacgaccttcgtcatggcaaacccacggttcacaaggtttatgacgacgcgacagcggttctcgctggcgacgcgctccatgcgcttgccttcgaaatcctcgctgacagccagaccagcgccgatcccttcgttcgcagcgagctgatcgcaactctcggtaaggcgagcggcatgggcggtatggcgggcggccagatgatggacatggtcgctgatgaggagggcgtagaatacgaccttcggaccatcacccgtctgcaacagctaaagaccggcgccttgctggcagcaagcgtcgagatgggcgccatccttggcaaggttgccccggaaggccgcgcccacctcagggcctattcacgcgacatcgggctcgcgttccagatcgcggacgatctgctcgatgtcgaaggcgacgccgacaaggcaggcaaggcgctgcgcaaggacgacgagcagggcaagcaaaccttcgtcacactgatgggcgtcgacaaggctcgcgaacaggcccgcgctctggtcgatcaggcggtcgcgcatctttccagccacggtagcgaggcggacacgttgcgcgcgctggctcggttcattgtcgagcgggaccgatag

SEQ ID NO: 57476 - protein, 304 aa, Erythrobacter sp. NAP1
MALASVENDVLGDALKRVQGEIDSVFDAFLPVPHDTSARLVEAMRYAAMGGGKRVRPLLLVSTAELYGVDRTAALCAAAAVEAIHVYSLIHDDLPCMDDDDLRHGKPTVHKVYDDATAVLAGDALHALAFEILADSQTSADPFVRSELIATLGKASGMGGMAGGQMMDMVADEEGVEYDLRTITRLQQLKTGALLAASVEMGAILGKVAPEGRAHLRAYSRDIGLAFQIADDLLDVEGDADKAGKALRKDDEQGKQTFVTLMGVDKAREQARALVDQAVAHLSSHGSEADTLRALARFIVERDR

SEQ ID NO: 57477 - DNA, 948 bp, Synechococcus sp. RS9917
  CDS (1)..(948): transl_table=11
atgaccgccgcggcgaccagtcccgacagtgctccgccggcgggagcggctcagggcttcgacttcaacgcctacctggcggctcgaaaagctgaagtggagtcggctctggatgcctccctgccgccggaacggccggaatcgctgcgtgaagcgatgcgctattccctgttggcgggtggcaagcgtctgcgcccgattctttgcctggcggcctgcgagctggccggtggcgatccggctctggcgatgccgacggcggtggcgctggagatgatccacaccatgtcgctgatccatgacgatctgcccgccatggacgatgacgacctgcgccgtggtcgccccaccaaccacaaggtgtatggcgaggcggtggcgattctcgccggtgatgccctgctcacccgggcctttgaaatggtggcgctgcgcagccccggggtgccagccgagcggctgttgcaggtggtggccgagctctccctggtggccggtgcgcctggcctggtcgggggccaggtggtggatctggagagtgagggcaagcaggtcgacctcgagaccctggagtacatccatctccataagaccggggcactgctgcgcgcctgtgtgatcaccggcgccttgattgccggagctgatgcctcccggatcgactccctgcgcacctatgcccgcggcatcggcctggccttccagatcgtcgacgacatcctcgatgtcaccgccagcagcgatgtgctcggcaaaacggccggcaaggatctgatcgccgacaaaaccacctacccgaagctgctcggcctggaggaatccaggcaacgggccaaggcgctggtggaggaggcgaaggcgtcgctcgcggcgttcaagccgacagagcccgccaaggcctcgcctctgctcgctctggccgattacgtgatcggtcgcgatcgatga

SEQ ID NO: 57478 - protein, 315 aa, Synechococcus sp. RS9917
MTAAATSPDSAPPAGAAQGFDFNAYLAARKAEVESALDASLPPERPESLREAMRYSLLAGGKRLRPILCLAACELAGGDPALAMPTAVALEMIHTMSLIHDDLPAMDDDDLRRGRPTNHKVYGEAVAILAGDALLTRAFEMVALRSPGVPAERLLQVVAELSLVAGAPGLVGGQVVDLESEGKQVDLETLEYIHLHKTGALLRACVITGALIAGADASRIDSLRTYARGIGLAFQIVDDILDVTASSDVLGKTAGKDLIADKTTYPKLLGLEESRQRAKALVEEAKASLAAFKPTEPAKASPLLALADYVIGRDR

SEQ ID NO: 57479 - DNA, 903 bp, Synechococcus sp. WH 5701
  CDS (1)..(903): transl_table=11
atggccgtggcggtgagcacggagtttgatttcgccgcctacctggagtcggctcgggggcaggttgagctggcgctcgaggcggccctcggacctgagcgacccgagtcgctgcgggaggccatgcgctactcgctgctggccggtggcaagcgcctgcgcccgatcctctgcctggcggcctgtgaactggccggcggagaggtggctctggccctgcccacggccgtcgcgctggagatgatccacacgatgtcgttgatccacgacgatctccccgccatggacaacgacgacctgcgccgggggcgtcccaccaaccacaaggtctacggcgatgcccaggcgatccttgccggcgacgccctgctgacccgggccttcgagatggtggccctgcgcagtccaggcgtgccggccgagcgcctgctgcaggtggtgggtgagctgtccctcgccgccggagcccctgggctcgtgggaggacaggtggtcgacctcgagtcagaaggtaaggatgtggacctcgccaccctggagtacatccatctgcacaagaccggtgccctgctgcaggcctgcgtcctcaccggggccatgatcgccggagccccggagcccctgctgcagggcctgcgcacctattcccggggcatcggcctggcctttcagatcattgacgacattctggatgtgaccgccagcagcgaggtgctgggcaagaccgcaggcaaggacctcaccgctgacaaaaccacctacccgaagctgctgggcctggaggaatcaaggcaacgggccgacgctctggtggcggaggccaaggccgccctccagccctggcaggccagtgcccagcctctgctggccctggccgactacatcaccagccgcgaccgatga

SEQ ID NO: 57480 - protein, 300 aa, Synechococcus sp. WH 5701
MAVAVSTEFDFAAYLESARGQVELALEAALGPERPESLREAMRYSLLAGGKRLRPILCLAACELAGGEVALALPTAVALEMIHTMSLIHDDLPAMDNDDLRRGRPTNHKVYGDAQAILAGDALLTRAFEMVALRSPGVPAERLLQVVGELSLAAGAPGLVGGQVVDLESEGKDVDLATLEYIHLHKTGALLQACVLTGAMIAGAPEPLLQGLRTYSRGIGLAFQIIDDILDVTASSEVLGKTAGKDLTADKTTYPKLLGLEESRQRADALVAEAKAALQPWQASAQPLLALADYITSRDR

SEQ ID NO: 57481 - DNA, 891 bp, Pseudoalteromonas tunicata D2
  CDS (1)..(891): transl_table=11
gtgaccataaagaaactcattgtagaaaatcagttacgagtagagggcgtgcttgatactttattaacgcagccgatgattactgaccaaactttattagcagcatcgcgttacagtctattaaatggtggtaagcgcatgcgcccttgcatggtctatgtaacaggggaaatattcggtgccaatcccgatgatttagatttagtcgcagcagcaattgagtgtattcatagctattcattagtacatgatgacttacctgctatggatgatgatgacttacgcagaggtatgccaacatgccatattgcatatgatgaagctacggcgatattagctggcgacgcactgcaaacctttgcttttgagatattatcttcgagcaaatttaaaacaatcaacgcccagcaacaagttgcattaatcgcaaatttagcaagtgcatcagggcttcgaggtatgtgcggcggtcaagctttagatattgcagcaactaattgtgctataaacttaactcaattagagcaaattcatcagttaaaaacgggagcattattaacaagtgctattttaatgggcgctatttgcgcgcctaaaacgacacctgaaatattgcaaaaccttaaaatatttggcgaaaatattggcttagcttttcaagtgcaagatgacattcttgatattgaaggcgacaccgctgttttaggcaaaccacagggatcagatttacaagccaataaatcaacttatccatccctattaggacttgagcaagctaaattaaaatctcagcaattgtacgaaaatgcacttaacgcattagcacaaatacctgcagataccacacagctagcacaattggctgcgtatatcgtttctagagatcactaa

SEQ ID NO: 57482 - protein, 296 aa, Pseudoalteromonas tunicata D2
MTIKKLIVENQLRVEGVLDTLLTQPMITDQTLLAASRYSLLNGGKRMRPCMVYVTGEIFGANPDDLDLVAAAIECIHSYSLVHDDLPAMDDDDLRRGMPTCHIAYDEATAILAGDALQTFAFEILSSSKFKTINAQQQVALIANLASASGLRGMCGGQALDIAATNCAINLTQLEQIHQLKTGALLTSAILMGAICAPKTTPEILQNLKIFGENIGLAFQVQDDILDIEGDTAVLGKPQGSDLQANKSTYPSLLGLEQAKLKSQQLYENALNALAQIPADTTQLAQLAAYIVSRDH

SEQ ID NO: 57483 - DNA, 882 bp, Oceanospirillum sp. MED92
  CDS (1)..(882): transl_table=11
ttggagatccgccagcagctaaagcattaccagtcacgtgtagataaccatctggaaaactgcttaccctctgagagtatcgacccacttcttcaggaatcgatgcgctactcattattcaatggcggcaagcgggtccgtcctgcgctggtttatctggttaatcagatacttggcggcaccgacgaagcagctgataatgccgccgctgcaatcgagtgtatccacagctattcgctggttcatgatgatctacccgccatggatgatgatgacctgcgccgcggcaaacctacctgtcatatcgcctacgacgaagcaacggcaatcctggccggagacgccctgcaatgcctcgcttttgaactgcttgccaatgatcagcaacaaagcgctgacagcaaaattaagttgattcagttactgagccaggcttcgggccacggggggatggttgtcggccaatcctttgatcttcgccatgtgggcaaaccacttacgctggagcagttagaagccatgcatcagcataaaaccggggcccttctactctgtgcggtacatatgggagcagcctgcggccccagagtttctaaagaacaattagatgcccttacccgatacgcgctcgcaattggcctcgccttccaggttcaggatgacattctggatattgaaggtgactctgagacgattggaaaaccccagggttctgatctggaactgaataaacctacgtatcctgctttactgggccttgaaggtgctaagctgaagctaactaagctccatcatgaagcgattgaagccctgactatttttaacgaaaacgcagagccacttcgcgctttggctgattttattgttcgcagagatcactaa

SEQ ID NO: 57484 - protein, 293 aa, Oceanospirillum sp. MED92
MEIRQQLKHYQSRVDNHLENCLPSESIDPLLQESMRYSLFNGGKRVRPALVYLVNQILGGTDEAADNAAAAIECIHSYSLVHDDLPAMDDDDLRRGKPTCHIAYDEATAILAGDALQCLAFELLANDQQQSADSKIKLIQLLSQASGHGGMVVGQSFDLRHVGKPLTLEQLEAMHQHKTGALLLCAVHMGAACGPRVSKEQLDALTRYALAIGLAFQVQDDILDIEGDSETIGKPQGSDLELNKPTYPALLGLEGAKLKLTKLHHEAIEALTIFNENAEPLRALADFIVRRDH

SEQ ID NO: 57485 - DNA, 927 bp, Xanthobacter autotrophicus Py2
  CDS (1)..(927): transl_table=11
gtgaccttttccctcaaggaccggctcgacgcctccgccgcggccaccgaggcccgcctcgccctcgccctcgccgacgccgcgctccccggcgagcggctacggcccgagcggctgatggccgccatgcgccacggcgcgctcggcggcggcaaacggctgcggccgttcctggtgatcgaaagcgctgccctgttcggcatcccggccgatcaggcggtgacggccgccaccgccatcgagtgcatccattgctattccctggtccatgacgatctgccagccatggacgacgacgatctgcgccggggccggcccaccgtgcaccgggcctttgacgaggccaccgccatcctcgccggcgacggcctgctcaccctcgccttcgaccttctggcgggggaggatgcccatcccgatccggccgtgcgcatcgcactggtgcgggcgctggcccgcgcttcgggcatcggcggcatggtgggcgggcagatgctggacctcgccgccgagggccgcttctccggcggcacccccctcgccctggcggaagacgccatccgcgacctccaggccatgaagaccggcgcgcttttggcggtctccgtggaggccggcgcgcttttgggtggcgccacggcggacgagcgcgcggcgctcctggcctatggccgggcgctgggcgccgccttccagatcgccgacgacatcctcgacgtggaaggcaccgccgaggaggtgggcaagaaggtgggcaaggacgccgccgccggcaaggcgaccctggtctcccgcctcggcctgcccgccgcccgcaccctgctcgaccggctggtggcggatgcgtctgccgccctcgcccccttcggcgcgcgcggcgcggtgctggccgaggccgccctgttcgtggccaaccggcgcaactga

SEQ ID NO: 57486 - protein, 308 aa, Xanthobacter autotrophicus Py2
MTFSLKDRLDASAAATEARLALALADAALPGERLRPERLMAAMRHGALGGGKRLRPFLVIESAALFGIPADQAVTAATAIECIHCYSLVHDDLPAMDDDDLRRGRPTVHRAFDEATAILAGDGLLTLAFDLLAGEDAHPDPAVRIALVRALARASGIGGMVGGQMLDLAAEGRFSGGTPLALAEDAIRDLQAMKTGALLAVSVEAGALLGGATADERAALLAYGRALGAAFQIADDILDVEGTAEEVGKKVGKDAAAGKATLVSRLGLPAARTLLDRLVADASAALAPFGARGAVLAEAALFVANRRN

SEQ ID NO: 57487 - DNA, 948 bp, delta proteobacterium MLMS-1
  CDS (1)..(948): transl_table=11
atggtgagctggtcgccgaaccgtttgcagaacctgacgagggctaaagtgaccacgctggatatcaagcaatacctggccgcccagcgtgagctggtggaagcggccctggaacaattgttgcccgccgaggatgggccgctggcggcgcatatcgaggccatgcgctacagcctgctggccggcggcaagcgggtccggcccattctctgcctggccgccgccgaggcggtggggagtgaccccaagccgctgctgccggtggccggcgccctggagtgtatccacacctattccctgatccacgatgatctgccggccatggacaacgatgacctgcgccggggcatgcccaccagccataaaaaatttggcgaagcggcagccatcctggccggcgacgggctgctcagcttcgcctttgaactgctggcccggccgctgggtgagcacggcccggggccggccgcccagttgcggctgctggccaccgtggcggcggccgttggcccgcgggggatggtgggcggccaggtgctggatatcgaggccgaagggcgcaggcttgaacttgacgaattacagcagatccaccgccataaaaccggggccctgatcaccgccgccgtccaggccggggccatcggcggcggggccagcgagacccaactgcaggccttgacccgttacggccaacagacagggctggccttccaaatcgtcgatgacctgctcaacgtcaccagtgataccgccaccctgggcaaggccgccggcagcgatgccgcccggggcaaggccacctaccccgccctgctgggtctggaagccaccgaagacaaggcccgggaagcggtggcggcggcggtggcggcccttgaaagctttgaccaccgggccgaacccctgcgggaattggctcgttatatccactcccgcaaaaaataa

SEQ ID NO: 57488 - protein, 315 aa, delta proteobacterium MLMS-1
MVSWSPNRLQNLTRAKVTTLDIKQYLAAQRELVEAALEQLLPAEDGPLAAHIEAMRYSLLAGGKRVRPILCLAAAEAVGSDPKPLLPVAGALECIHTYSLIHDDLPAMDNDDLRRGMPTSHKKFGEAAAILAGDGLLSFAFELLARPLGEHGPGPAAQLRLLATVAAAVGPRGMVGGQVLDIEAEGRRLELDELQQIHRHKTGALITAAVQAGAIGGGASETQLQALTRYGQQTGLAFQIVDDLLNVTSDTATLGKAAGSDAARGKATYPALLGLEATEDKAREAVAAAVAALESFDHRAEPLRELARYIHSRKK

SEQ ID NO: 57489 - DNA, 1023 bp, delta proteobacterium MLMS-1
  CDS (1)..(1023): transl_table=11
atgaaagctgagaaactgaaaaaacaactgcaagcggccgccggccagatcgagacggtgatggccgccgacctggaaggggtgaccagtccccggctgcgggaggtgttggagcacgccctttttgccggcggtaaaaggatccgccccctgctgaccctgctggccgcccggttgaccacggccgccaaccacgggggcgtgccgacggagccgccggcggccgaccaggccaccgaccaacagcggctggccatcgcctttgaatatctgcataccgccagcctgctccatgatgatgtcatcgaccatgccgcccagcgccgggggcgggagaccgtcaacagtcgctgggatcagggccacgccatcctggccggggattttttgcacgcccgggccatgtggctggccggcaattatggcggccagccctgcctggagttgatcgccagcgccaccgaagcgatggtggcggcggagtttctgcaggccgaggcggccgccgcgcgggactggcgacgggagacctactttgcggtattggaaggcaaaaccgcggctctgatcgccgccgcctgccagtgcggcgtggtggcaggcggcggtgattaccggcagggccaggctctacgggtctacggggccaacctgggcctggcctttcagatcatcgatgacctgctggattttctgggcgatccccgggccaccggcaaagcggtgggcaacgatctccaggaaggcaagatgaccctgccgctgctgctggcccaccaacgggcaacaccggagcagcggtgctggctggagcaactgctggccgccgaacccgctcggcgccaggcggaactggacacggtgcgccaactgctgacggaaaccgacgcctttgccggctgccggagccaagcccgggagttgatcgccaccggcctggcggggctggaaatctttcccgccggcggcgagcgcgagctgctgcaggggctgggcgaatacgtgctccagcgtgaccactga

SEQ ID NO: 57490 - protein, 340 aa, delta proteobacterium MLMS-1
MKAEKLKKQLQAAAGQIETVMAADLEGVTSPRLREVLEHALFAGGKRIRPLLTLLAARLTTAANHGGVPTEPPAADQATDQQRLAIAFEYLHTASLLHDDVIDHAAQRRGRETVNSRWDQGHAILAGDFLHARAMWLAGNYGGQPCLELIASATEAMVAAEFLQAEAAAARDWRRETYFAVLEGKTAALIAAACQCGVVAGGGDYRQGQALRVYGANLGLAFQIIDDLLDFLGDPRATGKAVGNDLQEGKMTLPLLLAHQRATPEQRCWLEQLLAAEPARRQAELDTVRQLLTETDAFAGCRSQARELIATGLAGLEIFPAGGERELLQGLGEYVLQRDH

SEQ ID NO: 57491 - DNA, 885 bp, Oceanobacter sp. RED65
  CDS (1)..(885): transl_table=11
atgacatttcaagaatttcaaacatggagtcaagatcgcttccaatcgattttgaaggctgattacgtacttcccaacgtcgatgcgcaacgtttaaaagacgccatgacatacagcctgctcaacggtggcaagcgtgttcgtccattaatggtatatgccacgacacgatcactctctggagatctgcaagccgctgatcaatgtgcccttgccgtggaaatgatccatgcctattcccttgtgcatgacgacctacctgccatggatgacgatgaactgcgccgcggccaacccacttgtcatattgcgtttgacgaagccaccgccatattggccggtgacgccctgcaaacacaagctttccaagtattagtacagccaattgatggcatggcaccacagcagcaattacgcatggtacaaaccttggctcacgctagtggtttggcgggtatggccggtggtcaaagtcttgatttagaggccgtcgacaaacaagtagatatcgaatatctgcaaaacatgcacttgcacaaaaccggcgcattaattgaggctagcgtaaaattgggtggcctatgcgccaatgccagcgagcaacaactcagctacttatctgtctacgcccaagcaattggcttagcctttcaggtacaggatgacatcttggatgtgatcagtgatacccgtacactagggaaacctcaagggtctgatgaatcgcgcaataaacccacttatgtttccttattagggttggatggtgctaaacgcaaagcgcaagatctacatcaacaagcgcgggatgccttgaggaaattggatgcggacacaagcccactagaggatatcgctcgctatattattgagcgaacgtattaa

SEQ ID NO: 57492 - protein, 294 aa, Oceanobacter sp. RED65
MTFQEFQTWSQDRFQSILKADYVLPNVDAQRLKDAMTYSLLNGGKRVRPLMVYATTRSLSGDLQAADQCALAVEMIHAYSLVHDDLPAMDDDELRRGQPTCHIAFDEATAILAGDALQTQAFQVLVQPIDGMAPQQQLRMVQTLAHASGLAGMAGGQSLDLEAVDKQVDIEYLQNMHLHKTGALIEASVKLGGLCANASEQQLSYLSVYAQAIGLAFQVQDDILDVISDTRTLGKPQGSDESRNKPTYVSLLGLDGAKRKAQDLHQQARDALRKLDADTSPLEDIARYIIERTY

SEQ ID NO: 57493 - DNA, 888 bp, Alteromonadales bacterium TW-7
  CDS (1)..(888): transl_table=11
gtgagcataaaagactatattgaacgtgctcagatagatgtagctactacactcaatagctactttgaacaaccgctcgatagcgataaaacaataaaagaagccactcattacagcttatttaatggtggaaaaaggctgcgcccttttttggtgtacgctgttggtgaaatgctaggcgctaagaaaagtgacttagacgttttggctgcagccatagaatgcatccatagttattcattagtacatgacgacctaccagctatggatgatgacgatttacgccgcggctaccccacttgccatattgtgtatggcgaagcgcaagccattttagcgggtgatgcattacaaactctcgcctttgaacttatagccacacataactttaattgctcagcgcaatcacaagtaaaaatgattgctgcacttgcacatgcatcaggtattgaagggatggtggcaggacaaggtttagacattgccgcaactgacaaagttgtttctgtacaagagcttgagcgcatccataagttaaaaaccggtgcactaattaactgtgctataacactaggtgcactgtgcagtgaaaaagcagatgaacaaactttagaaaacttgagcgtttttgggtatgctatagggctggcatttcaagtacacgacgatattttagacgtggaaggtgacacctttatactaggtaaaccacaaggctcagatatagaagcgaataaagcgacatacccggcgttattaggtatgctaggcgctaaagaaaaggcgcaaaatttaataacacaagcccacgaagcgttagcacttattgatgcagatactacgcttcttgcgtcgctggcaaattaccttattgaacgtgaccactag

SEQ ID NO: 57494 - protein, 295 aa, Alteromonadales bacterium TW-7
MSIKDYIERAQIDVATTLNSYFEQPLDSDKTIKEATHYSLFNGGKRLRPFLVYAVGEMLGAKKSDLDVLAAAIECIHSYSLVHDDLPAMDDDDLRRGYPTCHIVYGEAQAILAGDALQTLAFELIATHNFNCSAQSQVKMIAALAHASGIEGMVAGQGLDIAATDKVVSVQELERIHKLKTGALINCAITLGALCSEKADEQTLENLSVFGYAIGLAFQVHDDILDVEGDTFILGKPQGSDIEANKATYPALLGMLGAKEKAQNLITQAHEALALIDADTTLLASLANYLIERDH

SEQ ID NO: 57495 - DNA, 930 bp, marine gamma proteobacterium HTCC2143
  CDS (1)..(930): transl_table=11
atgaatcatgacttttctgcttttctaatgcagacgaaaactcgagtcgatcagcttctgggagagcatcttggcagcttcagctccagttatgccgctgttgacagcggtatttatctcactcgactgcaacaggcaatgcactacagcctgatcaatgggggaaagcgaatacggccagtgctggtctacgcaacagccgctgcgataaccaccgatgttagcccagtggttacagccaatcttgacagaattgcctgctccatagagatgattcacgcttattcgttaattcacgatgaccttccggcaatggacgacgacgatttgcgacgcggtcaaccgacctgccacagagcctttgatgaggccaccgcaatcctagcaggagacgctctgcaagccagagcttttgagttactgactgaattgaccgaatgtccgccacacatacatttaaacttgcttagaatactgacccaggcatcggggcaacgaggtatggtcggcggccaattaatcgatctggaatccgtcgacaaacctatcgatgttcagcagctagaaaccattcatcgactaaaaaccggagcactaattagagcatcaattgccatgggggcaacattaactggagctgatcgacagcaactagaacaactcgattgttatggtgatgccattggtttggcatttcaggttcacgacgacatactcgatatcgaggctgatacagcgactctcggcaaaacccagggagccgacattgctctaaacaagccaacctatccgtctctgctcggaatcgacggcgctaaagctaaagcggctcaattacaccagcaatcactgacagcaattgaacactttgacgccaatgcgctgctattgcgcgaattgtccggatatattatttcccgcagccactga

SEQ ID NO: 57496 - protein, 309 aa, marine gamma proteobacterium HTCC2143
MNHDFSAFLMQTKTRVDQLLGEHLGSFSSSYAAVDSGIYLTRLQQAMHYSLINGGKRIRPVLVYATAAAITTDVSPVVTANLDRIACSIEMIHAYSLIHDDLPAMDDDDLRRGQPTCHRAFDEATAILAGDALQARAFELLTELTECPPHIHLNLLRILTQASGQRGMVGGQLIDLESVDKPIDVQQLETIHRLKTGALIRASIAMGATLTGADRQQLEQLDCYGDAIGLAFQVHDDILDIEADTATLGKTQGADIALNKPTYPSLLGIDGAKAKAAQLHQQSLTAIEHFDANALLLRELSGYIISRSH

SEQ ID NO: 57497 - DNA, 888 bp, Candidatus Desulfococcus oleovorans Hxd3
  CDS (1)..(888): transl_table=11
gtgaagaatcttgagacctaccttgcccgtcgtcaaaaggccgtcaacgaggccctggaccggattcttgctgactgcgttcccgggggccggcttttttccgccatgcgccactccctgaaggccggcggcaagcggcttcgtcccatcctctgcatggcggcggcggaagccgtcggcggcacatgggaggatgccctctttcctggctgcgccatcgagctgattcacacctattccctggtgcatgacgatctgcccgccattgacaacgaccccctgcgcagaggccagcccgcctgccacgcggcctttgacgaggccacagccatctttgccggcgacgccctgcacaccctggcctttgaggtactctcatcggaccggtatatcttttttcagggaaagcggcggctggccctgatccacctgatctctcgggccacgggcaaccacggcatgatcgaaggccagatgcgggacatcctggcccagggcggcaacctgggtctggaccagttaaaagagctccaccggctcaaaaccggggcactgatcacggcgtcggtacatgccggggcacttacgggaaaggcaacggtgcgacagaccggaaagctgattgaatacgctgaaaacatcggcctggcctttcaggtggccgacgacctgctcaacgtggaaggagaccccctgctcaccggcaaatccattggcacggaccatgtccttggcaaggccacctttcccaatctgatgggcattgacgcctcccggaagtttgcggcccagctggtggaaaagagcttgcaagcgattgaatcccttggtataaaagcaaatccgctacgtgcggtggcaaaatatgtaatcgaaagaaaactttag

SEQ ID NO: 57498 - protein, 295 aa, Candidatus Desulfococcus oleovorans Hxd3
MKNLETYLARRQKAVNEALDRILADCVPGGRLFSAMRHSLKAGGKRLRPILCMAAAEAVGGTWEDALFPGCAIELIHTYSLVHDDLPAIDNDPLRRGQPACHAAFDEATAIFAGDALHTLAFEVLSSDRYIFFQGKRRLALIHLISRATGNHGMIEGQMRDILAQGGNLGLDQLKELHRLKTGALITASVHAGALTGKATVRQTGKLIEYAENIGLAFQVADDLLNVEGDPLLTGKSIGTDHVLGKATFPNLMGIDASRKFAAQLVEKSLQAIESLGIKANPLRAVAKYVIERKL

SEQ ID NO: 57499 - DNA, 900 bp, Escherichia coli B
  CDS (1)..(900): transl_table=11
atggactttccgcagcaactcgaagcctgcgttaagcaggccaaccaggcgctgagccgttttatcgccccactgccctttcagaacactcccgtggtcgaaaccatgcagtatggcgcattattaggtggtaagcgcctgcgaccttttctggtttatgccaccggtcatatgttcggcgttagcacaaacacgctggacgcacccgctgctgccgtagagtgtatccacgcttactcattaattcatgatgatttaccggcgatggataatgacgatctgcgtcgcggtttgccgacctgccatgtgaagtttggcgaagcgaacgcgattctcgctggcgacgctttacaaacgctggcgttctcgattttaagcgatgctgatatgccggaagtgtcggatcgcgacagaatttcgatgatttctgaactggcgagcgccagcggtattgccggaatgtgtggtggtcaggcgttggatttagacgcggaaggcaaacacgtacctctggacgcgcttgagcgtattcatcgtcataaaaccggcgcattgattcgcgccgccgttcgccttggcgcattaagcgccggagataaagggcgtcgtgctctgccagtactcgacaagtacgcagagagcatcggccttgccttccaggttcaggatgacatcctggatgtggtaggagatactgcaacgttgggaaaacgccagggtgccgaccagcaacttggtaaaagtacctaccctgcacttctgggtcttgagcaagcccggaagaaagcccgggatctgatcgacgatgcccgtcagtcgctgaaacaactggctgaacaatcactcgatacctcggcactggaagcgctagcggactacatcatccagcgtaataaataa

SEQ ID NO: 57500 - protein, 299 aa, Escherichia coli B
MDFPQQLEACVKQANQALSRFIAPLPFQNTPVVETMQYGALLGGKRLRPFLVYATGHMFGVSTNTLDAPAAAVECIHAYSLIHDDLPAMDNDDLRRGLPTCHVKFGEANAILAGDALQTLAFSILSDADMPEVSDRDRISMISELASASGIAGMCGGQALDLDAEGKHVPLDALERIHRHKTGALIRAAVRLGALSAGDKGRRALPVLDKYAESIGLAFQVQDDILDVVGDTATLGKRQGADQQLGKSTYPALLGLEQARKKARDLIDDARQSLKQLAEQSLDTSALEALADYIIQRNK

SEQ ID NO: 57501 - DNA, 888 bp, Pseudomonas putida GB-1
  CDS (1)..(888): transl_table=11
atgattggtacctaccaggccagttgccaggcgcgggtcgataccgccctcgaaccgctgttcatcgccccgaccaaagagctggagcgcctttacgccgccatgcgctacagcgtgatgaacggcggcaagcgcgtgcgcccgttgctggcctacgcggcctgcgaagccctgggcgcacccgccgaacaggccaacggcgccgcctgcgcggtcgagctgatccacgcttactcgctggtgcatgacgacctgccggccatggacgacgacgacctgcgtcgcggccagccaaccactcacaaagcgttcgatgaagcctgcgccatcctggctggcgacggcctgcagagcctggcgttcagcgccctgctcgacccacacctgagcccgcaggcagacaacatccgcctggccatggtccaggcattggccaaggctgccggcccggccggcatggtcggcggccaggccatcgacctcggctcagtgggcctgaagctggaccagcaggcgctggaattcatgcaccgacacaagaccggcgcgctgatcgaagccagcgtccgcctcggcgccctggccagtgcccgcgccgaacaagcgcagctcgatgccctgcaaacttatgcacaggccatcggcctggcattccaggtgcaggacgatatcctcgatgtggaaagcgataccgccaccctgggtaaacgccagggcgccgacatagcccgtgacaaaccgacctatccggccctgctgggcctggaagcggccaaggcctatgcaatcgaactgcgcgaccaggcgctgatcgcactgcaagggttcggtgaaacggccgagccgctgcgggcgctggcgcgctacatcgtcgaacgccgtaactga

SEQ ID NO: 57502 - protein, 295 aa, Pseudomonas putida GB-1
MIGTYQASCQARVDTALEPLFIAPTKELERLYAAMRYSVMNGGKRVRPLLAYAACEALGAPAEQANGAACAVELIHAYSLVHDDLPAMDDDDLRRGQPTTHKAFDEACAILAGDGLQSLAFSALLDPHLSPQADNIRLAMVQALAKAAGPAGMVGGQAIDLGSVGLKLDQQALEFMHRHKTGALIEASVRLGALASARAEQAQLDALQTYAQAIGLAFQVQDDILDVESDTATLGKRQGADIARDKPTYPALLGLEAAKAYAIELRDQALIALQGFGETAEPLRALARYIVERRN

SEQ ID NO: 57503 - DNA, 900 bp, Marinobacter sp. ELB17
  CDS (1)..(900): transl_table=11
gtgaacaccatcacccgcttgccagccagtgattttttgcaacactgccgcgctgagattgaccagcagctagccgattatatggatcaagccagcgcatcccagcgcctgcaggacgccatgcgctatggcttgctgggtggtggcaagcgcattcgtccagcgctttgcctagccgctgccgaagccgttggcggtcagcgccaaatagctctggcaccagcttgtgctctggagatgattcacgcgtactcgctgatgcacgacgacttgccggccatggacaacgatgatctgcgccgcggccgcgccaccgcccacatcgcattcgacgaatcttcggccatacttgctggcgacgctctgcaggcagaggcgtttcgggtactggccacggcgccgcggttaagcgctgaagtcaaactggctatggtaaaagccttggcgaacgcctgcggggcaaacggtatggtgggcgggcaggctattgatctggagtctgtggcaagaaccctgactctggaccagctagagaatatgcaccgccataagaccggcgctctgattgaagccagtgtgcaccttggcgcactggccggtggcgtaaaagaccccgcgttgctagacgccctggctcgttacgcccgcgcgctgggactggcgtttcaggtgcaggacgatttgctcgacatagaaggcgataccgaggtgatgggcaaaacccaaggctctgatatcgctcgcggcaaacccacctatcccgcactattggggccgaaaggcgcgcgcgaactcttggcaaggttgctagccgaggctcacgaaagcctgaaagggcttggcattcaggccgacgccctgcacgccatggcagattacatagtggctcgtagccactaa

SEQ ID NO: 57504 - protein, 299 aa, Marinobacter sp. ELB17
MNTITRLPASDFLQHCRAEIDQQLADYMDQASASQRLQDAMRYGLLGGGKRIRPALCLAAAEAVGGQRQIALAPACALEMIHAYSLMHDDLPAMDNDDLRRGRATAHIAFDESSAILAGDALQAEAFRVLATAPRLSAEVKLAMVKALANACGANGMVGGQAIDLESVARTLTLDQLENMHRHKTGALIEASVHLGALAGGVKDPALLDALARYARALGLAFQVQDDLLDIEGDTEVMGKTQGSDIARGKPTYPALLGPKGARELLARLLAEAHESLKGLGIQADALHAMADYIVARSH

SEQ ID NO: 57505 - DNA, 1283 bp, Helianthus annuus
  CDS (49)..(1119)
atttcttcttgttacaacaacaatcaaatcaaatccacttgtccaaccatgagacccatgagtttggttcattcatgttccatcttcaccggatcttcattcatcaaaacaacccccattaacaacaaacccactttcaagattcaccaaagacccacaattagatccacaatttctgcagcaattgttgaagaagaagtagttgagttgcaacaaaaacccaaacccactttcaatttcaacgcttacatgttgggaaagggtaattctgtccataaagctcttgatgaatcaattatgattaaaaacccaccaacaatacatgaagctatgaggtactctttacttgctggtgggaagcgcgtcaggcccattctctgtattgccgcgtgtgagctcgtcggaggggaggaggccaccgccatgccggcggcctgtgcggtggagatgatacacaccatgtctttgatacatgatgatcttccttgtatggataatgatgatttccgtagagggaagcccactaatcataaggtttatggggaagacgttgccgttttggcaggcgattcgctgctggcgtttgctttcgagtatgtttctagtaggacggaaggcgcatcgcctgcacgcgtcttggctgccatcggggagctcgccaagtcgattgggaccgaagggctggtggcagggcaagtggtggatattgcttcaaccgggggccaagatatcggattggatcagctagagtttatacacatacataaaaccgcagcattgttggaggcttctgttgtgttgggagctatcttgggtggtgggagtgatgcgcaggtggagaagctgaggacattcgcgcggtgcatcgggttgttgtttcaggtggtggatgatatacttgatgtgaccaagtcgtccgaggaattggggaaaaccgcagggaaagatttgttggtggataagacgacatatccgaaactgcttgggttggacaagtcgaggcagtttgcggaggagttgctggcggaggctaaacagcagctggaggagtttgaatcgcaggcggcggtggcgccgttgttggctctggcggagtatatagcttaccgccagaactaatgttgttgtattgtaacctaggttgctgttgtcatcaatttgattcatacctgtttgatgatgtaagattaattgacttgaagaaacaggaggcaaattagatttttcttttgattgcaatataccacctatattatcattctgaaaaaaaaaaaaaaaaaaaa

SEQ ID NO: 57506 - protein, 356 aa, Helianthus annuus
MRPMSLVHSCSIFTGSSFIKTTPINNKPTFKIHQRPTIRSTISAAIVEEEVVELQQKPKPTFNFNAYMLGKGNSVHKALDESIMIKNPPTIHEAMRYSLLAGGKRVRPILCIAACELVGGEEATAMPAACAVEMIHTMSLIHDDLPCMDNDDFRRGKPTNHKVYGEDVAVLAGDSLLAFAFEYVSSRTEGASPARVLAAIGELAKSIGTEGLVAGQVVDIASTGGQDIGLDQLEFIHIHKTAALLEASVVLGAILGGGSDAQVEKLRTFARCIGLLFQVVDDILDVTKSSEELGKTAGKDLLVDKTTYPKLLGLDKSRQFAEELLAEAKQQLEEFESQAAVAPLLALAEYIAYRQN

SEQ ID NO: 57507 - DNA, 1074 bp, Streptomyces ambofaciens
  CDS (1)..(1074): transl_table=11
gtgatttcgggcgtgatcgatgttcaggagatcgatctggatgccgtgcgggagcaggtcgacgccgtactggaggacttcctggaggacaaggcgggggcggccgcccgcaggagccacccgccggaggtcgcgaacaccctgcgggccttcctggctgcgggcggcaagcgggtgcgggctctgttgtgcgtggtgggctggcatgccgcaggcgggagcgaggacagagcggccgtcctgagagtggcggcgtcgctggaactgttcgtggcgttcgcgctcatccacgacgacatcatggacgactcggccgtccgccgcggccgccctgccgtgcaccgtgccctgtgtacgcgcctcgggcagtcgtcgcgggcggagcggctcggtgccggtggtgccctcctggtcggaaatctcgccctgatctgggcccaggagctgctgcataccgcggatctgcccctccggcggcgccgcacggtgcacgccctgtacgacgcgatgctggaggaggtgatgtacggccagtacctggacgtgatgggcaccggccccgacgacgacatcgacgcggcgctgcggatcgcccgttacaagaccgccaccgcgacggtcgagcgccccctgcagctgggagccgccgtcgccggcgccgatgacaccaccgtgaacctgtgcaccgcgctggggctgcccctgggggaggcgttccagatcagggacgacctgctggacgtcttcggcagcacggacggtgcgtgcacccccggcctgggggacctgcgggaagggaagcgcaccgttctcctcgctctgggcctgcgtgcggccaccccggctcagcagcgtcgcctgcgcagcctggtcgggcgggccgatctcgacgaacacggggcggccgaggtgcgggccatcctggaggagaccggcgcgcggcggcgcaccgaacacatgatcacctcccggtacgagcaggccctgcgggtgctggatgcggcggcgctgccgacggccgcgtcccgggcgctgcgcgcactggccgtcaccgccacccagtacacctcctga

SEQ ID NO: 57508 - protein, 357 aa, Streptomyces ambofaciens
MISGVIDVQEIDLDAVREQVDAVLEDFLEDKAGAAARRSHPPEVANTLRAFLAAGGKRVRALLCVVGWHAAGGSEDRAAVLRVAASLELFVAFALIHDDIMDDSAVRRGRPAVHRALCTRLGQSSRAERLGAGGALLVGNLALIWAQELLHTADLPLRRRRTVHALYDAMLEEVMYGQYLDVMGTGPDDDIDAALRIARYKTATATVERPLQLGAAVAGADDTTVNLCTALGLPLGEAFQIRDDLLDVFGSTDGACTPGLGDLREGKRTVLLALGLRAATPAQQRRLRSLVGRADLDEHGAAEVRAILEETGARRRTEHMITSRYEQALRVLDAAALPTAASRALRALAVTATQYTS

SEQ ID NO: 57509 - DNA, 1011 bp, Streptomyces maritimus
  CDS (1)..(1011): transl_table=11
gtgaccgtcgtcgggtcgttcgggctgagcgtgcgggaccaggctctggaagccgatgtccaggccggattggttgctgtcgaggaagggttgcttgaggcaaccaaaagcgaggtgccgttcatcacggaggccgcccagcacctggtgcgggccggcgggaaacggttccggccgctgctggtgatgctctcggcccagttcggagacccctacgcccccgggatcgtgccctcggccgtggtcgtggagctgacccacctggccacgctgtaccacgacgacgtgatggacgaggccgccgtgcggcgcggggtgcccagtgcgaacacccgctgggacaactcggtcgcggtcctcaccggcgacttcctgttcgcgcgtgcctcccagatcctcgccgacctcggccccgaggcggtccgcgtccaggccctcgccttcgaacggctggtcaccggtcagatcctggagacggccggcccgcaggacggccgcgacccggtcgaccactacctggacgtgctgagcggcaagacgggctccctggtggcggtatcctcccgtttcggcgcgatgatgtccggcgccgacgagacggtggtggaagtcctcacccagtacggcgaacggctcggcgtcgccttccagctcgccgacgacgtcctggacatcgcctccgactccgacgagtccggcaagacgcccggcacggacctgcgcgagggcatccccaccctgcccgtgctgcggctgcgcgagcgggcggcccggctggggctcgccgaggacctcgcgctgtgcgagctgctcgactccgacctgagcgacgacgcgcggcacgccgaggcgctgcgcctgctgcgcgcccacccggcgctggagcaggcccgccgggacaccgtccggtacgcggaggaggcccgggcggcgctcgcccccctgcgcgaatgcgacgcgaaggccgcgctggtggagctgtgcgtcacggtggtccaccgggccggctga

SEQ ID NO: 57510 - protein, 336 aa, Streptomyces maritimus
MTVVGSFGLSVRDQALEADVQAGLVAVEEGLLEATKSEVPFITEAAQHLVRAGGKRFRPLLVMLSAQFGDPYAPGIVPSAVVVELTHLATLYHDDVMDEAAVRRGVPSANTRWDNSVAVLTGDFLFARASQILADLGPEAVRVQALAFERLVTGQILETAGPQDGRDPVDHYLDVLSGKTGSLVAVSSRFGAMMSGADETVVEVLTQYGERLGVAFQLADDVLDIASDSDESGKTPGTDLREGIPTLPVLRLRERAARLGLAEDLALCELLDSDLSDDARHAEALRLLRAHPALEQARRDTVRYAEEARAALAPLRECDAKAALVELCVTVVHRAG

SEQ ID NO: 57511 - DNA, 1011 bp, Streptomyces lividans
  CDS (1)..(1011): transl_table=11
gtgaccgtcgtcgggccgttcgggctgagcgtgcgggaccaggctctggaagccgatgtccaggccggattggttgctgtcgaggaagggttgcttgaggcaaccaaaagcgaggtgccgttcatcacggaggccgcccagcacctggtgcgggccggcggggaacggttccggccgctgctggtgatgctctcggcccagttcggagacccctacgcccccgggatcgtgccctcggccgtggtcgtggagctgacccacctggccacgctgtaccacgacgacgtgatggacgaggccgccgtgcggcgcggggtgcccagtgcgaacacccgctgggacaactcggtcgcggtcctcaccggcgacttcctgttcgcgcgtgcctcccagatcctcgccgacctcggccccgaggcggtccgcgtccaggccctcgccttcgaacggctggtcaccggtcagatcctggagacggccggcccgcaggacggccgcgacccggtcgaccactacctggacgtgctgggcggcaagacgggctccctggtggcggtctcctgccggttcggcgcgatgatgtccggcgccgacgagacggtggtggacgtcctcacccagtacggcgaacggctcggcgtcgccttccagctcgccgacgatgtcctggacatcgcctccgactccgacgagtccggcaagacgcccggcacggacctgcgcgagggcatccccaccctgcccgtgctgcggctgcgcgagcgggcggcccggctggggctcgccgaggacctcgcgctgtgcgagctgctcgactccgacctgagcgacgacgcgcggcacgccgaggcgctgcgcctgctgcgcgcccacccggcgctggagcaggcccgccgggacaccgtccggtacgcggaggaggcccgggcggcgctcgccccgctgcgcgaatgcgacgcgaaggccgcgctggtggagctgtgcgacgcggtggtccaccgggccggctga

SEQ ID NO: 57512 - protein, 336 aa, Streptomyces lividans
MTVVGPFGLSVRDQALEADVQAGLVAVEEGLLEATKSEVPFITEAAQHLVRAGGERFRPLLVMLSAQFGDPYAPGIVPSAVVVELTHLATLYHDDVMDEAAVRRGVPSANTRWDNSVAVLTGDFLFARASQILADLGPEAVRVQALAFERLVTGQILETAGPQDGRDPVDHYLDVLGGKTGSLVAVSCRFGAMMSGADETVVDVLTQYGERLGVAFQLADDVLDIASDSDESGKTPGTDLREGIPTLPVLRLRERAARLGLAEDLALCELLDSDLSDDARHAEALRLLRAHPALEQARRDTVRYAEEARAALAPLRECDAKAALVELCDAVVHRAG

SEQ ID NO: 57513 - DNA, 1011 bp, Streptomyces mycarofaciens
  CDS (1)..(1011): transl_table=11
gtgaccgtcgtcgggccgttcgggctgagcgtgcgggaccaggctctggaagccgatgtccaggccggattggtcgcggtcgaggaagggttgcttgaggcaaccaaaagcgaggtgcccttcatcacggaggccgcccagcacctggtgcgggccggcggcaaacggttccggccactgctggtgatgctctcggcccagttcggcgacccctacgccccgggcatcgtgccctcggcggtcgtggtggagctgacccacctcgccacgctgtaccacgacgacgtgatggacgaggcgtccgtgcggcgcggcgtgcccagtgcgaacacccgctggggcaactccgtcgcggtcctcaccggcgacttcctcttcgcccgcgcctcccagatcctcgccgacctcggtcccgaggcggtccgcgtgcaggccctcgccttcgagcggctggtcaccggccagatcctggagacggcgggcccccaggacgggcgggacccggtcgaccactacctggacgtgctcggcggcaagacgggatcgctggtggcggtctcctgccggttcggcgcgatgatgtccggcgccgacgagacggtcgtcgacgtcctcacccagtacggcgagcggctcggcgtcgccttccagctggcggacgacgtcctggacatcgcctccgactcccacgagtccggcaagacccccgggaccgacctgcgcgagggcatcccgaccctcccggtgctgcggctgcgcgagcgggcggcccggctggggctggccgaggacgtcgccctgtgcgagctgctggactccgacctgtccgacgacgcgcggcacgcggaggccctgcggctgctgcgcgcccaccccgcgctggagcaggcgcgcaaggacaccgtgcgctacgccaaggacgcccgggcggcgctggccccgctgcgggagtgcgaggcgaagtcggcgctggtggagctgtgcgacgccgtggtccaccgggccggctga

SEQ ID NO: 57514 - protein, 336 aa, Streptomyces mycarofaciens
MTVVGPFGLSVRDQALEADVQAGLVAVEEGLLEATKSEVPFITEAAQHLVRAGGKRFRPLLVMLSAQFGDPYAPGIVPSAVVVELTHLATLYHDDVMDEASVRRGVPSANTRWGNSVAVLTGDFLFARASQILADLGPEAVRVQALAFERLVTGQILETAGPQDGRDPVDHYLDVLGGKTGSLVAVSCRFGAMMSGADETVVDVLTQYGERLGVAFQLADDVLDIASDSHESGKTPGTDLREGIPTLPVLRLRERAARLGLAEDVALCELLDSDLSDDARHAEALRLLRAHPALEQARKDTVRYAKDARAALAPLRECEAKSALVELCDAVVHRAG

SEQ ID NO: 57515 - DNA, 1248 bp, Solanum lycopersicum
  CDS (1)..(1248)
atgatattttcaaagggtttagctcagatttccagaaaccgcttcagcagatgccgatggttattttcattacgtcccatcccacaattacatcaatccaatcacatccacgatcctccaaaggttctgggttgcagagtaattcattcatgggtttctaatgctcttagtggtattgggcaacaaattcatcagcaaagcactgctgtagcagaggagcaagtggacccattttcccttgttgcagatgaattatcccttctgacaaacaggctgagatcaatggtagtcgcggaggtcccaaagctggcttcagctgctgaatatttcttcaaactgggagtagaaggaaagaggtttcgaccaacagttttgctattgatggcaactgcattgaacgtacagattcctagatctgctccgcaggtggatgttgattctttttccggggatttgcgtacaaggcagcagtgtatagctgagatcactgagatgatccatgttgctagcctacttcatgatgatgtactggatgatgctgacacaagacgtgggataggttctttaaactttgtgatgggaaataagctagctgtactagccggagactttttgctttcccgagcatgtgtggcacttgcctccttgaagaacacagaggttgtatgtcttctggcaactgttgtggaacatcttgttactggagagacaatgcaaatgacgacttcttctgatgaacgttgtagcatggagtattatatgcagaaaacatattacaagactgcatcattgatttcaaatagttgcaaagcaattgcactacttgctgggcatagtgctgaagtctccgtgctggcttttgactacggaaaaaatctgggattggcatttcaattaatagatgatgttcttgatttcacgggcacatctgcaactcttggcaagggttcattgtctgatattcgtcatgggattgtaactgccccgatattgtatgccatggaggaatttcctcaactgcgtacgctggtggaccgaggttttgatgatcctgtcaatgtggagatcgctctggactaccttgggaagagcagagggatacagagaacaagagaacttgcgagaaagcatgctagccttgcgtcagcggcaattgactctcttccagaaagcgatgacgaggaagttcagagatcaagacgagcacttgtagaacttactcacagagtcatcacaagaacaaaatag

SEQ ID NO: 57516 - protein, 415 aa, Solanum lycopersicum
MIFSKGLAQISRNRFSRCRWLFSLRPIPQLHQSNHIHDPPKVLGCRVIHSWVSNALSGIGQQIHQQSTAVAEEQVDPFSLVADELSLLTNRLRSMVVAEVPKLASAAEYFFKLGVEGKRFRPTVLLLMATALNVQIPRSAPQVDVDSFSGDLRTRQQCIAEITEMIHVASLLHDDVLDDADTRRGIGSLNFVMGNKLAVLAGDFLLSRACVALASLKNTEVVCLLATVVEHLVTGETMQMTTSSDERCSMEYYMQKTYYKTASLISNSCKAIALLAGHSAEVSVLAFDYGKNLGLAFQLIDDVLDFTGTSATLGKGSLSDIRHGIVTAPILYAMEEFPQLRTLVDRGFDDPVNVEIALDYLGKSRGIQRTRELARKHASLASAAIDSLPESDDEEVQRSRRALVELTHRVITRTK

SEQ ID NO: 57517 - DNA, 1300 bp, Solanum lycopersicum
  CDS (39)..(1130)
atacatattttttaaagcttagctttttggaaaagaaaatgagatctatgaaccttgttgattcatggggtcaagcttgtctagttatcaatcaatctttaccttacaattcgtttaatggattgatgaaaatcaattcgaaaaatcgaaaaattttgaaacagagtttatcttatagaacattttcatctctaactgtttcagctattgctaccaatgagaaagttgttatggaaaaagaagaatttaatttcaaggtttacgtagctgaaaaggcgatttgtgtaaataaagctttggatgaggctataatggtaaaagacccacctaagatccatgaagcaatgcgttattcgcttctcgccggcgggaagagagtccggccgatgctctgtcttgctgcctgtgaacttgttgggggaaaccaaggaaatgccatggcggctgcttgtgctgttgagatgatacatactatgtctctaattcatgatgatttgccttgtatggatgacgacgatctccgccgtggaaagccgacgaatcataaagtgtacggtgaggatgtggcggtcctcgccggagatgcgctacttgctttcgcattcgagtacctcgctaccgctacaaccggagttcctccgtcgaggatcctcgttgctgtcgccgaattggcgaaatctgttggaacggaagggttagtagctggacaagtagcggatttagcttgtactggtaaccctaatgtgggattagaaatgcttgaattcattcacatacacaaaacggcggcgttgctagaagcttccgttgtaatcggagcaatcctcggcggcggagctgatgaagaagtggataagttaaggagatttgcccaatgcatcggtttattgtttcaggtagttgatgatatccttgacgtgacaaagtcatcgtcggagctcggaaaaaccgccggaaaagatttggcggttgataaaacgacgtatccgaagctgctgggattggaaaaggctaaggaatttgcggcggagctcaacggcgaagctaaacaacagctggcggcgtttgattcacacaaagctgctccattgattgctttagcagattacattgctaatcgtcaaaattaagattttttgtggaaaatttttagttttatgaagtaattgaatgaatgtagttcttcataatgtgatttgaatcttgatttatcaaatgaaaatgaaaatgaaggtgatatattatattattaataaataaagtcaattttgaatcgtaaattcaaaaaaaaaaaaaaaaa

SEQ ID NO: 57518 - protein, 363 aa, Solanum lycopersicum
MRSMNLVDSWGQACLVINQSLPYNSFNGLMKINSKNRKILKQSLSYRTFSSLTVSAIATNEKVVMEKEEFNFKVYVAEKAICVNKALDEAIMVKDPPKIHEAMRYSLLAGGKRVRPMLCLAACELVGGNQGNAMAAACAVEMIHTMSLIHDDLPCMDDDDLRRGKPTNHKVYGEDVAVLAGDALLAFAFEYLATATTGVPPSRILVAVAELAKSVGTEGLVAGQVADLACTGNPNVGLEMLEFIHIHKTAALLEASVVIGAILGGGADEEVDKLRRFAQCIGLLFQVVDDILDVTKSSSELGKTAGKDLAVDKTTYPKLLGLEKAKEFAAELNGEAKQQLAAFDSHKAAPLIALADYIANRQN

SEQ ID NO: 57519 - DNA, 1267 bp, Solanum lycopersicum
  CDS (49)..(1146)
acaccattgccataataattctcttcaaaattcctaaaaactcatacaatggcatttttagctaccatttctggccttgacaatctgttcctttctaataccccaaacaataactttgctttcagtagaaaactcccaccaagccaatcttacagtttccttcacaagaaaatacacgctagcgatgttgcgaactcgttccaaacttttcaagtcaaggaacgagatgtttcatccaaggcagagaaattcatcttgcctgagtttgagtttcaagaatacatggtaacgaaggcaatcaaggtaaacaaagcactagatgaagcaataccaatgcaagagcctataaaagttcatgaagccatgaggtactcacttctagctggaggaaaacgtgtccggccgatcctctgcatggcttcttgtgaagttgtaggaggggatgaatccttagctatacctgcagcttgcgcagttgagatgatccataccatgtcactcgtccatgatgatcttccctgcatggacaacgatgatctacgtcgtggcaagcccacgaaccataagatttttggagaaaacactgcagttcttgcaggggatgcacttttatctttggcctttgaacatgtggctaccaagactcagaatgtgccaccccaaagagtggtccaagccattggggaattgggttcagctgttggctcagaagggctcgtggcagggcagattgtggacttggcgagtgaaggaaaacaagttagcctaactgaactggagtacattcaccaccataagacgtcgaagcttttggaggctgctgtggtttgtggggcaataatggggggaggaaatgaggttgatgtggagcgaatgaggagctatgctaggtgcattggactcttatttcaagtggtagatgatattcttgatgttaccaagtcatcagatgagctgggaaagacagcgggtaaggacctaataacagataaggctacatatcctaagttgatggggctagaaaaggctcgacaatatgccggtgagctgatggctaaggccatgaatgagctaagctacttcgactatgcaaaggcagcacctctttatcatattgctagttatattgcaaatcgacagaattgataggctgaatagttcatgatgaagacgctgtatataccttaaagaattgtctgtataagtaaaggtaagtatgatggaactgatctttgtgtcgtaaaaaaaaaaaaaaaaaaaaaaaaaa

SEQ ID NO: 57520 - protein, 365 aa, Solanum lycopersicum
MAFLATISGLDNLFLSNTPNNNFAFSRKLPPSQSYSFLHKKIHASDVANSFQTFQVKERDVSSKAEKFILPEFEFQEYMVTKAIKVNKALDEAIPMQEPIKVHEAMRYSLLAGGKRVRPILCMASCEVVGGDESLAIPAACAVEMIHTMSLVHDDLPCMDNDDLRRGKPTNHKIFGENTAVLAGDALLSLAFEHVATKTQNVPPQRVVQAIGELGSAVGSEGLVAGQIVDLASEGKQVSLTELEYIHHHKTSKLLEAAVVCGAIMGGGNEVDVERMRSYARCIGLLFQVVDDILDVTKSSDELGKTAGKDLITDKATYPKLMGLEKARQYAGELMAKAMNELSYFDYAKAAPLYHIASYIANRQN

SEQ ID NO: 57521 - DNA, 1119 bp, Medicago truncatula
  CDS (1)..(1119)
atgagtgctgtgaatcttaacacatggacacactccaatttcatgtgcaatcaagttactactactgctacaactagatccagatccagaatcccatctttctattttaccaaaatacccatttcagtttcacccattaaaccatcaaaacccaattcttcttcattttctttctctgtttcttcattacttacaaaacaagaaccaatagaagcagaagagcaaaacccaatcttcaatttcaaatcctacatgatagaaaaagcaactagggttaacaaagccttagacgacgccgtttcattacgcgaaccgttaaaagttcatgaagccatgcgttactctcttctcgccggcggaaaacgcgttcggccggttctctgtttagccgcctgtgaactcgtcggaggaaccgaaccgatggcgatgccagccgcctgcgccgttgaaatgatccacacgatgtctctcatccacgatgaccttccttgtatggataacgatgatctccggcgaggtaaacctacaaaccacaaagtcttcggagaagacgttgctgttctcgccggagatgctcttctcgcttttgctttcgaacatattgccgtctccaccgttgatgtttctccggcgcgaattgtccgtgcaatcggtgaattagcgaaatcaataggctcggaaggactcgttgcgggacaagttgttgatataaactcagaaggtttatccgatgtcggactcgaacggcttgaattcattcatttgcataaaactgcagctttgttagaaggtgctgttgttcttggtgcaatattaggtggtggaagtgatgaagatgttgaaaaactgcgaaaattcgcgacatatattggtttattgtttcaggttgttgatgatattcttgatgtgacgaaatcttcacaagagttagggaaaactgctgggaaagatttggtagctgataaggttacttatcctaagcttttagggattgagaaatcgaaagagtttgctgagaaattgaaccgtgatgcacaagaacaactttctgggtttgatttgaataaatctgctcctttgattgctttggctaattacattgcttataggcaaaactag

SEQ ID NO: 57522 - protein, 372 aa, Medicago truncatula
MSAVNLNTWTHSNFMCNQVTTTATTRSRSRIPSFYFTKIPISVSPIKPSKPNSSSFSFSVSSLLTKQEPIEAEEQNPIFNFKSYMIEKATRVNKALDDAVSLREPLKVHEAMRYSLLAGGKRVRPVLCLAACELVGGTEPMAMPAACAVEMIHTMSLIHDDLPCMDNDDLRRGKPTNHKVFGEDVAVLAGDALLAFAFEHIAVSTVDVSPARIVRAIGELAKSIGSEGLVAGQVVDINSEGLSDVGLERLEFIHLHKTAALLEGAVVLGAILGGGSDEDVEKLRKFATYIGLLFQVVDDILDVTKSSQELGKTAGKDLVADKVTYPKLLGIEKSKEFAEKLNRDAQEQLSGFDLNKSAPLIALANYIAYRQN

SEQ ID NO: 57523 - DNA, 1225 bp, Stevia rebaudiana
  CDS (30)..(1115)
accatcaatttctcaaatttctaattaaaatggctcttgtaaatcccacagctttgttctatggaacctccataagaaccagacccacaaacttgctcaacccgacccaaaaacttcgacccgtttcctcttcttctttgccttccttctcttcagtttctgcaatcttgacggaaaaacaccaatcaaacccatcagaaaacaataacttgcaaacccatctcgaaacaccattcaatttccactcttacatgctggagaaagcaaacatggtgaatgaagctctggacgcctcggttccactcaaagacccgataaagatccatgaatccatgcggtactcccttctagctggcgggaaacgcatccgaccgatgatgtgcatcgccgcttgcgaaatagtcggaggcaacatattaaacgccatgccagctgcatgcgcggtcgagatgattcacaccatgtcactagttcatgacgaccttccatgcatggataacgacggcttccgacgtggaaaaccaacaagccacaaggtgtacggtgaagaaatggcggttctaaccggggacgcgttgctctcattatccttcgaacatatcgcgaccgcgacaaaaggcgtatccaaagacaggatcgtccgagtcattggtgaactcgcaaggtccgttggctcggagggtttggtcgccggtcaggtggttgatattttatccgaaggggctgatgttgggttagaccacttggagtatattcatatacacaagactgcaatgttgcttgagagctcggtcgtgatcggcgcgatcatgggcggtgggtctgaccaacagatcgaaaagttgcgaaagtttgcgagatcgattggtttgttgtttcaggtggtagatgatattcttgatgtcacaaagtcgactgaggaattggggaaaacggcgggaaaagatttgctgacggacaagacaacgtatccgaagttgttggggatcgaaaaatcgagagaatttgcggagaaattaaacaaggaagcgcaagaacaattgtcggggtttgatcgccgcaaggcggctccgttaattgcccttgctaattacaatgcttataggcaaaactgatccattatttgtttgtattacaatttcaaaaggttacgtgtatttgaataactgaattatgctaagaatcgaatcactttgaccaagtttataacccaaatacacattag

SEQ ID NO: 57524 - protein, 361 aa, Stevia rebaudiana
MALVNPTALFYGTSIRTRPTNLLNPTQKLRPVSSSSLPSFSSVSAILTEKHQSNPSENNNLQTHLETPFNFHSYMLEKANMVNEALDASVPLKDPIKIHESMRYSLLAGGKRIRPMMCIAACEIVGGNILNAMPAACAVEMIHTMSLVHDDLPCMDNDGFRRGKPTSHKVYGEEMAVLTGDALLSLSFEHIATATKGVSKDRIVRVIGELARSVGSEGLVAGQVVDILSEGADVGLDHLEYIHIHKTAMLLESSVVIGAIMGGGSDQQIEKLRKFARSIGLLFQVVDDILDVTKSTEELGKTAGKDLLTDKTTYPKLLGIEKSREFAEKLNKEAQEQLSGFDRRKAAPLIALANYNAYRQN

SEQ ID NO: 57525 - DNA, 1305 bp, Chrysanthemum x morifolium
  CDS (176)..(1213)
  misc_feature (523)..(523): y is t or c
acgcggggattgcataatgacgagttttcttgttattctagcattgtcatccaaaaccacaacgttatcatcaccatcatccaccatgtcttggtaaaactaaaaaaatcctctcattttcacaaatctttacacaaaccaaatcccccaaaaaaatccatcatcagaaaacaaaatgattcttattaatcccacatctttgttctatggagcctcacttaaacccagatctacaagcttcatttaccagacccgaaaatcacaatccgtttcaatttcagcacttttgaccaaagaacagcaatcaaaacatacccaattggaatctgaatttgatttcaagtcttacatggtacagaaagcaaatacggtaaaccaagccttagacgacgccgtaccaataagagagccgaaaaaaattcatgaatctatgcgctactcgcttttagcaggcggaaaacgtgtccgaccaatattatgtctcgcttcatgcgaacttgtcgggggagaccaaatatcagcyatgccagccgcatgtgctgttgagatgatacatactatgtcattaatgcacgatgatcttccttgtatggataacgatgatttccgtagagggaagcctactaaccatatagtttatggtgaggaaatagctgtattagcaggtgatgctttgttgtcatttgctttcgagcatgtggctactgctactaaagatgtttcagctgagagaattgtccgtgctattggcgaattagccaaatgtatcggctctgaagggcttgttgctggacaagttgtggatatttgttctgaaggtgctgatgtcggtttggagcatttggagtttattcatttacataagactgctgctttgcttgagggttctgttgtgctaggtgcgattatgggtggtgggtcggatgttgaggttgaaaggctaagaaagtttgttagatcaattgggttgttgtttcaggttgttgatgacatacttgatgtgacgaaatcttctgaggagttggggaaaactgctggtaaagatctggtggctgataagacgacgtatcccaagttgttggggattgagaaatcgcgcgaatttgctgagaaattgaataaggaagcacaggaacagttgaaggagtttgatattcgaaaagctgcgccgttaattgctcttgctaattatattgcatatagggacaattgaatcgattattaatccatttgtaatttgaattaattggtatcttatatgaatctgaattgcaaaaggaaaaaaaaaaaaaaaaaaaaaaaaaa

SEQ ID NO: 57526 - protein, 345 aa, Chrysanthemum x morifolium
MILINPTSLFYGASLKPRSTSFIYQTRKSQSVSISALLTKEQQSKHTQLESEFDFKSYMVQKANTVNQALDDAVPIREPKKIHESMRYSLLAGGKRVRPILCLASCELVGGDQISAMPAACAVEMIHTMSLMHDDLPCMDNDDFRRGKPTNHIVYGEEIAVLAGDALLSFAFEHVATATKDVSAERIVRAIGELAKCIGSEGLVAGQVVDICSEGADVGLEHLEFIHLHKTAALLEGSVVLGAIMGGGSDVEVERLRKFVRSIGLLFQVVDDILDVTKSSEELGKTAGKDLVADKTTYPKLLGIEKSREFAEKLNKEAQEQLKEFDIRKAAPLIALANYIAYRDN

SEQ ID NO: 57527 - DNA, 1157 bp, Lupinus albus
  CDS (136)..(1086)
cacaaaaccactagattcagatcttcaagttttcaaatcttccatagctttacaaagttacccatttcttttataagcatcgaaaaaccaaaaaggtcacaactttcatatttttcttctttctctatctctgcaatgctcactaaagaagataccgttaaagacaaagaagaagaagaagaagaagaagagaaacccagattcaatttcaacttgtacatggttgagaaatcacgttcagtgaaccaagctttaaacgacgccgtttcgttacgtgagccacataaaattcacgaagctatgcggtattctctactcgccggcgggaagcgcgtgaggccggtgttatgcattgcagcctgtgaagttgtcggcggcaatgaatctacggcgatggccgccgcatgttcaattgagatgatacacactatgtcccttattcatgatgatctcccctgcatggacaacgacgatcttcgccgagggaaacccacaaaccacaaggttttcggcgaaaatatcgctgtccttgcaggggatgcattattggcatttgcctttgagcatatcgccgtttcaacctccggtgtgtcaccggagagaattatcggcgcaatcggggagcttgcgaaatcgatcggaactgaaggccttgttgcaggacaagtagtggatattaattcagaagggttatgtgatattgggttagagaaattggaatttattcatcttcataaaacagcagcacttctagaaggttctgttgttgttggagcaattcttggtggtgggtgtaatgaagaggttgaaaagttaaggatgtttgctaggtacataggattgatgtttcaggttgttgatgatgttcttgatgttactaagtcttcaaaggaattgggaaaaactgcagggaaggatttggtggctgataaggttacttaccctaagcttttagggattgagaaatctaatgagtttgctcagaaattgaatagggatgcacaagaacagctttctggttttgatccagttaaggttgctcctttgattgcattagctaattacattgcttatagcccaaattaaactctcttgtgtaacaatttgttgtttagaaaaggttaaatttatggcaattattgagtttacttattacc

SEQ ID NO: 57528 - protein, 316 aa, Lupinus albus
MLTKEDTVKDKEEEEEEEEKPRFNFNLYMVEKSRSVNQALNDAVSLREPHKIHEAMRYSLLAGGKRVRPVLCIAACEVVGGNESTAMAAACSIEMIHTMSLIHDDLPCMDNDDLRRGKPTNHKVFGENIAVLAGDALLAFAFEHIAVSTSGVSPERIIGAIGELAKSIGTEGLVAGQVVDINSEGLCDIGLEKLEFIHLHKTAALLEGSVVVGAILGGGCNEEVEKLRMFARYIGLMFQVVDDVLDVTKSSKELGKTAGKDLVADKVTYPKLLGIEKSNEFAQKLNRDAQEQLSGFDPVKVAPLIALANYIAYSPN

SEQ ID NO: 57529 - DNA, 909 bp, Enterobacter agglomerans
  CDS (1)..(909): transl_table=11
atgacggtctgcgcaaaaaaacacgttcaccccactcgcagtgctgctgagcaattactggctgatattgatcggcggcttgagcagttattgcctgtcgagggagaacgggattttgtaggtgccgcgatgcgtgagggcgcgctggcaccgggtaaacgtattcgcccgatgctgttgttgctcacagcacgcgatctgggctgcgctgtcagccacgagggattgctggatatcgcctgcgccgtggaaatggtgcacgcggcatcgttgattcttgatgatatgccctgtatggatgatgcgcagatcgtcggcggccgccctaccgttcactgtcagtacggcgagcatgtggcaatactggcggcggtcgccttactgagcaaagcctttggggtcattgctgatgcagatggcctgaccgcgctggcaaaaaaccgcgcagtgtcagaattatcaaacgccattggtatgcaaggtttggtacagggtcagtttaaggatctgtcagaaggcgataagcgccgcagcgctgaagccattttgatgacgaaccactttaaaaccagcaccctgttttgcgcgtctatgcagatggcctcaattgtggcgaatgcctccagcgaacgacgcgattacctacaccgtttttcgcttgatctcggccaagcgtttcaactgctggacgacttaacggatggcatggctgacacgggtaaggacatcaatcaggatgaaggcaaatcgaccctggtcaatttattaggctccagagcagttgaagagcgtctgcggcacagtctgcatctcgccagtgagcacctctcagccgcgtgtcaaaacggtcattctactcaacaatttatccaggcctggtttgacaaaaaactcgctgccgtcagttaa

SEQ ID NO: 57530 - protein, 302 aa, Enterobacter agglomerans
MTVCAKKHVHPTRSAAEQLLADIDRRLEQLLPVEGERDFVGAAMREGALAPGKRIRPMLLLLTARDLGCAVSHEGLLDIACAVEMVHAASLILDDMPCMDDAQIVGGRPTVHCQYGEHVAILAAVALLSKAFGVIADADGLTALAKNRAVSELSNAIGMQGLVQGQFKDLSEGDKRRSAEAILMTNHFKTSTLFCASMQMASIVANASSERRDYLHRFSLDLGQAFQLLDDLTDGMADTGKDINQDEGKSTLVNLLGSRAVEERLRHSLHLASEHLSAACQNGHSTQQFIQAWFDKKLAAVS

SEQ ID NO: 57531 - DNA, 1317 bp, Anthonomus grandis
  CDS (1)..(1317)
atgttttcggtgaaattgtgccgaaaccggtcttgccgggagttaatcaaaaacattagacggggtattacgaaaacttcgacggatagtaatagcgacgcgatctcgcgggcacaggaccataaccaaatgaataattttaatttggaggggccgagtagtcaataccacacgaatgttaacaacaaaaggtggcataaacaaatgcaatttaataatttaagggccctttcaacaatccaacaaacgatcccaaaaccgtcacactccagcaccttggtgtccaaggaacaatccagggactttatggctctatttccagacttggtgagagaactcaccgaactgggaaggaatccagagttgcccgatgtgatgcgcagagttgctagggtactgcaatataatgttccaaacgggaagaaaaatagaggcttaatactaattagtgcgtacaagatgttggaagatcccaagaatttaacaccggagaatattaagcttgctagcgttttgggatggtgtttggaaatgattcattcctgtttccttgttctggacgatataatggacaattcggagacccgtagggggtcattgtgctggtaccgccaaaacggcattgggttatcggcaataaacgacggactcatactggaaaacgctgtttacaccctacttaaaatgcaccttagggaccatccagcgtacgtcccaataatagaactcttccatgaaactgtttccaagaccaccttgggtcagtgcttagactctatgtgtctagattccgatggaaaacccaagttagaaatgttttccatgagcagatacacctcgatcgtaaaatacaagactgcttactatagtttccatatgcctgtggctgtggcgatgtacttggctggaatgaacgatccagagcagcacaggcaagcgaagaccattttgctggaaatgggcgaatttttccagattcaggacgacttcctggattgtttcggtgatccagctgtaactggcaaaaaaggcaccgatatccaagagggcaaatgctcctggttggccgtggtagctctccaaagagcttcggccgcccaaaggaagatcatggaggaacactatggagtggatgatcccaattctgtggcgatcattaagaaactttatgaagatttgagcttacccaacacatatgccatttatgaggaggaatcttacaatatcattaagactcacattcagcaaatttctaaagggctgcgtcacgacctgttctttagtataatggagaagttgtacaaacgggagtgttaa

SEQ ID NO: 57532 - protein, 438 aa, Anthonomus grandis
MFSVKLCRNRSCRELIKNIRRGITKTSTDSNSDAISRAQDHNQMNNFNLEGPSSQYHTNVNNKRWHKQMQFNNLRALSTIQQTIPKPSHSSTLVSKEQSRDFMALFPDLVRELTELGRNPELPDVMRRVARVLQYNVPNGKKNRGLILISAYKMLEDPKNLTPENIKLASVLGWCLEMIHSCFLVLDDIMDNSETRRGSLCWYRQNGIGLSAINDGLILENAVYTLLKMHLRDHPAYVPIIELFHETVSKTTLGQCLDSMCLDSDGKPKLEMFSMSRYTSIVKYKTAYYSFHMPVAVAMYLAGMNDPEQHRQAKTILLEMGEFFQIQDDFLDCFGDPAVTGKKGTDIQEGKCSWLAVVALQRASAAQRKIMEEHYGVDDPNSVAIIKKLYEDLSLPNTYAIYEEESYNIIKTHIQQISKGLRHDLFFSIMEKLYKREC

SEQ ID NO: 57533 - DNA, 1083 bp, Arabidopsis thaliana
  CDS (1)..(1083)
atggctaatactgttcatctcagctcatcctctctcttcatccaaaccagaggacgaaaatacaactccatattatcattcaacaatctccaaaaacgcactgttttgtctctctcttgtgctctcacctcacaaggcggcaaagacatgattccaccaaaaggaaaaagcaatgatcgcaactttgcctttgacttcaagtcttatatgatccgtaaagccgaatctgtaagtatggctctcaacgtttcagtacctccccaagatcccctcgcaatccaagaggcggtgcggtactcattactagcgggcggaaaacgtgtgcgacctctgctctgcattgctgcctgtgagcttgtgggaggcgacgaggctactgccatgtcagccgcttgcgcggttgagatgatccacacgagctctctaatccatgacgaccttccgtgcatggacgatgccgacctccgtagaggcaagcccaccaaccacaaggtatttggagaacacatggcggttttggcgggcgatgcactccttgctttggcgtttgagcacatgacggttgtgtcaagtgggttggttgctcctgagaggatgatccgttctgtaactgagctggcaaaggccatcgggacaaaagggttagtggctgggcaagtgagtgacttatgtagccaaggattgaatccatatgacgtcgggttggagcgtctagaattcatccacctacacaaaacggccgccttgttggaggcagcggcggttttaggagctataatcggaggtggaacagaggaagagatccaaaagctaagaaagtatgggagatgtattgggcttttgtttcaggtagttgatgatattattgatgtaacagaatctactgaggaattgggtaagacagccggaaaagacgtaaaggcaagaaagctgacgtatccaaggctgataggtttggagagatccagggaagttgcagagaaactgagaagagaagcagcggaacagcttctagggtttgattccaataaggtggcgcctctggtggctcttgctagctacattgcttgcagacacaactga

SEQ ID NO: 57534 - protein, 360 aa, Arabidopsis thaliana
MANTVHLSSSSLFIQTRGRKYNSILSFNNLQKRTVLSLSCALTSQGGKDMIPPKGKSNDRNFAFDFKSYMIRKAESVSMALNVSVPPQDPLAIQEAVRYSLLAGGKRVRPLLCIAACELVGGDEATAMSAACAVEMIHTSSLIHDDLPCMDDADLRRGKPTNHKVFGEHMAVLAGDALLALAFEHMTVVSSGLVAPERMIRSVTELAKAIGTKGLVAGQVSDLCSQGLNPYDVGLERLEFIHLHKTAALLEAAAVLGAIIGGGTEEEIQKLRKYGRCIGLLFQVVDDIIDVTESTEELGKTAGKDVKARKLTYPRLIGLERSREVAEKLRREAAEQLLGFDSNKVAPLVALASYIACRHN

SEQ ID NO: 57535 - DNA, 1302 bp, Ips pini
  CDS (1)..(1302)
atgttctcgatgaaggcgtgcagaaatcgcccttgtacgcggtggctgaaggagttccgcaggaacatcagcaaaacgtcgacggacaaaaacagcgacgccatcatcaggagtcaggacaagatgcaacacgcatcgaagacgcacgaagtcgcctttgagaaaaatctcagctacaccaggtggatgaaacagatgcaacacaataacattagggctttatcaacaattcaacaaactctagtgcgtccacaacaatccagttctctggcctccaaggagcaatccagggattttatggcccagtttccggatattatcagggaactaacggaagtgggaagaaaccaagaattgcccgaagttatgaaacgttacgctagggttcttcagtacaacacgccaaacggaaagaaaactcgcggactgattacaatttccacctacaaaatgttggaggaccccgccaaaattaccaccgaaaatctgaaaaaagccggtattttgggatggtgcatcgaaatgttgcacacatacttcctgatcattgatgacatcatagatcactcagacacgcgacgaggcgccatctgttggtaccgtcaaccaggtatcggtctgactgccgtatacgatgctgtcatgatggagaacggtgtgtacctcctactgaaaaggcatttcaaagatcatcccatgtacaccaatatcatcgagctgttccacgacatggccttgaaaacgtcactaggccaaagcctggacactatgtgtctcaatgatgatggtaaacccaaattggacattcacaatgagcaggacacctccatagtcaactacaagacgtcgtactatagtttctatcttccggtggccgccgccatgtatttgttgggcatggacgatccagagcaacacagacaggcgcgcactattttactcgatatgggacagttcttccaaatccaggatgactttctggactgtttcggtgatccgaatgtgactgggaaattgggaacggacattcaagacggtaaatgttcctggttggctgtgatggcacttcaaaggtccactccagcccaaagaaagatcatggaagaacattatggcaggtccgaacctgaatcagtagcaataatcaaacagctctacgaagatctaactttaccgaacacgtacgccatctatgaagaggaaagcttcaacataatcaaaactcacatccagcagatttctaaggactgcgtcacgatcttttctaaacattatggagaagctttcaagcgcgagagttaa

SEQ ID NO: 57536 - protein, 433 aa, Ips pini
MFSMKACRNRPCTRWLKEFRRNISKTSTDKNSDAIIRSQDKMQHASKTHEVAFEKNLSYTRWMKQMQHNNIRALSTIQQTLVRPQQSSSLASKEQSRDFMAQFPDIIRELTEVGRNQELPEVMKRYARVLQYNTPNGKKTRGLITISTYKMLEDPAKITTENLKKAGILGWCIEMLHTYFLIIDDIIDHSDTRRGAICWYRQPGIGLTAVYDAVMMENGVYLLLKRHFKDHPMYTNIIELFHDMALKTSLGQSLDTMCLNDDGKPKLDIHNEQDTSIVNYKTSYYSFYLPVAAAMYLLGMDDPEQHRQARTILLDMGQFFQIQDDFLDCFGDPNVTGKLGTDIQDGKCSWLAVMALQRSTPAQRKIMEEHYGRSEPESVAIIKQLYEDLTLPNTYAIYEEESFNIIKTHIQQISKDCVTIFSKHYGEAFKRES

SEQ ID NO: 57537 - DNA, 819 bp, Thermotoga sp
  CDS (1)..(819): transl_table=11
atgaagaaggagaaagttgaagaaagaatacgcgagattttgaggcctggatgggatcttctcacagaagaagccatgctgtactccgcgacggttggaggaaagaggatccgtcctctcctcgtcttgacactgggtgaggatttgggagtggaagaggaaaagcttctcgatgtggcggtggccgttgaactctttcacacggcttctctgatacacgatgatcttcccccaatagataacgcggattttcgaagagggaagccttcttgtcataggacctatggtgaagatatcgcccttcttgcgggagatggtctgttcttcctcgctttttctcagatatctaaaatcggaaattcaaagatttttgaagagttttcggaaacggcctacaaacttcttttgggggaagcgatggatgtggaattcgaaagaagaaagatggaaatctcgcaggagatggtggagagaatgtacgctttcaaaacgggagcgctatttgctttctgtttctcagctccatttatcctgaaaggaaaggatcacaccaagatgaaactcctcggagagaagttcggggtggctttccagatatacgacgatctgaaagacattcttgggtctttcgaaaaggtgggaaaggacctcggaaaagacacagaaaaagtgacgcttgtgaaaaaggtggggattcagaaagctcgtgagatggccgataagtattatgaagaagttttgaaaggtatcgaatcagaaggtctctttcgcacgctgtttcttctgaaagaactcaaacagatggtggaggagagatga

SEQ ID NO: 57538 - protein, 272 aa, Thermotoga sp
MKKEKVEERIREILRPGWDLLTEEAMLYSATVGGKRIRPLLVLTLGEDLGVEEEKLLDVAVAVELFHTASLIHDDLPPIDNADFRRGKPSCHRTYGEDIALLAGDGLFFLAFSQISKIGNSKIFEEFSETAYKLLLGEAMDVEFERRKMEISQEMVERMYAFKTGALFAFCFSAPFILKGKDHTKMKLLGEKFGVAFQIYDDLKDILGSFEKVGKDLGKDTEKVTLVKKVGIQKAREMADKYYEEVLKGIESEGLFRTLFLLKELKQMVEER

SEQ ID NO: 57539 - DNA, 1434 bp, Picrorhiza kurrooa
  CDS (114)..(1229)
acgcgggaaggcaattctatacaagattcacataattctcttctctgcacctgaatcagcaatcacactactatctctgatcttaatccacacttgatatttcctcaccaacaatgagccttgtaaattctattacatggtcacaaacaagctccatactcaacattcaaagcaacatatcaaaaaaactcacacccttctctattctcccacatccactaacaaacaatcttccaatctcccttttcccaaacccaaaatcaaacatatccaattccaacactcccctctcagcaattctcaccaaagaccagaaaccccaaaatcctccaaccacacccacattcgatttcaagtcctacatgctccaaaaagcggattccgtaaacaaagccttagacgactcaatccccctaacagagccgttaaaaatccaagaatcaatgcgatattcccttctcgccggcgggaaaagaatccggccaatgctctgcatcgccgcctgtgaactcgtaggcggcgacgagtccaccgccatgccggcagcgtgcgcagtcgagatggtccacaccatgtccttgatgcacgacgacttgccatgcatggataacgacgatttacgcagggggaaaccgacgaatcacaaggtcttcaccgaagatgttgcggttttggcgggagacgcgatgctggcattttcgttcgaacacgtggcgagtttgacgaaaggggtttgttcagaaaggattgtgagagtgatttatgagcttgccaagtgtgttgggtgtgaagggcttgtcgcagggcaagtggtagatatatgttctgagggaatggatgaggtgggattggagcatttggagtttatacatttgaataaaaccgcggctttattggagggatcggtggttttgggcgcgattttgggtggtgggagtgatgaggaggttgagaagttgaggaatttcgctaggtgtattgggcttttgtttcaggttgtggacgatattcttgatgttaccaagtcgtccaaagaattggggaagacggccgggaaggatttggtggcggataagacgacttatccgaagctgatcgggattgagaaatccaaggagtttgctgagaggttgaatagggaagctaaggagcaccttgctgggtttgatcagaacaaggcggctcctttgattgctctggctgattacattgcgtacagggataattgatttcttgtcatcatttgtatttcgtttggatatttattcatataaacacatcaaatccatggttgcttctcattgaaacagtattgagaaaatcttaatatataggtttgaaaagccagcttgggatattgtatcaaagttcatgaatggcgaaagtttaactttttcttgtaaaaaaaaaaaaaaaaaaaaaaaaaaaaaaaaa

SEQ ID NO: 57540 - protein, 371 aa, Picrorhiza kurrooa
MSLVNSITWSQTSSILNIQSNISKKLTPFSILPHPLTNNLPISLFPNPKSNISNSNTPLSAILTKDQKPQNPPTTPTFDFKSYMLQKADSVNKALDDSIPLTEPLKIQESMRYSLLAGGKRIRPMLCIAACELVGGDESTAMPAACAVEMVHTMSLMHDDLPCMDNDDLRRGKPTNHKVFTEDVAVLAGDAMLAFSFEHVASLTKGVCSERIVRVIYELAKCVGCEGLVAGQVVDICSEGMDEVGLEHLEFIHLNKTAALLEGSVVLGAILGGGSDEEVEKLRNFARCIGLLFQVVDDILDVTKSSKELGKTAGKDLVADKTTYPKLIGIEKSKEFAERLNREAKEHLAGFDQNKAAPLIALADYIAYRDN

SEQ ID NO: 57541 - DNA, 1140 bp, Rhodococcus erythropolis
  CDS (1)..(1140): transl_table=11
ttggaggccaccctgtccgcaggaaccgcgcgcgttggacagagttcgaccaacaccgcaccgcatccgacctcactcgaactgccaggcgtgttcgaaggagcgctccgcgacttcttcgattcacgccgcgaactcgtctcgaacatcggcggtggatacgagaaagccgtcagcaccctcgaagccttcgtcctgcgcggaggaaagcgcgtccggccgtcgttcgcctggacgggatggctcggcgccggaggcgacccgaacgggagcggcgcggacgcggtgattcgtgcatgcgcggccctcgaactggtgcaggcctgcgcgctcgtccacgacgacatcatcgacgcatcaacgaccaggcgcggcttcccgaccgttcacgtcgaattcgaggaccagcaccgaggcgaggagtggagcggcgactccgcgcacttcggcgaggccgtcgccattctcctcggcgacctggccttggcctgggctgacgacatgatccgagaatccgggatcagccccgacgcggccgcacgagtgagcccggtctggtcggcaatgcgcaccgaggtgcttggtggccaattcctcgacatcagcaacgaagcccgcggagacgagaccgtcgaggcagccatgcgggtcaaccgttacaaaaccgccgcgtacacgatcgaacgcccactgcacctcggcgccgcattgttcggtgcagacgccgagttgatcgatgcctaccggacgttcggcaccgacatcgggattgccttccaacttcgcgacgacctgctcggtgtcttcggagatccgtccgtcacgggcaaaccgtcgggcgacgatctcatcgccggtaagcggactgtcctgttcgcgatggcgcttgcccgcgccgacgccgcagatccggcggcagcagaactgctccgcaacggaatcggcacccagttgaccgacaacgaagtcgacactctgcgtcaggtgatcaccgatcttggcgccgtcaccgacgtcgaaacgcagatcgacaccctcgtcgaggcagctgcgaacgccctcgactcgagcacggcaacggcagagtccaaggctcgcctgaccgatatggcgatcgcggccacgaagcgaagctactga

SEQ ID NO: 57542 - protein, 379 aa, Rhodococcus erythropolis
MEATLSAGTARVGQSSTNTAPHPTSLELPGVFEGALRDFFDSRRELVSNIGGGYEKAVSTLEAFVLRGGKRVRPSFAWTGWLGAGGDPNGSGADAVIRACAALELVQACALVHDDIIDASTTRRGFPTVHVEFEDQHRGEEWSGDSAHFGEAVAILLGDLALAWADDMIRESGISPDAAARVSPVWSAMRTEVLGGQFLDISNEARGDETVEAAMRVNRYKTAAYTIERPLHLGAALFGADAELIDAYRTFGTDIGIAFQLRDDLLGVFGDPSVTGKPSGDDLIAGKRTVLFAMALARADAADPAAAELLRNGIGTQLTDNEVDTLRQVITDLGAVTDVETQIDTLVEAAANALDSSTATAESKARLTDMAIAATKRSY

SEQ ID NO: 57543 - DNA, 1657 bp, Ginkgo biloba
  CDS (225)..(1400)
ggcataattcatgtttcctataactagagtccaatacgcttggaattgcattcggcctttgcctttgtgagaggtccaaatcagcaattatcctagaattccatctgtattttatctccggaagagctctatatctttttatctttcaatttatatctcccaaggctgattacgagtttattctgtcttttgatatagttgagagcagaagcataaactaggagatggctgccagtgcaatgacagcaagttaccaaagcctgcacttttgtttgcagtcaaagaatatggcttctccagaatgcattttgaagagtttttcccttccatgtagtcgttttaatggagcttcaacctcgttaggagcttcaaatggtcagtatatgggttttcgtggccatttgagaaaggggttactgtcgtccagaggtgtaatgtcgtctggctctttaaacacagttgctcaattggttagcgaggctgaaacggtcaaggagaagaaggattttgaatttgatttcaaaaaatatatgtattccaaggcgatatcagtgaatgaggcgctagacaaggctgttcctacgcattaccctgagaaaatacacgaatcaatgagatattcgcttctagcaggagggaagcgtgtccggccaacgctctgtattgcagcgtgtgaacttgtaggaggaacggaggatctggccatgccagctgcctgtgcaatggaaatgatccatacaatgacattaatacatgatgatttgccttgcatggacaatgataatttacgtagaggaaagcccacaaatcacaaggcatttggcgaagacactgctgtacttgcaggagatgcactcctttcttttgcatttgaacatattgcaaggtctacaagcaaaactgtggaaagtgagagggttttgagggtgatatgtgaactgggtaaatcgatgggatctgaagggcttgtagctggacagattgttgatattgcaagtgaaggtgatacttcggttgaccttaaaactctggaatatattcatcttcacaaaactgcagtgctattggagtgttcggttgtgtctggagcaatcatcggaggtgcctctgaggaagagattgagagaacaagaaggtatgcccgatgtgtgggtcttttgtttcaggtggttgatgatatactagatgtcacaaaaacatcagaagaattgggtaagactgcagggaaggatctcatcagtgataaagctacttatcccaagctgatgggtcttgagaaagcaaaggaatttgctgttgaattggtcaacaaggccaaggaagaactgtcttactttgatccagtaaaggctgcacctttgttaggtcttgcagattatattgccttcagacaaaactagatccattgaggaagaaaaactagatttgttcttagatatgcgttgtaattttctccgcaattgaccatgtagttgggtctggccgctagcacgatgcattcctcatctggtagggataaactcccccatggaatcatcccctgcacacacattgtagagcctaatactaatgggagactgcatctaggtgtggggaatcatggctcaaaataatatgattcctcttttctgttttcaaaaaaaaaaaaaaaaaaaaa

SEQ ID NO: 57544 - protein, 391 aa, Ginkgo biloba
MAASAMTASYQSLHFCLQSKNMASPECILKSFSLPCSRFNGASTSLGASNGQYMGFRGHLRKGLLSSRGVMSSGSLNTVAQLVSEAETVKEKKDFEFDFKKYMYSKAISVNEALDKAVPTHYPEKIHESMRYSLLAGGKRVRPTLCIAACELVGGTEDLAMPAACAMEMIHTMTLIHDDLPCMDNDNLRRGKPTNHKAFGEDTAVLAGDALLSFAFEHIARSTSKTVESERVLRVICELGKSMGSEGLVAGQIVDIASEGDTSVDLKTLEYIHLHKTAVLLECSVVSGAIIGGASEEEIERTRRYARCVGLLFQVVDDILDVTKTSEELGKTAGKDLISDKATYPKLMGLEKAKEFAVELVNKAKEELSYFDPVKAAPLLGLADYIAFRQN

SEQ ID NO: 57545 - DNA, 1286 bp, Antirrhinum majus
  CDS (10)..(1128)
tcaacaacaatgagcctggtaaatcccattacaacctggtcaacaacaacaacctcaaaatccccaaaaaatgtccaaaccaccaccagatccagatccatcattctccctcacaaaatctcccttttcccatcaaaccccaaatcaaaatcaaaaacccacctcagattctcaatatcatcaatcctgacgaagaacccacaagaatcaagccaaaaaacctccaaagatccaacctttaccctcgatttcaaaacctacatgctagaaaaagccagctctgttaacaaagccttagaacaagctgttttactcaaagagcccttaaaaatccacgaatcgatgaggtactcgcttctagccgggggcaaaagggtcagaccaatgctctgcatcgccgcttgtgagctagttggtgggctggaatccactgcgatgccctcagcttgtgctgttgaaatgatccataccatgtctttgatccacgatgatttgccctgtatggataacgacgatttacgacgtggaaagcccacaaaccacaagatttatggcgaagacgtggcggttttagccggggatgccctgttagcgttctcgttcgagcacgtggcaaaatcgacgaaaggggtgtcgtcggataggattgttagggtgattggtgaattggctaagtgtattggctctgagggtttagttgcaggccaagtggttgatataagttctgaaggaatgactgaagttggattggagcatttggagtttatccacgtgcacaagaccgcggcgttgttggaggcttcggtggttttgggcgcgattgtgggtggtgcggatgatgaggatgttgagaagttgaggaaattcgcgaggtgtatcgggcttttgtttcaagtggttgatgatattttggatgttactaagtcttcgcaagaattggggaagacggcgggtaaagacttggttgcggataagactacgtatccgaagctgcttgggattgagaagtcgagggagtttgcggagaagttgaatagggaggcgcaggagcagctcgaggggttcgattcggttaaggctgcgccgttgatcgcgttggctaactacatcgcttatagagataattgatctgttataaaagaaaggaatgatatgatatactcatagaacctgtgttggttcttacttctcataataatagtgctattgtgaaaatgttgaagatgttgaaaagtgatattgttgtaagttgttgaatgtcatgtataacacaacttcatttgtga

SEQ ID NO: 57546 - protein, 372 aa, Antirrhinum majus
MSLVNPITTWSTTTTSKSPKNVQTTTRSRSIILPHKISLFPSNPKSKSKTHLRFSISSILTKNPQESSQKTSKDPTFTLDFKTYMLEKASSVNKALEQAVLLKEPLKIHESMRYSLLAGGKRVRPMLCIAACELVGGLESTAMPSACAVEMIHTMSLIHDDLPCMDNDDLRRGKPTNHKIYGEDVAVLAGDALLAFSFEHVAKSTKGVSSDRIVRVIGELAKCIGSEGLVAGQVVDISSEGMTEVGLEHLEFIHVHKTAALLEASVVLGAIVGGADDEDVEKLRKFARCIGLLFQVVDDILDVTKSSQELGKTAGKDLVADKTTYPKLLGIEKSREFAEKLNREAQEQLEGFDSVKAAPLIALANYIAYRDN

SEQ ID NO: 57547 - DNA, 1041 bp, Streptomyces argenteolus
  CDS (1)..(1041): transl_table=11
atgacggcgatcgaggtcacggccgaggggcgctcggcgcgcgaggtgctgctctggagccgtgacacggtcgagtcggcactgcgcccggcgatcgacaggctgcccccggcgatgcggcgcatcgccggctaccacttcggctggtcggacgagcgaggcgagcccgcccgggcgggtggcggcaaggcgatccgtcccgcgctggtcctgctggccgccgaggccgtggggggcgccgccgatgcggcgctgcccgcggcggtcgcggtcgagctggcgcacaatttctccctcctgcacgacgacgtgatggacggtgaccggactcgccgccaccgtcccacggcctggacggtcttcggtgtcagcccggcgatcctggcgggggacgccctgctggcgctggccttcgacgtgctcgccacggctgggcacccggccgctccggaggcgacgcggatcttcggtgccgccatccaggaactgctggaggggcagaacgcggacatggccttcgagaggcgtcaggatgtcgagctcgccgagtgcctggtcatggcggcgggcaaaaccggtgccctgctggggtgtgcctgcgcgctcggcgccctgctcggcggcggcgctccggagcaggtcgagcacctgcgcgccttcggcagggacctgggactggcgttccagctcgtcgacgatctcctgggcatctggggagatccgcaggtgaccggtaagccggtctattcggacctgcgcagccgtaagaagtctctgccgatcgtggccgcgctcacctcctcctcccctgcgggacgggagctggccggactgtaccagcgggaacgtcccctgtccgacgccgatctggttcacgccgccgaactcgtcgacgccgtgggcgggcgtgcctggagccagacgcaggccgatgagctactggcgcgcgcactgcaccacctgcggtcggccggttcggtgtctcgccccatcgccgagctgggcacgctcgcccgcctcgtcacccaccgagaccactga

SEQ ID NO: 57548 - protein, 346 aa, Streptomyces argenteolus
MTAIEVTAEGRSAREVLLWSRDTVESALRPAIDRLPPAMRRIAGYHFGWSDERGEPARAGGGKAIRPALVLLAAEAVGGAADAALPAAVAVELAHNFSLLHDDVMDGDRTRRHRPTAWTVFGVSPAILAGDALLALAFDVLATAGHPAAPEATRIFGAAIQELLEGQNADMAFERRQDVELAECLVMAAGKTGALLGCACALGALLGGGAPEQVEHLRAFGRDLGLAFQLVDDLLGIWGDPQVTGKPVYSDLRSRKKSLPIVAALTSSSPAGRELAGLYQRERPLSDADLVHAAELVDAVGGRAWSQTQADELLARALHHLRSAGSVSRPIAELGTLARLVTHRDH

SEQ ID NO: 57549 - DNA, 1612 bp, Paracoccus zeaxanthinifaciens
  CDS (295)..(1158): transl_table=11
ccatggcatccgggtcggatgccgtctatgttggcccgaacaggcagcaggaggccccatgagcgatatccagaccctctcgttcgaggaagccatgcgcgagctggaggcgaccgtcggcaagctggaaaccggcgaggcgacgctcgaggactccatcgcgctctatgaacgcggggcggcgctgcgcgcccattgcgaaacccgcctgcgcgaggccgaggagcgggtcgagaagatcaccctggccgcgaacgggcagccgtccggaaccgagcccgccgagggcctgtgatgcaggcccgcctggccgagatccggcccctggtcgaggccgagctgaacgccgccatcgacgcgctgcccgcgggcgatctgtcggatgcgatgcgctatgccgtgcagggcggcaagcggctgcgcgcgttcctggtgatggagtcggcgcgcctgcacgggctggacgacgacgcatcgctgcccgtcgccgccgcggtcgaggcgctgcacgcctacagcttggtccatgacgacctgcccgcgatggatgacgacgacctgcggcgcggtcagcccaccgtccacgtcaaatggaccgaggcgaccgcgatccttgcgggcgatgcgctgcagacgctggccttccagctgctggccgatccgcgcgtgggcgacgatgcggcgcggatgcggctggtcggttcgctggcgcaggcatcgggggctgcgggcatggtctggggccaggcgctggacatcgcggccgagacctcgggcgtgccgctggatctggacgcgatcatccgcctgcagggtggcaagaccggcgcgctgatccgctttgccgcgaccgccgggccgctgatggcgggggcggaccctgccgcgctggacgattatgcgcaggccgtcgggctggccttccagatcgcggacgacatcctggacgtcgagggctgcgaggccgcgaccggcaagcgcgtcggcaaggatgcggatgccaacaaggcgaccttcgtctcgctgctgggcctcgagggggcgcggtccgaggcgcgtcgcctggccgatgcggggcaggacgcgctggcgggttacggcgatgctgcggggaaccttcgggacctggcgcgcttcgtgatcgaacgcgacagctgatcgccgccttcccgccaaggggcaagatgatgaccgacggacccgcaaccccgatcctggaccgcgtccagcagccatccgacctggcatcgctggacgatgcgcagctgcgcctgctggcggacgagctgcgggccgagaccatcgacatcgtcagccgcacgggcggtcacctgggcgcggggctgggcgtggtcgaactgacggtcgccctgcacgccgtctttcgggcgccgcgcgacaagatcgtctgggacgtggggcatcaatgctatccccacaagatcctgacgggcaggcgggaccggatgcgcacgctgcgcatgggcggcgggctgtcggggttcaccaagcggcaggaaagcgcgttcgatccgttcggtgcggggcacagctcgacctcgatctcggcggcgctgggcttcgcgatggcgcgtgaacttggcggggatcc

SEQ ID NO: 57550 - protein, 287 aa, Paracoccus zeaxanthinifaciens
MQARLAEIRPLVEAELNAAIDALPAGDLSDAMRYAVQGGKRLRAFLVMESARLHGLDDDASLPVAAAVEALHAYSLVHDDLPAMDDDDLRRGQPTVHVKWTEATAILAGDALQTLAFQLLADPRVGDDAARMRLVGSLAQASGAAGMVWGQALDIAAETSGVPLDLDAIIRLQGGKTGALIRFAATAGPLMAGADPAALDDYAQAVGLAFQIADDILDVEGCEAATGKRVGKDADANKATFVSLLGLEGARSEARRLADAGQDALAGYGDAAGNLRDLARFVIERDS

SEQ ID NO: 57551 - DNA, 1116 bp, Arabidopsis thaliana
  CDS (1)..(1116)
atggcttcagtgactctaggttcatggattgttgttcaccaccacaatcatcatcatccatcttcaatccttaccaaatccagatccagatcttgtcctataactcttactaaacccatctcctttcgatcaaaacgcaccgtttcatcatcttcttcaatcgtttcttcttccgttgttacaaaagaagacaatctacgccaatctgaaccatcctctttcgatttcatgtcgtacatcatcaccaaagccgaattagtcaacaaagctttagattcagctgttcctctccgtgagccactcaagatccacgaagcgatgcgttactctcttctcgccggtggcaaaagagttagaccagttctctgcatcgctgcttgtgaactcgtcggaggtgaagaatcaaccgctatgccagcagcttgcgccgtcgagatgattcacaccatgtcgttgatccacgacgatctcccttgtatggataacgacgatctccgccgtggaaaaccgaccaaccacaaagtgtttggtgaagacgtcgctgttttagccggagacgcgcttctctctttcgctttcgagcatttagcttcggcgacgagttctgatgttgtttctccggtgagagtggttcgagccgttggagaattggctaaagcgataggaacagaagggttagtggcgggtcaagtcgtggatattagtagtgaagggttagatttaaacgacgtcggtttagagcatttggagtttatccatttgcataaaacggcggcgttgcttgaagcttctgctgttttgagagctattgttggtggaggaagtgatgatgagattgagaggttaagaaagtttgcgagatgtattggtttgttgtttcaggtggttgatgatatcttgtatgtgacgaaatcgtcgaaagagttagggaaaactgctgggaaagatttgattgctgataagttgacgtatcctaagattatgggtttggagaaatcgagagagtttgctgagaaattgaatagagaggctcgtgatcagcttttagggtttgattctgataaggttgctcctttgttggctttggctaattacattgcctatagacagaactga

SEQ ID NO: 57552 - protein, 371 aa, Arabidopsis thaliana
MASVTLGSWIVVHHHNHHHPSSILTKSRSRSCPITLTKPISFRSKRTVSSSSSIVSSSVVTKEDNLRQSEPSSFDFMSYIITKAELVNKALDSAVPLREPLKIHEAMRYSLLAGGKRVRPVLCIAACELVGGEESTAMPAACAVEMIHTMSLIHDDLPCMDNDDLRRGKPTNHKVFGEDVAVLAGDALLSFAFEHLASATSSDVVSPVRVVRAVGELAKAIGTEGLVAGQVVDISSEGLDLNDVGLEHLEFIHLHKTAALLEASAVLRAIVGGGSDDEIERLRKFARCIGLLFQVVDDILYVTKSSKELGKTAGKDLIADKLTYPKIMGLEKSREFAEKLNREARDQLLGFDSDKVAPLLALANYIAYRQN

SEQ ID NO: 57553 - DNA, 1289 bp, Abies grandis
  CDS (83)..(1234)
gtgcgctgttcaatgcaacgatcaatattagaatcaccagagttgatagcaggaaccattaaaacagaaatagaacaaagatatggcttacagttgtatggcagctagctgccatggcctgcattttatgaatattgcttctcaggaatgtaatttgaaaagaggtattatcccatcaaaacgtctgcatggaatttcatcctcattgtgggcttctaatggcttccaaggccatttggaaagggacttatcggcatatagacatctggtatcatcatccagatgcttaaacacaatcgccatgttgagtaatctgtctgaacaagcaaaggaaaaggccactgaatttgatttcaaggagtacttgcattccaaagcaatatcagtgaatgaggcactggagagggctgtcccacttcgctatcctgaaaaaatacatgaagctatgaggtattctcttctagcaggagggaagcggattcgtcctattctgactattgcagcatgtgagcttgtgggagggagtgaggagctcgccatgccaactgcctgtgcaatggagatgatccacacaatgtctttgattcatgatgatttgccttccatggacaatgatgatttacgccgaggtaagcttacaaaccacaaggtctttggcgaaggcactgctgttcttgcaggggatgcacttctttcatttgcatttgagcacattgcagtgtccacaaggaaaactgtggcgagtcatagggttttgagggtggtatctgaattgggtaaggcaataggctctcaaggggttgctggtgggcaggttgctgatattaccagtgaaggggatccatctgttgggcttgagactctcgaatggattcacattcacaagactgcagtgctcttggagtgcgccgttgtgagtggggcgatcatcggtggcgcttcagagaatgaaattgagagaactggaaggtatgcccgttgcgttgggcttctgtttcaggttgtggatgacatactcgatgtcaccagatcatcagaagaattgggaaagactgcaggaaaggatttggttagtgataaggccacttatcccaagctgatgggtttggagaaagcgaaggaatttgctgatgaattgttggacagagctaaggaggagttatcttgcttcaacccagctaaggctgcacctctgttgggtcttgcagattacattgcattaagacagaactgaaaagcctgcgaaatgtgttcttatgtatgccgtttgtgcttttgcttttgcatct

SEQ ID NO: 57554 - protein, 383 aa, Abies grandis
MAYSCMAASCHGLHFMNIASQECNLKRGIIPSKRLHGISSSLWASNGFQGHLERDLSAYRHLVSSSRCLNTIAMLSNLSEQAKEKATEFDFKEYLHSKAISVNEALERAVPLRYPEKIHEAMRYSLLAGGKRIRPILTIAACELVGGSEELAMPTACAMEMIHTMSLIHDDLPSMDNDDLRRGKLTNHKVFGEGTAVLAGDALLSFAFEHIAVSTRKTVASHRVLRVVSELGKAIGSQGVAGGQVADITSEGDPSVGLETLEWIHIHKTAVLLECAVVSGAIIGGASENEIERTGRYARCVGLLFQVVDDILDVTRSSEELGKTAGKDLVSDKATYPKLMGLEKAKEFADELLDRAKEELSCFNPAKAAPLLGLADYIALRQN

SEQ ID NO: 57555 - DNA, 1311 bp, Cistus creticus
  CDS (116)..(1225)
acctcccctatcggagattttcaatatattttccatttctaaacaatattatcctcttaagaaacattagcatttcagtcacttaccatagtggattctccggtgaccgggaaaaatgagtactgtgaatgtgaatctgggttcatggagtcagcctacctgctttgtatttaaccagaaaactagatccagaatccctaattttagttccttcaagggattcatggcttcttcgtcgaatttccgttctgtttcttcttcttcttcttcctcctcctcctttattgcctcagttctttctgggaaagatactatgaagggagaagaagaaaattccggttttgatttccagtcttatatggatcagatggcggattccgttaatcaagcgctggaatcagcggtttcgctccgggaaccgttgaagatccatgaagcaatgcggtactcgcttttggccggagggaaaagggtgaggccgcttttgtgtattgccgcgtgtgagctcgtcggcggggatgtttccgtggcgatgcccgcggcttgcgccgtggaaatgattcacaccatgtcgttaatccacgatgacctcccatgtatggataacgacgatctccgccgcggaaaaccgacgaatcacaaggcattcggcgaggatatcgccgtattagccggggacgcgctgctgtccttcgcattcgaacacgtggcggtgtccacggtgggggcctcgccggataaaattgtccgggcggtgggggaattagcaaaagcagttgggaaagaagggttagtagccggacaagtagtggatataaccagtgagggactaaacgacgtcggattggatcatttggagtacatccatgtccacaagaccgccgtattactcgaggccgcggtggtgctcggggcgattttgggcggaggaacggatgaggaagtggagaggttgaggaaatttgcgatatgcattggtctattgtttcaagtggtggatgatatcttggatgtgacgaaatcttccgtggaattggggaaaaccgccggaaaagatttagtcgcggataaggtgacgtatccgaagctaatggggctggagaagtcgagggagttcgccgagaagctgagggatgatgcggtggagcagttgcgggtgtttgatcaggtgaaggcggcgccgttgattgctttagcacattacattgcttataggcaaaactagtttcatttgttgttaagaaaactatgaatgaaagaagcataaaagattatagttcaaaaaaaaaaaaaaaaaaaaaaaaaaaaaaa

SEQ ID NO: 57556 - protein, 369 aa, Cistus creticus
MSTVNVNLGSWSQPTCFVFNQKTRSRIPNFSSFKGFMASSSNFRSVSSSSSSSSSFIASVLSGKDTMKGEEENSGFDFQSYMDQMADSVNQALESAVSLREPLKIHEAMRYSLLAGGKRVRPLLCIAACELVGGDVSVAMPAACAVEMIHTMSLIHDDLPCMDNDDLRRGKPTNHKAFGEDIAVLAGDALLSFAFEHVAVSTVGASPDKIVRAVGELAKAVGKEGLVAGQVVDITSEGLNDVGLDHLEYIHVHKTAVLLEAAVVLGAILGGGTDEEVERLRKFAICIGLLFQVVDDILDVTKSSVELGKTAGKDLVADKVTYPKLMGLEKSREFAEKLRDDAVEQLRVFDQVKAAPLIALAHYIAYRQN

SEQ ID NO: 57557 - DNA, 1456 bp, Cistus creticus
  CDS (168)..(1262)
gatacaaatccatttcacctgattaataaaacctaaaatctagattatcttccttaatcccctccattctatcccctcactccgacataagaaaacctcagcaattatcacaactatctttccgccgcccacgattctctaaatccaaacctccggcaagtccgaaaatgactactgttagcatcagttcgtgggttcaaacctactgtgtctttaaccaggcaaccagatccagatccagatccagatccccttctttcaatagattcaatctcccgataattccggtctcaaaaccgttccgcttcttccgcccctctaatcgcctcggtactcaccagagaaggcgaatcgaacaagatcccccaaaatgggccttcgatttaaagtcctacatgattcagaaggcgaattccgtgaatcaagccctagaaaccgccgtttcgctccgggagccgctgaagatccacgaggcgatgaggtactcggttttggccggcgggaagcgagttcggccggtgctgtgcatcgccgcatgcgagctcgtcggcggtgaggaatccatggcgatgcccgcggcttgcgccgtggaaatgattcacaccatgtcgctcatccacgacgaccctccctgtatggataacgacgatctccgccgcggaaaaccaacaaaccacaaggtattcggcgaggatatcgcggtgttagccggggacgcgcttctcgctttctcattcgagcacatgacggggtccacagttggcgtatcccccgcccgaattgtgcgggcggttggggaattagcgaaatcgattggttcggaaggattggtagctggccaagttgtggatatctgcagtgagggccttacagatgtaggcttggaacatttagagttcatccatgtgcataaaacggcggccttactcgaaggctcggtggttctgggagcaattcttgggggcggatcggatgaggaagtggagaaattgaggaaatttgcgaggtgcattggattattgtttcaggtagtggatgatattctggatgtgacgaaatcttcaacagaattggggaaaacggctgggaaagatctggtggcggataaggtgacatatccgaagctaatggggatcgagaaatcgagggagtttgcggaggagctgaagaatgatgcggtggagcagttgagagggtttgatcaggagaaggcggcgcctttgattgctttggctaattacattgcttataggcagaattagttgtacaacttggtggattggatcattgaaagtggaatttaatttagcggattcgtgttgtagtagatgattattaagttctatagcgactgcaatgagacagatgtattgctttcttgattgaaagcaatgaatattaatgtgggaatgataagaaattccctttttgatgaaaaaaaaaaaaaaaaaaaaaa

SEQ ID NO: 57558 - protein, 364 aa, Cistus creticus
MTTVSISSWVQTYCVFNQATRSRSRSRSPSFNRFNLPIIPVSKPFRFFRPSNRLGTHQRRRIEQDPPKWAFDLKSYMIQKANSVNQALETAVSLREPLKIHEAMRYSVLAGGKRVRPVLCIAACELVGGEESMAMPAACAVEMIHTMSLIHDDPPCMDNDDLRRGKPTNHKVFGEDIAVLAGDALLAFSFEHMTGSTVGVSPARIVRAVGELAKSIGSEGLVAGQVVDICSEGLTDVGLEHLEFIHVHKTAALLEGSVVLGAILGGGSDEEVEKLRKFARCIGLLFQVVDDILDVTKSSTELGKTAGKDLVADKVTYPKLMGIEKSREFAEELKNDAVEQLRGFDQEKAAPLIALANYIAYRQN

SEQ ID NO: 57559 - DNA, 1548 bp, Abies grandis
  CDS (58)..(1209)
tctgcttctgttggagttgatagcaggaaaaaatcaaagtagaaatagaacaaagatatggcttatagcggtatggcgactagctaccatggcctgcattttatgaatattgctactcaagaatgtaatttgaagagactttctatcccatcgagacgttttcatggagtttcaccatcattgtgggcttctaatggcttccaaggccatttaaagagggagttatccgcaaattcatttctggtatcatcatctagatactcaaacacaattgctaagtttactaatctgcctgaaaaagtaaaggagaaggtcattgaatttgacttcaaggagtatctacgttccaaggcaatggcagtgaatgaggcactggatagggctgtaccacttcgttatcctgaaagaatacatgaagctatgaggtattctcttctagcaggagggaagagggttcgtcctgttctgtgcatttcagcatgtgagcttgtgggagggaccgaggaagtcgccatgccaactgcctgtgcaatggagatgatccacacaatgtctttaattcatgatgacttgccttgcatggacaatgatgattttcgcagaggtaagcctacaaaccacaaggtcttcggggaaggcactgctattcttgcaggggatgcactgctttcatttgcatttgaacacattgcagtatccacaagcaaatctgtggggactgataggattttgagggtggtatctgaattgggtagaacaataggctcccaagggcttgtgggtgggcaggttgctgatattacgagtgagggcgatgcttctgttgaccttgacactctggaatggattcacattcataagactgcagtgctattggagtgctcagttatgtgtggggcgatcattagtggtgcttcagacaatgagattgagagaattcaaagatatgcccgtagcgtggggcttctgtttcaggttgttgacgacatactcgacgtcacgaaatcatcaaaagagttgggcaaaactgcaggaaaggatttgatcagtgataaggccacttatccgaagctgatgggtttagagaaagcaaaacaatttgcttcggatttgttgatcagagctaaggaggatttatcttgcttcgacccaatgaaggctgcaccattgttgggtcttgcagattacattgcattcagacaaaactgaagagcctctaaaagtgttcttatgtatgcgttctgtgctttgtttttacatctactacaacctagaaaataacatatgtaacatcatgtctctttgagttgtgatgatggataatagaatggttccaataggaagtaatgcctggatctaggtccaaggaaccagtcccatgttcttatgtaggagttcctttaacctttagaccaatttatctttgatgttattcttgttgccagagaaaagagttctcacagctaagcttagcctggagaatatcggctggttgcttgattcaagtaaatatagtttaacctatgttaaatgaaaaaaaaaaaaaaa

SEQ ID NO: 57560 - protein, 383 aa, Abies grandis
MAYSGMATSYHGLHFMNIATQECNLKRLSIPSRRFHGVSPSLWASNGFQGHLKRELSANSFLVSSSRYSNTIAKFTNLPEKVKEKVIEFDFKEYLRSKAMAVNEALDRAVPLRYPERIHEAMRYSLLAGGKRVRPVLCISACELVGGTEEVAMPTACAMEMIHTMSLIHDDLPCMDNDDFRRGKPTNHKVFGEGTAILAGDALLSFAFEHIAVSTSKSVGTDRILRVVSELGRTIGSQGLVGGQVADITSEGDASVDLDTLEWIHIHKTAVLLECSVMCGAIISGASDNEIERIQRYARSVGLLFQVVDDILDVTKSSKELGKTAGKDLISDKATYPKLMGLEKAKQFASDLLIRAKEDLSCFDPMKAAPLLGLADYIAFRQN

SEQ ID NO: 57561 - DNA, 1482 bp, Gentiana lutea
  CDS (88)..(1191)
ttcacctttctttcctcctcgtaatcaaacaaatcttcctttcttgcttcacgaaattcgtattcttgaaaacatcagatctatgacatggtggattcatgggtggttcaaagccactctgtatttcatacccctatatccctttttagatcttttcttggatttctgtgcaaacccatgaattacaacaaaattggatcgaatttgatagagaaaaagaagctcatttcatcgttttcagtagcatctttgattactaaagaagaagaagccatgggaggtccaaaagcttccaattatttcgattttaaggcctatttgattgaaaaagctaataaagtaaatgaagctttggatcaagcggtttctgtgaagaacccaccgatgattcatgaagcaatgcgctattccttgttagccggcggcaaaagagttcgtccaatactttgtatcgcagcgtgtgagctcgtcggaggtgaagaatcaaattctgttccggcagcttgtgcggtggagatgatacacaccatgtcgttaattcacgacgatttgccgtgttatggacaacgagatctccgacgaggaaaagcccacgaaaccacaaagtcttcgtgcgaggacgtagcggtcctcgccggcgattcccttctagcattctcattcgaatacatcgccaccgccactaaaaacgtctctccggcgaagaattttagccgcagtaggcgaattagcaaatcaattgggacagaaggcttagtagctggccaagtagctgattttgtcattaatggggaaaaccagatgtttggattagaccaattggagttcatccacatccacaaaacggcagctttactggaagcagcggtggtgctcggcgcaatcctgggcggcggaaacccagaagaggttgagaaattgagacgttttgctaggtgtattgggctattgtttcaagtggttgatgacattcttgatgtaacgaaatcatctgaagaattggggaaaactgcagggaaaagatcttgtggcggaaaaactacttatccgaaattaatgggtttagatggagctagagagtttgctgataaattgaacaaagatgcgaaaaatcagttgtcggaatttgatcgtgaaaaggccgctcctttgcttgctttggcggattatattgcgtataggcagaattagggggattttgattgaagaacgacccggatttggaagtcgggttcgggtttttgttgtttgttgtaacctttggtggtgttgtattagatttattttagtattaaaaaagggttaacaacggtatggaatgtaaggaatctaccttcaaaaaaaaatgtactgaatcattgaaatgattcagtcattttcttgtgtttagattgatttcggtttggaatatgctactatcataaatcttgtgtcaaaataagtaatatatattgatgatttttgaaaaaaaaaaaaaaaaaa

SEQ ID NO: 57562 - protein, 367 aa, Gentiana lutea
MVDSWVVQSHSVFHTPISLFRSFLGFLCKPMNYNKIGSNLIEKKKLISSFSVASLITKEEEAMGGPKASNYFDFKAYLIEKANKVNEALDQAVSVKNPPMIHEAMRYSLLAGGKRVRPILCIAACELVGGEESNSVPAACAVEMIHTMSLIHDDLPCYGQRDLRRGKAHETTKSSCEDVAVLAGDSLLAFSFEYIATATKNVSPAKNFSRSRRISKSIGTEGLVAGQVADFVINGENQMFGLDQLEFIHIHKTAALLEAAVVLGAILGGGNPEEVEKLRRFARCIGLLFQVVDDILDVTKSSEELGKTAGKRSCGGKTTYPKLMGLDGAREFADKLNKDAKNQLSEFDREKAAPLLALADYIAYRQN

SEQ ID NO: 57563 - DNA, 1140 bp, Streptomyces avermitilis
  CDS (1)..(1140): transl_table=11
gtgggccgacttctcgaccgcttcctggcggagcgcgtggcgcgggcggcggccctcgacccggtgttcgcccacgacatcgccgagcgcgtggcgcggttcaccctggacggcggcaagcgcacccggtcccagttcgtgtggtgggcgcaccgggcgtgcggcggaccggccgccggggcggaggcggccctgcgggtcggtgccgccctcgaactcatccagacgtgcgcgctggtgcacgacgacgtgatggacggctcccggctgcgccgcggccggcccgcgctgcacacggacgtgagtgcccagtacgccgacgccgtcctgcccgccccgggcacacgcttcggtgaggcggccgcgatcctcgccggagacctggctctcgcctgggcggacgacgtggtggcggacaccgacctggcaccggacccggggcgcagggtgcgcgaggtgtggagctgcctgcggatggaaatggtggccgggcagtacctggacatccagggccaggcgacctcgtcgcattccgaggcccgcgcgatgcgcgccgcctgcctcaagagcgcgctgtactccgtgcagcggccgctcgaactcggtgccgccctcgccggggcggacaccgccacgactcaggcgttgtgctcggcgggccggtgcgtcggcttggccttccagctccgcgacgacctccacgacgtcttcgaggaaccccggcgcaccggcaagccgtcgggcggtgacatccgggcgggcaaacccacctacctcgtcgccgtggcgcgggcccgggccgaagcggccggcgaccgcggcgccctcgccgtactgcggcgctcgctcggttgcgccgatctgtccgacgcggacctcgcccgggtgcgggacgtcctggtcaccaccggcgcgcgtgacacggtcgaggccgagatcgaccggctggtggcccagggcctgcgccacatgggcgccgcctcactcgcccccgagggacgacgccatctggacgcactgctccgttcagcggccggtgcgccctcggtccgccggcaggcccctgacgcgtcccgctccgagaacgggatgcccgtatcgctgctgctcaccgccacggccgagggggcctcccgatga

SEQ ID NO: 57564 - protein, 379 aa, Streptomyces avermitilis
MGRLLDRFLAERVARAAALDPVFAHDIAERVARFTLDGGKRTRSQFVWWAHRACGGPAAGAEAALRVGAALELIQTCALVHDDVMDGSRLRRGRPALHTDVSAQYADAVLPAPGTRFGEAAAILAGDLALAWADDVVADTDLAPDPGRRVREVWSCLRMEMVAGQYLDIQGQATSSHSEARAMRAACLKSALYSVQRPLELGAALAGADTATTQALCSAGRCVGLAFQLRDDLHDVFEEPRRTGKPSGGDIRAGKPTYLVAVARARAEAAGDRGALAVLRRSLGCADLSDADLARVRDVLVTTGARDTVEAEIDRLVAQGLRHMGAASLAPEGRRHLDALLRSAAGAPSVRRQAPDASRSENGMPVSLLLTATAEGASR

SEQ ID NO: 57565 - DNA, 1128 bp, Eucommia ulmoides
  CDS (125)..(991)
tcttcttcttcttcttcttcttcttcttctttctcaatctctgcaattcttacccagaaacaaacgggttgctccccatgaagaaaccccatttcgttcgccggcgttcgatttcaaggcctacatgctcggaaaagccgattccgtcaacaaggcgttggaggctaccgttttgctccggtatccaattaagatccacgagtctatgcggtactccatacttgccggcggaaagcgcgtccgtccactcctatgcatcgctgcctgtgagctcgtcggtggccaagagtccaccgccatgcctgcggcctgcgcagtggagatgatccacaccatgtccctaatgcacgacgacctcccctgtatggacaacgacgaccttcgccgcggcaaacccacgaaccacatggtatttggcgaggacgtcgccgtcttggccggcgactcgctcctcgccttcgcgttcgagctcatcgccacttccaccacgggcgttccggccgacagaatagtccgcgtcatcggcgaactggcgaaatcaatcggttccgaaggcttagttgccggccaggtgatcgacatatgctccgaaggaatgaccgacgtgggtctcgagcaccttgagttcatacacgtccacaagacggcggcgctgcttgaaggctcggtggttctcggggcaattctgggcggcgccaccgacccagaagtcgaaaagctccgaaaattcgcgaggtgtatcggtttcttgtttcaggttgtggacgacattctcgacgtgacgaaatcttcccaagaactggggaagacggccggaaaggatcttgtcgccgacaagaccacttatccgaagctgattgggcttgagaaatcaagggaatttgcagagaaattgaacagggaggctcaagatcagcttgccgcatttgacatagaaaaggccgctcctttgattgctttagcaaattacattgcttacaggaacaattgacgattgataattgatatgtttgcatgtctggttttcgggatctttgatagttacacataaatcacaattgatgattaattgttgggtccaataaataagggattcaagaaagacttgcaattgctgcaattttcatc

SEQ ID NO: 57566 - protein, 288 aa, Eucommia ulmoides
MLGKADSVNKALEATVLLRYPIKIHESMRYSILAGGKRVRPLLCIAACELVGGQESTAMPAACAVEMIHTMSLMHDDLPCMDNDDLRRGKPTNHMVFGEDVAVLAGDSLLAFAFELIATSTTGVPADRIVRVIGELAKSIGSEGLVAGQVIDICSEGMTDVGLEHLEFIHVHKTAALLEGSVVLGAILGGATDPEVEKLRKFARCIGFLFQVVDDILDVTKSSQELGKTAGKDLVADKTTYPKLIGLEKSREFAEKLNREAQDQLAAFDIEKAAPLIALANYIAYRNN

SEQ ID NO: 57567 - DNA, 1278 bp, Streptomyces griseus
  CDS (1)..(1278): transl_table=11
atgggccgtcgccagcctgaggaaccctcgttcggcgagtccgcgcggccggctcccgggacgggcgggcaccgccaccacgccgccccctcgtccgaggacgcccgggtcgtggacgcggacgtggtcgacgccgtcctgcgcaccgcgcgggcggtgctggcggagcgggtggacgaggcgatggcgagcgacgctctgttctgcgacgagctggcacggcgggtcgccgatttcacgctcgacggcggcaagcgggtacggccgcgcctgctgtggtgggggatgcgctcctgcggtgcggcggataccacggcggcgctgcggctcggggtggcgctggagctgatccagagctgtgcgctgatccatgacgatgtgatggaccgctcgcggctccgccgggggaagcccgccgtgcacatcggtctggcggaacgtgcgggttactcgccggattccgggcggggttccgccttcggcgcctcggccgccgtgctggcgggtgacctcgcgctggcctgggccgacgacacggtggcggagaccgcgctgtccgccgtccagcgtcgtcggatcggccccctgtggcggaccatgcggaccgagatggtcgccggacagtacctggatctgcgcggccaggtccgtggcgggtcatccgtggagcaggccctgcggaccgcgtgcctcaagagcgcctcgtactccgtcgagcggcctctggcgctcggtgccgccctggcgggcgccgatgaagcgaccaccgacgccctgcgctccgccggccggtgcgccggcatcgcctttcagctgcgggacgacctgctcggggtcttcggcgacccggagctgaccgggaaaccgtccggcgacgacatccgcgagggcaagtcgacctacctgctccccgtcgcccggaggtgggcggaaccggcgggcaacaaacaatctctggcggtgctcggccgcttcccgggcggcggcaacctcgccaaggaggatctcccggaggtacgcggcgtgctcgaggagacgggggcacgcgcccacgtggagcgcaaggcggaccccctccgcgaccacgcgttgggccgtttggcacaggccgttgaagtggaagcgcacggcggccgccagttgctcggactgctccgcacggtttccggagagcggaccgggcaatcccccgcaaccggcgggacgcacggtcacggccccggggcggcagccgccgccccggccctgaccacggcggaaggaggtaccaccaggtga

SEQ ID NO: 57568 - protein, 425 aa, Streptomyces griseus
MGRRQPEEPSFGESARPAPGTGGHRHHAAPSSEDARVVDADVVDAVLRTARAVLAERVDEAMASDALFCDELARRVADFTLDGGKRVRPRLLWWGMRSCGAADTTAALRLGVALELIQSCALIHDDVMDRSRLRRGKPAVHIGLAERAGYSPDSGRGSAFGASAAVLAGDLALAWADDTVAETALSAVQRRRIGPLWRTMRTEMVAGQYLDLRGQVRGGSSVEQALRTACLKSASYSVERPLALGAALAGADEATTDALRSAGRCAGIAFQLRDDLLGVFGDPELTGKPSGDDIREGKSTYLLPVARRWAEPAGNKQSLAVLGRFPGGGNLAKEDLPEVRGVLEETGARAHVERKADPLRDHALGRLAQAVEVEAHGGRQLLGLLRTVSGERTGQSPATGGTHGHGPGAAAAAPALTTAEGGTTR

SEQ ID NO: 57569 - DNA, 966 bp, Citrus sinensis
  CDS (1)..(966)
atggttattgctgaggttcctaagcttgcctcagctgctgagtatttctttaaaatgggggtggaaggaaagaggttccgtcccacggttttattgctgatggcaacagctctgaatgtgcgagtacctgaacctctacatgatggagtagaagatgcttcggcgactgaactacgtacaaggcaacaatgtatagctgagattacggagatgatccatgtagcaagccttcttcatgatgatgtcttggatgatgcagataccaggcgtggtattggttcattgaattttgtaatgggcaataagttagctgtattagcgggtgattttcttctttcccgtgcttgtgttgcccttgcctctttgaaaaacacagaggttgtgacgttactggcaaccgttgtagagcatcttgttactggtgaaaccatgcaaatgacaacatcatctgaccaacgttgtagcatggattattatatgcaaaaaacatactacaagaccgcatcattaatctcaaacagctgcaaggcaattgcccttcttgctggacaaacagccgaagtggcaatattagcttttgattatggaaagaatctgggtctggcatatcaattaatcgacgatgttctcgatttcactggcacatcagcctctcttggaaagggttctttatctgacatccggcatggaatcataacagctccaatattgtttgccatggaagagttccctcagttacgcacagtagttgagcaaggcttcgaggattcctcaaatgttgatattgcccttgagtaccttgggaagagtcgagggatacaaaagacaagagaactggccgtgaagcatgctaatcttgctgcagctgcgattgattctctacctgaaaacaatgatgaggatgttacaaagtcaaggcgtgcacttttagatctcactcatagagtcatcacaagaaataaataa

SEQ ID NO: 57570 - protein, 321 aa, Citrus sinensis
MVIAEVPKLASAAEYFFKMGVEGKRFRPTVLLLMATALNVRVPEPLHDGVEDASATELRTRQQCIAEITEMIHVASLLHDDVLDDADTRRGIGSLNFVMGNKLAVLAGDFLLSRACVALASLKNTEVVTLLATVVEHLVTGETMQMTTSSDQRCSMDYYMQKTYYKTASLISNSCKAIALLAGQTAEVAILAFDYGKNLGLAYQLIDDVLDFTGTSASLGKGSLSDIRHGIITAPILFAMEEFPQLRTVVEQGFEDSSNVDIALEYLGKSRGIQKTRELAVKHANLAAAAIDSLPENNDEDVTKSRRALLDLTHRVITRNK

SEQ ID NO: 57571 - DNA, 1176 bp, Tagetes erecta
  CDS (50)..(1135)
ggcacgaggtttctctaaacctcaatttctgcaataaaattcatacaaaatgagtcttgtaaatcccacatctttgttctatggatcccccattatgaccagatccccaatcttcctcaacccgacccgaaaatcccaacccgtttcatctttctccgcatccaatttcccccaaatctctgcaattttgacaaaagaacatcaatcaaacgcaccagaagacaaaatcaaagaaacccaatccaaattcgagttcgatttcaaatcatacatgttggagaaagcgaatttggtgaatcaagcactagatttagcggttccgttgaaagacccgataaagatccatgaatcgatgcggtactcgcttctcgccggaggaaaacgagtccggccggtgttatgtatcgccgcttgtgaactcgtcggaggagacggtttaaccgccatgccggcggcctgtgcggtggagatgattcacaccatgtcgttaatgcacgacgatcttccatgcatggataacgacgactttcgccgtgggaaacccacaaaccatatggtgtacggcgaagaaatcgccgtacttggcggtgacgctatgctctcatttgcttttgagcatatggccaccgctacaaaaggagtatcctcggacaggatactccgtgcaattggcgaactcgctaaatgcatcggctccgaggggcttgtcgccggtcaggtggtggacatatgctccgaaggagccgatgtcggattagagcatttggaatttatacatttacacaaaaccgcggcgttgcttgagggttccgtggtgcttggtgccatcttgggcggtgggtcggacggagaaattgagaaactgcggaaatttgcgaggtcgatcggacttttatttcaggtggtggatgatattcttgatgtgacgaaatcgtctgaggaattggggaaaaccgctggaaaagatttggtgtcggataagacgacgtatccgaaactgttggggattgagaaatcgcgagaatttgcggaggaattgaacaaggatgcacaagaacagttatcggagtttgatccccggaaagccgcaccgttaattgcacttgctaattacattgcttataggcaaaattgatcatacaatgtatgttatgttatggtatcgatcttttatta

SEQ ID NO: 57572 - protein, 361 aa, Tagetes erecta
MSLVNPTSLFYGSPIMTRSPIFLNPTRKSQPVSSFSASNFPQISAILTKEHQSNAPEDKIKETQSKFEFDFKSYMLEKANLVNQALDLAVPLKDPIKIHESMRYSLLAGGKRVRPVLCIAACELVGGDGLTAMPAACAVEMIHTMSLMHDDLPCMDNDDFRRGKPTNHMVYGEEIAVLGGDAMLSFAFEHMATATKGVSSDRILRAIGELAKCIGSEGLVAGQVVDICSEGADVGLEHLEFIHLHKTAALLEGSVVLGAILGGGSDGEIEKLRKFARSIGLLFQVVDDILDVTKSSEELGKTAGKDLVSDKTTYPKLLGIEKSREFAEELNKDAQEQLSEFDPRKAAPLIALANYIAYRQN

SEQ ID NO: 57573 - DNA, 1441 bp, Rhodobacter capsulatus
  CDS (213)..(1079): transl_table=11
ttcggcatacgtcgagcagcgatgccgcgctgacagtgtcacgcagctgaacgcggcgagtgcgctgatcagtcggtccggctctccgaacgcggcgcgaagctgaaagagcgctgcgcgatgctgctcaaggaagccgaggaacgggtcgaaaagatcctgctgggcgaaggcggggtgcccgcgggcaccgttgcggtggaaggactctgatgttttccgaacgtttgaaagaagtgcaggacggcgtcgaagcggcgatggcggcggcgatcgggcgtctgcccgcgggtgatctgcgcgatgcgatggcctatgcggcacagggcggcaagcggctgcgggccttccttgccatcgaatccgccgcgatccacgggatttcgatggaacaggcgatgcccgcggcgctggcggtcgaggcgctgcatgcctacagcctcgtccatgacgacatgccctgcatggacaatgacgatctgcgccgcggcctgccgaccgtgcaccgcaaatgggacgaggccaccgccgttctggcgggcgacgcgctgcagaccctcgcctttgagctttgcaccgatccggtgctgggatcggccgaaaaccgggtcgcgctggtcgccgctctggcgcaggcctcgggggccgaggggatggtctacggtcaggcccttgatattgctgccgaaaccgccgcggtgccgctgacgcttgacgaaatcatccggctgcaggcgggcaagaccggcgcgctgatttcctttgccgcgcaggccggcgcgatcatcgcgggcgccgaccgcgcactgctggccgcctatgccacggcgcttggcctggccttccagatcgccgacgacattctggatgtcgaaggcgacgaggaagcggcgggcaagcgtctgggcaaggatgccgaggcgcacaaggccactttcgtctcgctgctgggtctgccgggggcaaaagcccgcgccgccgatctggtcgccgaggccgaagccgcccttgcgccctatggcgaggccgccgctacccttcgcgcctgcgcgcgctatgtgatcgaacgcgacaagtgaagcgagccccatgagccagcccccagtgaccccgatcctcgaccgcgtgcgtctgccctccgacatgaaagggctgagcgaccgcgacctgcaccgactggccgatgaactgcgcgccgagacgatctcggccgtgtcggtgacgggcggccatctgggcgcggggctgggcgtggtcgaactcaccgtggcgctgcatgcggtcttcgactgcccgcgcgacaagatcgtctgggacgtggggcaccaatgctacccgacaagatcctgaccggtcggcgcgaccgcatccgacgctgcgcataggggcggctctcggcttaccaacgctccaaagccctatgacgccttcggggccggca

SEQ ID NO: 57574 - protein, 288 aa, Rhodobacter capsulatus
MFSERLKEVQDGVEAAMAAAIGRLPAGDLRDAMAYAAQGGKRLRAFLAIESAAIHGISMEQAMPAALAVEALHAYSLVHDDMPCMDNDDLRRGLPTVHRKWDEATAVLAGDALQTLAFELCTDPVLGSAENRVALVAALAQASGAEGMVYGQALDIAAETAAVPLTLDEIIRLQAGKTGALISFAAQAGAIIAGADRALLAAYATALGLAFQIADDILDVEGDEEAAGKRLGKDAEAHKATFVSLLGLPGAKARAADLVAEAEAALAPYGEAAATLRACARYVIERDK

SEQ ID NO: 57575 - DNA, 921 bp, Arabidopsis thaliana
  CDS (1)..(921)
atggctactactgttcatctcagctcattctccctcttcatccaatccagaggaagaagagacaactccatatcttccgtcaagagtctcaaaaaacgcacagaacccctcacggtccaggaagccgtgcggtactcattgctagcgggcggaaaacgtgtgaggcctctgctctgcattgctgtctgcgagcttgtgggaggcgacgaggctactgccatgtcagctgcttgcgcggtcgagatgatccacacaagctctctcattcatgacgatcttccgtgcatggacaatgccgacctccgtagaggcaagcccaccaatcacaaggtatttggagaagacatggcggttttggccggtgatgcgcttcttgctttggcgtttgagcacatgacggttgtgtcgagtgggttggtcgcttccgagaggatgatccgggcagtggttgagctggcaagggccatagggacaaaagggttagtggcagggcaagtggttgacctaagcagcgaaagattgaatccacacgacgttggattggagcgtctagagttcatccacctccacaaaacggcggcgttgttggaggcagcagcggttataggtgccataatgggaggtggaacagaggaagagatcgaaaagcttagaaagtatgctaggtgtattggactattgtttcaggttgttgatgatattcttgacgtaacaaaatctacagaggaattgggaaagactgcaggaaaagacgtaatggctggaaagctgacgtatccaaggctgataggtttggagagatccagggaagttgcggagaaactgagcagagaagccgaggagcagcttctagggtttgagtctgacaaggcggcgcctctggtagctcttgctagctacatttcttgcagaaacgactga

SEQ ID NO: 57576 - protein, 306 aa, Arabidopsis thaliana
MATTVHLSSFSLFIQSRGRRDNSISSVKSLKKRTEPLTVQEAVRYSLLAGGKRVRPLLCIAVCELVGGDEATAMSAACAVEMIHTSSLIHDDLPCMDNADLRRGKPTNHKVFGEDMAVLAGDALLALAFEHMTVVSSGLVASERMIRAVVELARAIGTKGLVAGQVVDLSSERLNPHDVGLERLEFIHLHKTAALLEAAAVIGAIMGGGTEEEIEKLRKYARCIGLLFQVVDDILDVTKSTEELGKTAGKDVMAGKLTYPRLIGLERSREVAEKLSREAEEQLLGFESDKAAPLVALASYISCRND

SEQ ID NO: 57577 - DNA, 1161 bp, Streptomyces coelicolor A3
  CDS (1)..(1161): transl_table=11
atgacggagacccggcgcggcgccaccgcgacgtgccgtcccaccggggcgccggaaaggcacgggcccatcggcacacagcgcgagaaggagccgggggagccgtccgacgggcagggggaggcggtggtcgaagggcacgaggcggccctgctcctgagcgagtcacgagcgtcggtcgatcccgaactgcggtccgccatcgcgacgctgccggagtcgatgcgccgggtcgcgctctaccacttcggctggcagcacgcggacggcacgcccgcggcgggcaacgcgggcaaggcgatccgccccgcgctcgtcctcaccgcggcggccgcgctcggcggcccgggggcccgcgcggcggccgtccgtgccgcggcggcggtggagctggtccacaacttcaccctgctgcacgacgacgtgatggaccgcgacgccacccggcggcaccggccgaccgcgtggaccgtgttcggcgacgccgacgcgatcctggccggggacgcacttcaggcgctcgccctgcggctgttcgccgccgacccgcatccggcgtccgcggcggcggccacccggctcgccgactgcgtcatggagctgtgcgagggccagcacgcggacacggcgatggagcggcccccgccggacgaggtgaccctcgacgagacgctcgtcatggccgaggccaagacgggtgccctgctgggctgcgcctgtgccgtcggcgcgctgtacgcgggcgccgccacggaggacgtcgaggccctggacgccttcggccgtgagccgggaatggccttccagctcatcgacgacgtcatcggcatatggggcgacccggcgccacaccggcaagccggccggtgcgacctggccgcccgcaagaagtcactgccggtggtcgccgccctcacctccggcaccccggccgccgccgaactggccgagctgtacacaggcccgtacgacgagaacaaggaggacctggagcgcaccgccctggccgtggagcgggccggcggccgggactgggcacaggcccaggcggccgaccggatggcgagggccatgcaggagctggcgcgtgccgtgcccgagccggaggcggcgggcggcctgctcgccctggccgagttcgtgacgcggcgcagcacctga

SEQ ID NO: 57578 - protein, 386 aa, Streptomyces coelicolor A3
MTETRRGATATCRPTGAPERHGPIGTQREKEPGEPSDGQGEAVVEGHEAALLLSESRASVDPELRSAIATLPESMRRVALYHFGWQHADGTPAAGNAGKAIRPALVLTAAAALGGPGARAAAVRAAAAVELVHNFTLLHDDVMDRDATRRHRPTAWTVFGDADAILAGDALQALALRLFAADPHPASAAAATRLADCVMELCEGQHADTAMERPPPDEVTLDETLVMAEAKTGALLGCACAVGALYAGAATEDVEALDAFGREPGMAFQLIDDVIGIWGDPAPHRQAGRCDLAARKKSLPVVAALTSGTPAAAELAELYTGPYDENKEDLERTALAVERAGGRDWAQAQAADRMARAMQELARAVPEPEAAGGLLALAEFVTRRST

SEQ ID NO: 57579 - DNA, 897 bp, Zymomonas mobilis
  CDS (1)..(897): transl_table=11
atggcagttaatcttaagaccatgatggaacaggtcgctcaggatattgaccggctttttgctgaacaattaccggttccagaagacccccgtcgccgcttggtagaggccatgcgctatgccgcaatcggtggcggaaaaagactgcgtcctcttctggttgtcgccacctgcgccttgttcaatgtcgatcgcgaagccgctttacgggtcggcatggctatcgaatgtatccatgtctattctttgattcatgatgacatgccctgcatggataatgatgatttgcggcgtggcaaacccactgttcataaagcctttgatgatgcttctgcggttctttccggtgacgcgcttcaggctttggcttttgaaattctttcagaagaaaaaatccataccgatccccatgttcggctagaattgattcaggctttgctatcgcctccggtaaaagacggtatggtcggtggacaggccatcgatttggccgcagaaacctcgacggtgccttttgatcttccgaccatcacccgcttgcaacagcttaaaaccggcgccttattcggtttttgtttagaagccggtgctatcatgggtcgtcagaataaagacatccgtgatcgtctgaaggcctatgcccgtgatatcggtcttgctttccagattgctgatgatctgatcgatgccgaaggtgacgaagccgttgccggaaaagcagttggtaaagatgctgccgccggaaaagcgaccttcctgtctctgttaggtctcgaaaaagcccgttcacaggcacaggcattagtcgaccaggcgattgctcatctgtctgttttcggatcagaagccgattatttacggagtattgctcgctatatcgtagcgcgcgatcactaa

SEQ ID NO: 57580 - protein, 298 aa, Zymomonas mobilis
MAVNLKTMMEQVAQDIDRLFAEQLPVPEDPRRRLVEAMRYAAIGGGKRLRPLLVVATCALFNVDREAALRVGMAIECIHVYSLIHDDMPCMDNDDLRRGKPTVHKAFDDASAVLSGDALQALAFEILSEEKIHTDPHVRLELIQALLSPPVKDGMVGGQAIDLAAETSTVPFDLPTITRLQQLKTGALFGFCLEAGAIMGRQNKDIRDRLKAYARDIGLAFQIADDLIDAEGDEAVAGKAVGKDAAAGKATFLSLLGLEKARSQAQALVDQAIAHLSVFGSEADYLRSIARYIVARDH

SEQ ID NO: 57581 - DNA, 957 bp, Synechococcus elongatus
  CDS (34)..(957): transl_table=11
cctatatgccgcccgcaccctgaggagttgttcatgatttccgctgatcccccccaagtccatcccgccggcacatttgatgtcaaggcctacctcaaagaacgccaagcccttgtggaagctgcccttgaagcctcgattccggtggcctatccggagaaaatttacgatgcgatgcgctattcactgatggcggggggcaagcggctgcgcccgattctctgtttggccacctgtgaactgatggggggcaccgtggaaatggccatgccgactgcctgtgccttggagatgatccatacgatgtcgctcatccacgatgatctaccggccatggacaatgacgactaccgtcgcggcaagcccaccaatcacaaggtctatggtgaagatattgccattctggcgggggatggcttactggcctatgcctttgagtatgtggtggaacaaaccaagaatgtacccgcggagtatctgttgaaaattgtggcgcggttggggcatgcggtggcagcaacgggcttagtcggtggtcaagtggtggacttagagtgtgaaggacagcccgacattggtctggaaacgctgcattttatccactcccacaaaacgggggccctactggaggcctctgtggtgtctggggcattgctgacgggggcgcatgaatctgacgtggcacgcctgtcccgttatgcggcaaatattggcttggcattccagattgtggatgacattttggatattacttcgacccgcgatgtcctcggtaaaaccgttggtaaagatgtggctgcccaaaaaatgacctacccgcgcctgtggggtctggaaaaatctcgccaagaggctgagcgcttggtggcggaggcgaaggcagagttggctgtatatggggcggccgctgttcctttgcaggcgatcgccgactacattaccagccgtagtcattaa

SEQ ID NO: 57582 - protein, 307 aa, Synechococcus elongatus
MISADPPQVHPAGTFDVKAYLKERQALVEAALEASIPVAYPEKIYDAMRYSLMAGGKRLRPILCLATCELMGGTVEMAMPTACALEMIHTMSLIHDDLPAMDNDDYRRGKPTNHKVYGEDIAILAGDGLLAYAFEYVVEQTKNVPAEYLLKIVARLGHAVAATGLVGGQVVDLECEGQPDIGLETLHFIHSHKTGALLEASVVSGALLTGAHESDVARLSRYAANIGLAFQIVDDILDITSTRDVLGKTVGKDVAAQKMTYPRLWGLEKSRQEAERLVAEAKAELAVYGAAAVPLQAIADYITSRSH

SEQ ID NO: 57583 - DNA, 1341 bp, Mentha piperita
  CDS (82)..(1215)
tgacgttgttgtttcttggcacagatttccagttgcagtgctgggttaatatttactaatatatctttttttgagggaaaaatgagtgctcttgttaatcctgtggcgaaatggcctcagacgatcggcgttaaagatgttcacggcggccggaggcggagatccagatccactctctttcaatcccatccacttcgcactgaaatgcctttctctctctacttctcatcccccctcaaagctcccgccactttttccgtttctgcagtttataccaaagagggcagcgaaattagggataaagatccggcgccttcgacttcgccggcgttcgatttcgacggatacatgctccggaaggcgaaatccgtcaacaaggcgttggaagcggcggtgcagatgaaggagccgctgaagatccacgagtccatgcggtactcccttctcgccggcggcaagagagtgcgtcctatgctgtgcatcgcggcctgcgagctcgtcggcggcgacgagtccacggcgatgccggcggcctgcgccgtcgagatgatccacacgatgtcgctgatgcacgacgacctcccatgcatggacaacgacgacctccgccgcggcaagccgacgaaccacatggctttcggcgagagcgtggcggtcctcgccggcgacgccctcctctccttcgcgttcgagcacgtggcggcggcgaccaaaggcgcgccgccggagcggatcgtgagggtcctcggcgagctggctgtctcgatcgggtcggaggggctggtggcggggcaggtggtggacgtctgctcggaggggatggcggaggtcgggctggaccacctcgagttcatccaccaccacaagacggcggcgctgctgcaggggtcggtggttctgggggcgattttgggcggcggaaaggaggaggaggtggcgaagctgagaaaattcgcgaattgcatcggattgctgtttcaggtggtggacgatatcctagatgtgacgaaatcgtccaaggaattggggaagacggcggggaaggatctggtggcggataaaaccacatatccgaagctaataggcgtggagaaatccaaggaattcgcggatcggttgaacagggaggcgcaggagcagctcctccattttcatcctcatagggcagctccattgattgctctcgccaattatattgcttatagggacaattgattccatcttcctcctctcacaatcttcacttcactcaataaacacaaacatgatgctcctttctactcacaaattattcaaataaaaaaatttaaatgcttgttattcaaaaaaaaaaaaaaaaaa

SEQ ID NO: 57584 - protein, 377 aa, Mentha piperita
MSALVNPVAKWPQTIGVKDVHGGRRRRSRSTLFQSHPLRTEMPFSLYFSSPLKAPATFSVSAVYTKEGSEIRDKDPAPSTSPAFDFDGYMLRKAKSVNKALEAAVQMKEPLKIHESMRYSLLAGGKRVRPMLCIAACELVGGDESTAMPAACAVEMIHTMSLMHDDLPCMDNDDLRRGKPTNHMAFGESVAVLAGDALLSFAFEHVAAATKGAPPERIVRVLGELAVSIGSEGLVAGQVVDVCSEGMAEVGLDHLEFIHHHKTAALLQGSVVLGAILGGGKEEEVAKLRKFANCIGLLFQVVDDILDVTKSSKELGKTAGKDLVADKTTYPKLIGVEKSKEFADRLNREAQEQLLHFHPHRAAPLIALANYIAYRDN

SEQ ID NO: 57585 - DNA, 1140 bp, Arabidopsis thaliana
  CDS (1)..(1140)
atgattggtggcagaagctgtgttggaaatttggtatttctccggcgagatttggctacttgcagagctgttccggctaaatccaaggagaattctctggtcaacggtattggtcaagatcaaacagtgatgctcaatctgaggcaagagtcacgaaagccaatatctttggaaactctgtttgaggtcgtagctgatgatttgcagaggttgaacgacaatcttttatcgattgttggtgcagaaaatccggttttgatatctgctgctgagcaaatcttcagcgctggtggcaagaggatgagaccgggtttggtattccttgtatcacgagccactgcggaattagcaggcttaaaggaacttacagtagaacatcggcgtttaggtgagatcattgagatgattcacaccgcaagtttgatacacgatgatgtgttagacgaaagtgatatgcgaagaggaagggaaacggttcacgagctattcggaacaagagtagctgtattagctggggatttcatgtttgctcaagcatcatggtacttagcaaatctcgaaaaccttgaagtcattaagctcataagtcaggtgatcaaagattttgcaagcggtgagataaagcaagcatcgagtttattcgattgtgatgtcaagcttgatgactacatgctaaagagttactacaagacagcttcattagtagctgcaagcaccaaaggagcagcaattttcagtaaagtcgaaagcaaggtcgcagagcaaatgtatcagttcgggaagaatctcggtttatcttttcaagtagttgatgacattctggacttcactcagtccacagagcagttaggtaagcctgcagctaatgacctagccaaaggtaacataacggcgccagtgatcttcgcgctagagaatgagccaaggctaagagagatcattgagtctgagttttgtgagcctggatcgcttgaagaagcgattgaaatagttagaaatcgcggtgggatcaagaaagctcaagaattagcaaaggagaaagctgaacttgcgttaaagaatttgaattgtcttcctaggagtggtttcagatcggctcttgaggatatggtaatgtttaatcttgaaaggattgattag

SEQ ID NO: 57586 - protein, 379 aa, Arabidopsis thaliana
MIGGRSCVGNLVFLRRDLATCRAVPAKSKENSLVNGIGQDQTVMLNLRQESRKPISLETLFEVVADDLQRLNDNLLSIVGAENPVLISAAEQIFSAGGKRMRPGLVFLVSRATAELAGLKELTVEHRRLGEIIEMIHTASLIHDDVLDESDMRRGRETVHELFGTRVAVLAGDFMFAQASWYLANLENLEVIKLISQVIKDFASGEIKQASSLFDCDVKLDDYMLKSYYKTASLVAASTKGAAIFSKVESKVAEQMYQFGKNLGLSFQVVDDILDFTQSTEQLGKPAANDLAKGNITAPVIFALENEPRLREIIESEFCEPGSLEEAIEIVRNRGGIKKAQELAKEKAELALKNLNCLPRSGFRSALEDMVMFNLERID

SEQ ID NO: 57587 - DNA, 1057 bp, Scoparia dulcis
  CDS (1)..(1056)
atgagccttgtaaaccccgtctccacatggccaaaccccacccggagctccgtattccgacccaaacccgccatcctcaacacgacccacttacccatctccttcctattcgccggaaaacccatctccgccgtcctcaccaaagagtacagccaccaaacctcctccaccttcgacttcaagaagtacatgctcgagaaagcctcctccgtcaacaaagccttagaatccgcagtctccctcaaagaacccctcaagatccacgaatctatgcgctactctcttctcgcggggggcaaaagggtccgccccatgctctgcctcgccgcctgcgagctcgtcggcggccacccctccaccgccatgcctgccgcctgctccatcgagatgatccacaccatgtccctcatgcacgacgacctcccctgcatggacaacgaccatctccgccgcggccatcccactaaccacatcgtcttcggagaggacgtcgctgtcctcgccggcgacgctcttcttgcctattccttcgaatacttagccaccgcgacagagggagtccttcctgaacggatagtcagagtgatcgccgagttggcgaaatgtatccgctcagaaggccttctggcggggcaggtggtggatatatgctctgaaggcgtgagcgagatcgggttggagcatttggagtacatacatttgcacaagacggcggcgttgctcgagggctcggtcgtcttgggcgcgattttgggtggcgggaatgatgaagaggttgaaaggttgaggaagtttgccaggtgtattgggctgttgtttcaggtggtggatgatattcttgatgttactaaaacgtcggtggagctggggaagacggccgggaaagatttggtggcggataagaccacgtatccgaagctgattgggattgagaagtcgagggagtttgcggagaagttgaaccgggaggcgcaggaacagcttgtagggtttgattcggataaggccgcgccgttgattgcgctcgcgaattatattgcgtatagggagaattgag

SEQ ID NO: 57588 - protein, 351 aa, Scoparia dulcis
MSLVNPVSTWPNPTRSSVFRPKPAILNTTHLPISFLFAGKPISAVLTKEYSHQTSSTFDFKKYMLEKASSVNKALESAVSLKEPLKIHESMRYSLLAGGKRVRPMLCLAACELVGGHPSTAMPAACSIEMIHTMSLMHDDLPCMDNDHLRRGHPTNHIVFGEDVAVLAGDALLAYSFEYLATATEGVLPERIVRVIAELAKCIRSEGLLAGQVVDICSEGVSEIGLEHLEYIHLHKTAALLEGSVVLGAILGGGNDEEVERLRKFARCIGLLFQVVDDILDVTKTSVELGKTAGKDLVADKTTYPKLIGIEKSREFAEKLNREAQEQLVGFDSDKAAPLIALANYIAYREN

SEQ ID NO: 57589 - DNA, 1107 bp, Croton sublyratus
  CDS (1)..(1107)
atgagttctgtgaatttaggttcatgggttcatacttcctctgttataagtcaagctaccagatccagatccaaatccaaacccttatcgttttctcctgtttcgattcctctgttttaccgaaactcaaaacgcagcgtttcgtatgtttcagcgatcgtgactaaggatgaggagacgattcaggaagaacagaataagaattcaagttcttctcttggttttgatttcaaatcttacatggttcaaaaggctagtgctattaatcaagctttggaagctgctgtttcgcttcgcgagcctcttaaaattcatgaatctatgcggtactcacttttggccggcggtaagcgagtccggccggctttatgtcttgctgcgtgtgaacttgttggcggagatgaatctatggcgatgcctgctgcttgtgctgttgaaatgatacatactatgtcgcttatacatgacgacctgccgtgcatggataacgacgatctccgtcgtggtaagccgacgaatcatattgtgtttggtgaaaatgtggcggttcttgcaggtgatgcgcttcttgcttttgcttttgaacatattgctgtttctactttaaatgtttctcctgtcagaattgttcggggggtaggtgaattggctaaggcgattggtgctgaaggattggttgctggacaggttgttgatatctgttctgaaggtttatctgaagtagatttagaaaagcttgaatttattcatattcataagacagcaaaattgctggaaggagcggtggtgttaggggcaattatgggcggaggaaccgatgaagaggtggaaaaattgaggaaatatgcaagggatattgggttgttgtttcaggtagtggatgatattcttgatgtgaccaaatcgtctcaagaattggggaaaactgcaggaaaggatttggtggcggataaggttacttatcctaagttaatggggattgagaaatcaagggaatttgctgagaagttgaataaagaagctcaggagcaattggctggtttcgatcctgagaaggcggctccattgattgctttagctaattacattgcatacaggcaaaactaa

SEQ ID NO: 57590 - protein, 368 aa, Croton sublyratus
MSSVNLGSWVHTSSVISQATRSRSKSKPLSFSPVSIPLFYRNSKRSVSYVSAIVTKDEETIQEEQNKNSSSSLGFDFKSYMVQKASAINQALEAAVSLREPLKIHESMRYSLLAGGKRVRPALCLAACELVGGDESMAMPAACAVEMIHTMSLIHDDLPCMDNDDLRRGKPTNHIVFGENVAVLAGDALLAFAFEHIAVSTLNVSPVRIVRGVGELAKAIGAEGLVAGQVVDICSEGLSEVDLEKLEFIHIHKTAKLLEGAVVLGAIMGGGTDEEVEKLRKYARDIGLLFQVVDDILDVTKSSQELGKTAGKDLVADKVTYPKLMGIEKSREFAEKLNKEAQEQLAGFDPEKAAPLIALANYIAYRQN

SEQ ID NO: 57591 - DNA, 1324 bp, Daucus carota
  CDS (84)..(1184)
cagtacatctctatatctgtacgaaccttcactaagctgcaacagaaaaattctctatacccagaacaaatccttactttggaatggcaagtgttatgaatctaagcataacccatttttgtagctctcatcttaagcagaaatcacctaacaaacttgttttccatggcctcaactcaaaccctaatttctcgaaatcaaagccaccacaaaatgtcatcccatattcatctctgtccatatcttccgtacaaacaactaaaatagtcatggattcatcgcccacaccctccacatttgatttcaagtcatacatgctcgaaaaggccatttctgtcaacaaagccctagacgcttcagtctcactccaagagcctgtcaaaatacacgagtcaatgcgttactccctccttgcagggggcaagcgtgtccgtcctcttcttagtattgcagcctgcgagctttttggagggcacgaggccgtggccatgccctccgcttgtgctgtggagatgatccacacgatgtccctcatgcacgacgatctcccttttatggacaatgatgatctgcgtcgaggcaagcctactaaccacaaagtctatggtgaaagcgttgctgttcttgctggagacgcgatgttagccctggcggctttccaccttgtagctactgagaccagaggagtctcgtcggatcaggtggttagagtgatcgttgagctggctaaggcaataggcgcagaagggttggttgcaggacagattgtggatgtatgttctgaaggtgatcctaatctcggattagaagatttggagtttattcatcggagcaaaactgcagcattactggaaggttcggttgtgatgggggcaattttgggaggtgcaaatgatgaggaagttgagaaagtgagaaagtatgctaggtgcattggattgttgtttcaagtagttgatgatattcttgatgtcacaaagtcttccaaagaattaggaaaaacggctgggaaagatttggtggccgataagacgacgtatcctaaacttattgggattgagaaatcaagagagttttctgatgagttgaaaagggaagctatagatcagcttgctggatttaattcagataagactgcgcctttgattgctatggctaattacattgcaaatcgagataactgaaatgtgtttaaaaatcagaactgcttaattctgttgctctagcatgtttaagaagaaaatgctgatatatttccagaactagttggttaatttttcatgaataatcagcacttatgttttttcaaaaaaaaaaaaaaaaa

SEQ ID NO: 57592 - protein, 366 aa, Daucus carota
MASVMNLSITHFCSSHLKQKSPNKLVFHGLNSNPNFSKSKPPQNVIPYSSLSISSVQTTKIVMDSSPTPSTFDFKSYMLEKAISVNKALDASVSLQEPVKIHESMRYSLLAGGKRVRPLLSIAACELFGGHEAVAMPSACAVEMIHTMSLMHDDLPFMDNDDLRRGKPTNHKVYGESVAVLAGDAMLALAAFHLVATETRGVSSDQVVRVIVELAKAIGAEGLVAGQIVDVCSEGDPNLGLEDLEFIHRSKTAALLEGSVVMGAILGGANDEEVEKVRKYARCIGLLFQVVDDILDVTKSSKELGKTAGKDLVADKTTYPKLIGIEKSREFSDELKREAIDQLAGFNSDKTAPLIAMANYIANRDN

SEQ ID NO: 57593 - DNA, 1104 bp, Daucus carota
  CDS (1)..(1104)
atggcgtttattcaaaccaatacagcccatgaaaactcactcttgtccaagaatttactgttcgatcatctcaaaaacactggtaaaaccccatcaagctactgcactagacatcatcctatgaagattcaaggcgcaaatgctgtgaattcaactcttgtccaatcagttaacgtccaagaactcctgacaaatccccgtgttacgcctggtccagagtttcattttgaaggttacatgaaaacctcaggtaaaaagataaacaaagcgctggacgaggctgttccagtgcaaaaaccagctatcatccacgaagcgatgcggtattcgcttctggccgggggcaaacgcgtccggccagtgctgtgcatcgcttcgtgtgagttggtaggagggctggagtcatgggctatgcccatggcctgcgccctcgaaatgatccacaccatgtctctaatccatgacgacctcccgtgcatggataacgacgacttgagacgtggcaaaccgacgaatcacaaggtttatggcgaagaaaccgcgattcttgcaggtgatgccttgctctccctagcattcgagcatgtagcggacgcaaccgatatggtgaccccgggtcgggtggttcgggctattgcggagctaggttcggctgtgggctcacaagggctcgtggcgggtcagataatggacatatgtaaccaaggaaaagacgtggatttgaacgacttggagtatattcatgtccacaaaacatcgaagcttctagaagcttcggtggtttgtggagctatattgggaggtgggaatgttattgaggtggagaggttgagaaaatatgcgaggtgtattggattgttgtttcaagtggttgatgatattttagatgttaccaaatcatctgcggagctcgggaagacagccgggaaagatttagtcaccgataagacgacgtatccgaagctaatgggattggagagggctaagagattcgcgacggagctggtggctcaggcggaggaggaactcagttattttggatcgtcagcaagggtggccccgttgtaccatctggctaagtatattgcttatagacaaaactga

SEQ ID NO: 57594 - protein, 367 aa, Daucus carota
MAFIQTNTAHENSLLSKNLLFDHLKNTGKTPSSYCTRHHPMKIQGANAVNSTLVQSVNVQELLTNPRVTPGPEFHFEGYMKTSGKKINKALDEAVPVQKPAIIHEAMRYSLLAGGKRVRPVLCIASCELVGGLESWAMPMACALEMIHTMSLIHDDLPCMDNDDLRRGKPTNHKVYGEETAILAGDALLSLAFEHVADATDMVTPGRVVRAIAELGSAVGSQGLVAGQIMDICNQGKDVDLNDLEYIHVHKTSKLLEASVVCGAILGGGNVIEVERLRKYARCIGLLFQVVDDILDVTKSSAELGKTAGKDLVTDKTTYPKLMGLERAKRFATELVAQAEEELSYFGSSARVAPLYHLAKYIAYRQN

SEQ ID NO: 57595 - DNA, 1131 bp, Oryza sativa subsp
  CDS (1)..(1131)
atgcacgtcctcgctcaatccacggccgtggccaaggtcgccgcctccggctgcctccgacgaagcccgaacccctccgtgacgttccagagatccccttcccttcttctctcgccggccgcgtgccgccgccgctgccgccgcgggtgctccgtctccgtcgacgtgaggtgctccctgggcgccatggtcacgccggagctgaacggcggcgacgtcggcgtcggcgtcggcggtggtagcttcgactttcagcggtatctgtctgccagggccgacgccgtgcacgacgcgctggaccgggccatgccgcgcggcttcccggagcggctctgcgagtccatgcgctactccgtcctcgccggcggcaagcgggtgcgccccgtgctcgcgctggccgcgtgcgagctcgtcggcggggacgccgcggcggccacgcccgtcgcctgcgcggtcgagatgatccacaccatgtcgctcatccacgacgacatgccgtgcatggacgacgacgccctccgccggggccgcccctccaaccacgtcgccttcggcgagttcaccgccctcctcgccggcgacgcgctccacgccctcgcgttcgagcacgtggcgcgcggctgcggcgaccacggcgtccccgcggaccgcacgctccgggcggtcgccgagctcgggagcgcctcgggcaccggcggggtcgccgccgggcaggtcgccgacaaggagagcgagggcctccccgtcagcctcgccatgctggagtacatccacgtgcacaagacggcgaggctcctcgaggccgccgccgtgtccggcgccatcgtcggcgggggcgcggacgccgaggtggagagggtccggcggtacgcgcgctgcgtcgggctcctcttccaggtggtcgacgacgtgctcgacatgacgagcacatcggagcagctcgggaagacggccgggaaggacgtcgaggccgacaaggccacttacccgaagctgctcggcgtcgacaaggcccgcgagtacgccgccgacctcctcgccatggccgaggcggagctcgacgggttcgacgccgagcgcgccgcgccgctgcgacacctcgcgcggttcatcgcctacaggcagcattaa

SEQ ID NO: 57596 - protein, 376 aa, Oryza sativa subsp
MHVLAQSTAVAKVAASGCLRRSPNPSVTFQRSPSLLLSPAACRRRCRRGCSVSVDVRCSLGAMVTPELNGGDVGVGVGGGSFDFQRYLSARADAVHDALDRAMPRGFPERLCESMRYSVLAGGKRVRPVLALAACELVGGDAAAATPVACAVEMIHTMSLIHDDMPCMDDDALRRGRPSNHVAFGEFTALLAGDALHALAFEHVARGCGDHGVPADRTLRAVAELGSASGTGGVAAGQVADKESEGLPVSLAMLEYIHVHKTARLLEAAAVSGAIVGGGADAEVERVRRYARCVGLLFQVVDDVLDMTSTSEQLGKTAGKDVEADKATYPKLLGVDKAREYAADLLAMAEAELDGFDAERAAPLRHLARFIAYRQH

SEQ ID NO: 57597 - DNA, 1889 bp, Taxus canadensis
  CDS (308)..(1489)
ggaagagcggcaatcattctgtcatttaaaggttttctgcaccgaaatcctttaattttaaggttttctggaaggtgtgtgtgaaaatttgaagaaaattaacaagactgtaagtgtttttatatatttatgagctttggtttacttgggtgttactgaattggaacatacgtgcatgtcggagcaaagcagcatatttgaaatttgtgggtgttctttgaggtgtgttgcggatatagatttgattgttcagagttagtgtattttttttttttgttggttagattaattgggcaagttatagagaatggcttacacggcaatggcagcagggacccaaagcttgcaactccgcactgttgcttcctatcaagaatgcaatagtatgaggagttgttttaaattgacaccttttaaaagttttcatggagtgaatttcaatgttccctcactgggtgctgctaattgtgagattatgggtcacctgaaacttgggtcattgccatataaacaatgttcggtgtcatctaaatccacaaaaacaatggcccagttggttgatttggctgaaacagagaaggcggagggaaaggatattgaatttgatttcaacgagtatatgaagtccaaggctgtggcagtggatgcggcactggataaggcaatcccacttgaatatcctgaaaaaatacatgaatcaatgaggtattcacttctagcaggaggtaagcgcgtcaggcctgctctgtgcattgcagcatgtgagcttgtaggagggagtcaggaccttgccatgccaactgcctgtgcaatggagatgattcataccatgtctctgattcatgatgacttgccgtgcatggataatgatgatttcagaagagggaagccaacaaatcacaaggtctttggagaggacactgctgttcttgcaggggacgccctgctttcatttgcatttgagcatattgctgtggctacaagcaagactgtgcctagtgataggactttaagggtgatatctgaattgggtaagacaataggctctcaagggcttgtaggggggcaggtggttgatattacatccgagggggatgctaatgtggacctgaaaaccctggaatggattcatatacacaagactgctgtgctcttggaatgttcagttgtgagtggagggatccttggtggtgctacagaggacgagattgcgagaattcggcggtacgcccggtgtgtggggcttctgtttcaggttgtggatgacatacttgatgtcactaaatcttctgaagaattgggaaagactgcaggaaaggatttgcttactgataaggctacttatcccaagttgatgggcctggagaaagcaaaagaatttgccgctgaattggcgacgagagccaaggaagagctgtcatcctttgatcagataaaggctgcacctttgttgggtcttgcagattacattgcattcaggcaaaactgagaacaaagctgtaaagctattcttacatatcatctgtttttttttgacatctgctgaaaattagcaaataactttttcaagtttgtatctcccctgaatcataacgattcaggacatgaggtttctggtaccattgaaaagggggcgctcattgtagttgttttttagctaattccaacctgttttctatgtttccactttggatcaatttgatgtagattatgtttgtaggggtgacattgttagacttgttacatgtcatcaaattgttttttgcggccttaacatggttttaacttttcactagcaataaggtggcctaaagtgtttatgtaatttttcaatatagatagatatcttttaacaaaaaaaaaaaaaaaaaaaaaaaaaaaaaaaaaaa

SEQ ID NO: 57598 - protein, 393 aa, Taxus canadensis
MAYTAMAAGTQSLQLRTVASYQECNSMRSCFKLTPFKSFHGVNFNVPSLGAANCEIMGHLKLGSLPYKQCSVSSKSTKTMAQLVDLAETEKAEGKDIEFDFNEYMKSKAVAVDAALDKAIPLEYPEKIHESMRYSLLAGGKRVRPALCIAACELVGGSQDLAMPTACAMEMIHTMSLIHDDLPCMDNDDFRRGKPTNHKVFGEDTAVLAGDALLSFAFEHIAVATSKTVPSDRTLRVISELGKTIGSQGLVGGQVVDITSEGDANVDLKTLEWIHIHKTAVLLECSVVSGGILGGATEDEIARIRRYARCVGLLFQVVDDILDVTKSSEELGKTAGKDLLTDKATYPKLMGLEKAKEFAAELATRAKEELSSFDQIKAAPLLGLADYIAFRQN

SEQ ID NO: 57599 - DNA, 909 bp, Pantoea ananas
  CDS (1)..(909): transl_table=11
atgacggtctgcgcaaaaaaacacgttcatctcactcgcgatgctgcggagcagttactggctgatattgatcgacgccttgatcagttattgcccgtggagggagaacgggatgttgtgggtgccgcgatgcgtgaaggtgcgctggcaccgggaaaacgtattcgccccatgttgctgttgctgaccgcccgcgatctgggttgcgctgtcagccatgacggattactggatttggcctgtgcggtggaaatggtccacgcggcttcgctgatccttgacgatatgccctgcatggacgatgcgaagctgcggcgcggacgccctaccattcattctcattacggagagcatgtggcaatactggcggcggttgccttgctgagtaaagcctttggcgtaattgccgatgcagatggcctcacgccgctggcaaaaaatcgggcggtttctgaactgtcaaacgccatcggcatgcaaggattggttcagggtcagttcaaggatctgtctgaaggggataagccgcgcagcgctgaagctattttgatgacgaatcactttaaaaccagcacgctgttttgtgcctccatgcagatggcctcgattgttgcgaatgcctccagcgaagcgcgtgattgcctgcatcgtttttcacttgatcttggtcaggcatttcaactgctggacgatttgaccgatggcatgaccgacaccggtaaggatagcaatcaggacgccggtaaatcgacgctggtcaatctgttaggcccgagggcggttgaagaacgtctgagacaacatcttcagcttgccagtgagcatctctctgcggcctgccaacacgggcacgccactcaacattttattcaggcctggtttgacaaaaaactcgctgccgtcagttaa

SEQ ID NO: 57600 - protein, 302 aa, Pantoea ananas
MTVCAKKHVHLTRDAAEQLLADIDRRLDQLLPVEGERDVVGAAMREGALAPGKRIRPMLLLLTARDLGCAVSHDGLLDLACAVEMVHAASLILDDMPCMDDAKLRRGRPTIHSHYGEHVAILAAVALLSKAFGVIADADGLTPLAKNRAVSELSNAIGMQGLVQGQFKDLSEGDKPRSAEAILMTNHFKTSTLFCASMQMASIVANASSEARDCLHRFSLDLGQAFQLLDDLTDGMTDTGKDSNQDAGKSTLVNLLGPRAVEERLRQHLQLASEHLSAACQHGHATQHFIQAWFDKKLAAVS

SEQ ID NO: 57601 - DNA, 1137 bp, Schizosaccharomyces pombe
  CDS (1)..(1137)
atgattcagtatgtatatttaaaacatatgaggaaattatggagtcttggaaaagtccgttcgactgttcttcggttttctactacgaaccgcaatgcttcacatttaattaaaaacgagttggaacaaatctcaccagggattcgtcaaatgctgaattcaaattcagaatttcttgaagagtgttctaaatattataccattgctcaaggaaaacaaatgcgtccttctcttgttttgctgatgtccaaagctacaagcttgtgccatggtattgatcggtccgtagtgggcgacaaatatattgatgatgatgatttaagatcattttcgacgggtcaaattcttccttctcaattgagattagcacaaataaccgagatgatccatatagcaagtttgctgcatgacgatgtgattgatcacgctaatgtccgtagaggctcaccttcaagcaatgttgctttcggtaatcgacggtcaatccttgcgggtaatttcatccttgcacgggcttcgactgctatggcccgccttcgaaatccccaagttacggagttgttagctacagtgatagcagacttggttcgaggtgagtttttgcagctaaaaaatactatggatccttcatctttggaaataaaacaatcaaattttgactattatattgaaaaaagttttttgaaaacagccagtttaatttccaaaagctgcaaggcttctacaatcctcggacaatgttctcctactgtagcaacagctgctggagaatacggtcgatgcattggtactgcttttcaactaatggatgacgtgttggactatacgtcgaaagatgatactttaggaaaggcggctggtgcagatttgaagctagggttggctacagctcccgtcctctttgcatggaaaaagtatccagaacttggtgcaatgattgtgaatagattcaatcatccttctgatatccaacgggctcgttctttggttgagtgcactgatgctatcgagcaaaccatcacttgggcaaaagaatatatcaaaaaagccaaagattcccttctgtgtctccctgattcacctgcaaggaaggcactttttgcgttggctgataaagtaataacgagaaagaagtga

SEQ ID NO: 57602 - protein, 378 aa, Schizosaccharomyces pombe
MIQYVYLKHMRKLWSLGKVRSTVLRFSTTNRNASHLIKNELEQISPGIRQMLNSNSEFLEECSKYYTIAQGKQMRPSLVLLMSKATSLCHGIDRSVVGDKYIDDDDLRSFSTGQILPSQLRLAQITEMIHIASLLHDDVIDHANVRRGSPSSNVAFGNRRSILAGNFILARASTAMARLRNPQVTELLATVIADLVRGEFLQLKNTMDPSSLEIKQSNFDYYIEKSFLKTASLISKSCKASTILGQCSPTVATAAGEYGRCIGTAFQLMDDVLDYTSKDDTLGKAAGADLKLGLATAPVLFAWKKYPELGAMIVNRFNHPSDIQRARSLVECTDAIEQTITWAKEYIKKAKDSLLCLPDSPARKALFALADKVITRKK

SEQ ID NO: 57603 - DNA, 1116 bp, Arabidopsis thaliana
  CDS (1)..(1116)
atggcttcagtgactctaggttcatggattgttgttcaccaccacaatcatcatcatccatcttcaatccttaccaaatccagatccagatcttgtcctataactcttactaaacccatctcctttcgatcaaaacgcaccgtttcatcatcttcttcaatcgtttcttcttccgttgttacaaaagaagacaatctacgccaatctgaaccatcctctttcgatttcatgtcgtacatcatcaccaaagccgaattagtcaacaaagctttagattcagctgttcctctccgtgagccactcaagatccacgaagcgatgcgttactctcttctcgccggtggcaaaagagttagaccagttctctgcatcgctgcttgtgaactcgtcggaggtgaagaatcaaccgctatgccagcagcttgcgccgtcgagatgattcacaccatgtcgttgatccacgacgatctcccttgtatggataacgacgatctccgccgtggaaaaccgaccaaccacaaagtgtttggtgaagacgtcgctgttttagccggagacgcgcttctctctttcgctttcgagcatttagcttcggcgacgagttctgatgttgtttctccggtgagagtggttcgagccgttggagaattggctaaagcgataggaacagaagggttagtggcgggtcaagtcgtggatattagtagtgaagggttagatttaaacgacgtcggtttagagcatttggagtttatccatttgcataaaacggcggcgttgcttgaagcttctgctgttttgggagctattgttggtggaggaagtgatgatgagattgagaggttaagaaagtttgcgagatgtattggtttgttgtttcaggtggttgatgatatcttggatgtgacgaaatcgtcgaaagagttagggaaaactgctgggaaagatttgattgctgataagttgacgtatcctaagattatgggtttggagaaatcgagagagtttgctgagaaattgaatagagaggctcgtgatcagcttttagggtttgattctgataaggttgctcctttgttggctttggctaattacattgcctatagacagaactga

SEQ ID NO: 57604 - protein, 371 aa, Arabidopsis thaliana
MASVTLGSWIVVHHHNHHHPSSILTKSRSRSCPITLTKPISFRSKRTVSSSSSIVSSSVVTKEDNLRQSEPSSFDFMSYIITKAELVNKALDSAVPLREPLKIHEAMRYSLLAGGKRVRPVLCIAACELVGGEESTAMPAACAVEMIHTMSLIHDDLPCMDNDDLRRGKPTNHKVFGEDVAVLAGDALLSFAFEHLASATSSDVVSPVRVVRAVGELAKAIGTEGLVAGQVVDISSEGLDLNDVGLEHLEFIHLHKTAALLEASAVLGAIVGGGSDDEIERLRKFARCIGLLFQVVDDILDVTKSSKELGKTAGKDLIADKLTYPKIMGLEKSREFAEKLNREARDQLLGFDSDKVAPLLALANYIAYRQN

SEQ ID NO: 57605 - DNA, 1131 bp, Arabidopsis thaliana
  CDS (1)..(1131)
atggaaccacaaattctttttctctatctctcactcttcattctctccctaaacttcttcttcacgaatcttaaaccaaggctagtccgcctcttccagccttctttagaatctcgtgtcaagaccgctcttttatcccgaaaggaagtagccgcgtttcttgattctcccattgtcgaagacgaagaaggcgaagaaagagaagaggaagaagaaggaggtatcgtttcaaatgccaactttacgtttgagtttgatccatacatgatgagcaaagccgaatcagtgaacaaagctctagaagaagcaattccagtcggagagccactcaagattcatgaagccatgcgatacgcgattcttgcggctggaaaacgtgttaggccaatactctgccttgcttcttgcgagctagtaggtggccaagaaaatgcggcaatgcccgccgcttgtgcggttgagatgatccacacgatgtctctaatcaaagacgatttgccttgtatggacaacgacgatttgcgtcgtggaaagcccacgacgcacaaagtctacggcgaaggagttgccattctctctggtggggctctcttgtctcttgcctttgagcacatgaccaccgctgaaatatcctcggagagaatggtttgggcggtgagagaattggctaggtctattgggacaagaggtttagtcgcgggacaagcgatggatataagcagtgaaggtttggacttaaacgaggtcggattagagcatttggagtttatccatgttcataaaaccgcggttttgttggaaactgccgcggttcttggcgccataattggtggtggatctgatgaagagattgaaagtgtgagaaagtttgcaaggtgcattggattgttgtttcaggtggtggatgatattttggacgagacgaagtcgtcggaggaattgggaaaaaccgccgggaaagatcagctcgccggaaagctaacgtatccaaagttgatagggttggagaaatcgaaagaatttgttaagagattgacgaaagatgcacggcaacatcttcaagggtttagttctgaaaaggttgctcctttagtagctcttactacttttattgctaatagaaataagtga

SEQ ID NO: 57606 - protein, 376 aa, Arabidopsis thaliana
MEPQILFLYLSLFILSLNFFFTNLKPRLVRLFQPSLESRVKTALLSRKEVAAFLDSPIVEDEEGEEREEEEEGGIVSNANFTFEFDPYMMSKAESVNKALEEAIPVGEPLKIHEAMRYAILAAGKRVRPILCLASCELVGGQENAAMPAACAVEMIHTMSLIKDDLPCMDNDDLRRGKPTTHKVYGEGVAILSGGALLSLAFEHMTTAEISSERMVWAVRELARSIGTRGLVAGQAMDISSEGLDLNEVGLEHLEFIHVHKTAVLLETAAVLGAIIGGGSDEEIESVRKFARCIGLLFQVVDDILDETKSSEELGKTAGKDQLAGKLTYPKLIGLEKSKEFVKRLTKDARQHLQGFSSEKVAPLVALTTFIANRNK

SEQ ID NO: 57607 - DNA, 1308 bp, Arabidopsis thaliana
  CDS (38)..(1120)
acatttataaagttctattagagacggtggataggccatggctactactgttcatctcagctcattctccctcttcatccaatccagaggaagaagagacaactccatatcttccgtcaagagtctcaaaaaacgcacaggtttgtctccctcttctgccctcacctcacaaggtggcagagacatgattccaccagagggaaaatgcaatgatcacaactctgcttttgatttcaagttgtatatgatccgcaaagccgaatctgtaaatgcggctctcgacgtttctgtaccgctccgagaacccctcactgtccaggaagccgtgcggtactcattgctagcgggcggaaaacgtgtgaggcctctgctctgcattgccgtctgcgagcttgtgggaggcgacgaggctactgccatgtcagctgcttgcgcggttgagatgatccacacaagctctcttattcatgacgatcttccgtgcatggacaatgccgacctccgcagaggcaagcccaccaaccacaaggtatatggagaagacatggcggttttggcaggtgatgcactccttgcattggcgtttgagcacatgacggttgtgtcgagtgggttggtcgctcccgagaggatgattcgcgcggtggttgagctggccagggccatagggactacagggctagttgctggacaaatgatagacctagccagcgaaagactgaatccagacaaggttggattggagcatctagagttcatccatctccacaaaacggcggcattgttggaggcagcggcggttttaggggttataatgggaggtggaacagaggaagagatcgaaaagcttagaaagtatgctaggtgtattggactactgtttcaggtggttgatgacattctcgacgtaacaaaatctactgaggaattgggaaagactgcaggaaaagacgtaatggctggaaagctgacgtatccaaggctgataggtttggagagatcaaaggaagttgcagagaaactgaggagagaagcagaggaacaacttctagggtttgatccaagtaaggcggcgcctctggtggctcttgctagctacatcgcttgcagacacaactgaatggactgatcatatcctcaatgcatcaatctcctaacaagtccttttacttagatctatggtcttgtttcttataaatcatctatgccgtgtgatcatctctctcatttgttttcaagttgtattatgtttttgaatcttaataatgtaatgttcgaaaaatatcaataagatttgctcataggaac

SEQ ID NO: 57608 - protein, 360 aa, Arabidopsis thaliana
MATTVHLSSFSLFIQSRGRRDNSISSVKSLKKRTGLSPSSALTSQGGRDMIPPEGKCNDHNSAFDFKLYMIRKAESVNAALDVSVPLREPLTVQEAVRYSLLAGGKRVRPLLCIAVCELVGGDEATAMSAACAVEMIHTSSLIHDDLPCMDNADLRRGKPTNHKVYGEDMAVLAGDALLALAFEHMTVVSSGLVAPERMIRAVVELARAIGTTGLVAGQMIDLASERLNPDKVGLEHLEFIHLHKTAALLEAAAVLGVIMGGGTEEEIEKLRKYARCIGLLFQVVDDILDVTKSTEELGKTAGKDVMAGKLTYPRLIGLERSKEVAEKLRREAEEQLLGFDPSKAAPLVALASYIACRHN

SEQ ID NO: 57609 - DNA, 1119 bp, Arabidopsis thaliana
  CDS (1)..(1119)
atggaagctcaaaatatctttctctatcttttgatcgtctttctatctctacacttcgtgtttacaactctgaaaggacggctgagtcccgcgaatacacggcggcttatccgccttctccatatcccgatcaaatctccggtcgccgctgctattttcgctagaaaagacacccgtgagtttcttgattcatcaatcaaattagtaaacgaagaagacgatttcggtttcagtttcgatttcaaaccgtacatgatcagcaaagcagagacaataaacagagcattagatgaagcaattccacttattgagccactcaacatccacaaggcaatgcgttacgcgattctcgcaggcggaaaacgtgtcaggccaatactctgcctagccgcttgcgagctagtcggcggggaagagcgtttagcgattcaagcggcttgtgcagttgaaatgattcacacaatgtcactcatcaaagacgatcttccttgtatggacaacgacgatctccgacgagggaaaccaacaacacataaagtcttcggagaaagcgtagccatactctccggcggcgcacttttagctctagctttcgagcatttgacggaagctgacgtgtcatccaagaaaatggttcgagccgttaaagaattggctaagtctattggaacgaaaggactcgtagcgggacaggcgaaggatttaagcagtgaagggttggaacaaaacgatgtcggattagaggatcttgaatatattcacgttcataaaaccggttcgttgcttgaagcatctgcggttatcggagcggttataggcggtggaacagagaaagagatagagaaagtgagaaactttgcgaggtgtatcggattgttgtttcaggtggttgatgatatcttggatgagaccaagtcgtcggaggaattgggaaaaaccgccggaaaagataaggtcgccggaaagctgacgtatccaaaagtgattggtgttgagaaatctaaggagtttgtggagaagttgaagagagatgcgagagaacatcttcaagggtttgattctgacaaagtcaaacctttgatagctcttactaacttcattgccaacagaaaccactga

SEQ ID NO: 57610 - protein, 372 aa, Arabidopsis thaliana
MEAQNIFLYLLIVFLSLHFVFTTLKGRLSPANTRRLIRLLHIPIKSPVAAAIFARKDTREFLDSSIKLVNEEDDFGFSFDFKPYMISKAETINRALDEAIPLIEPLNIHKAMRYAILAGGKRVRPILCLAACELVGGEERLAIQAACAVEMIHTMSLIKDDLPCMDNDDLRRGKPTTHKVFGESVAILSGGALLALAFEHLTEADVSSKKMVRAVKELAKSIGTKGLVAGQAKDLSSEGLEQNDVGLEDLEYIHVHKTGSLLEASAVIGAVIGGGTEKEIEKVRNFARCIGLLFQVVDDILDETKSSEELGKTAGKDKVAGKLTYPKVIGVEKSKEFVEKLKRDAREHLQGFDSDKVKPLIALTNFIANRNH

SEQ ID NO: 57611 - DNA, 1011 bp, Arabidopsis thaliana
  CDS (1)..(1011)
atgcggccgcgttacagtctgattctgtctgcaatgcggctaatacgaccgtccaaccgccgtctaagttcgatcgcaagctccgactctgagttcatttcatacatgaagaataaggctaagtccatcaacaaagcactagacaattcaattcctctttgcaacaattttgttcctctttgggagccagtactcgaggttcacaaagctatgaggtacacgcttctcccaggcggaaaacgagtaaggccaatgctctgtttggtcgcttgcgagctcgtaggtggccaagagtcaaccgcaatgccagcagcctgtgcggttgagatgattcacgcagcgtcgctcatcctagacgaccttccttgtatggatgacgacagcctccgccgtggaaaacccaccaaccataaagtttttggcgagaaaacatccatcttggcctctaatgcgctcaggtctttggccgtcaagcagacattggcatcgacctcattgggggtgacttcagagagggttcttcgggctgttcaggagatggcgagagctgttgggacagagggacttgtggcaggccaagcagcggatttggccggagaaaggatgagttttaagaacgaagacgacgaattgagatatcttgagttgatgcatgttcataaaaccgcggttttggttgaagctgcggctgttgtgggagctataatgggaggtgggtccgatgaagagattgagaggcttaagagctacgcgaggtgcgttggactgatgtttcaggtgatggatgatgtactcgatgagaccaagtcttccgaggagcttgggaaaactgccggtaaagatttgatcaccggaaagctgacgtatccgaaggtgatgggtgtggacaatgcgagagaatatgcaaagaggttgaacagagaagcgcaggaacatcttcaggggtttgattctgacaaggtggttcctttgttgtctctcgctgattatattgtcaagagacaaaactga

SEQ ID NO: 57612 - protein, 336 aa, Arabidopsis thaliana
MRPRYSLILSAMRLIRPSNRRLSSIASSDSEFISYMKNKAKSINKALDNSIPLCNNFVPLWEPVLEVHKAMRYTLLPGGKRVRPMLCLVACELVGGQESTAMPAACAVEMIHAASLILDDLPCMDDDSLRRGKPTNHKVFGEKTSILASNALRSLAVKQTLASTSLGVTSERVLRAVQEMARAVGTEGLVAGQAADLAGERMSFKNEDDELRYLELMHVHKTAVLVEAAAVVGAIMGGGSDEEIERLKSYARCVGLMFQVMDDVLDETKSSEELGKTAGKDLITGKLTYPKVMGVDNAREYAKRLNREAQEHLQGFDSDKVVPLLSLADYIVKRQN

SEQ ID NO: 57613 - DNA, 1428 bp, Capsicum annuum
  CDS (149)..(1258)
agagaataggaaacaatatcatgacagtccaacatctcgactccatataaaatagtccactcaacactactttatatacatcttcccatattctaatatttttaagcttactttctccaagtgaaattgcaccacaaatctcaaaaaaatgagatctatgaaccttgttgatttatgggctcaacaagcttgtttagttttcaatcaaactttgtcttataaatccttcaatggattcatgaaaatccctttgaaaaattccaaaattaatcctaagttaaataagaaaagaccattttctcctctaacagtttcagcaattgctactaccaaagaagatgaaagaattgaagcagcacagacggaggaaccattcaatttcaagatttacgtaacggaaaaggctatttctgtaaacaaggcattagatgaggctattattgtaaaagaaccccatgttatccatgaagcaatgcgttattcccttctcgccggcggcaaacgggtccggccaatgctttgtctggccgcctgtgaactcgtcggcggcaaccaggaaaacgccatggccgccgcttgcgccgtcgagatgatccacactatgtcactcattcacgatgatttaccttgtatggacaacgacgacctccgccgcggaaaacctaccaaccacaaaatctacggcgaggacgtcgccgtcctcgcgggagactccctcctcgccttcgccttcgaacacattgtcaactccacggccggagtcaccccgtccagaatcgtaggcgctgttgcggagttagctaagtccatcggaaccgaaggactggtcgccggacaagtagcagacataaaatgcaccggcaacgctagcgtctctctagaaacgctggaattcatccacgtacacaaaacggcagctctcctagaatcctccgtcgtactcggcgcaatactcggcggcggcacgaatgtcgaggtggagaagctacggaggtttgccagatgcatcggattactatttcaagtagttgatgacatacttgacgtgacgaagtcgtcagaggagctcggaaaaactgctgggaaagatttggttgtcgataagacgacgtatccaaaattgttgggattagaaaaggctaaggaatttgcggcggagcttaatcgggaagcgaagcaacagctggaagggtttgattcgcgcaaagctgctccgttgattgcattggctgattatattgcttatcgtgataattaggaaatagtaatattatggaatgaatgtgctaattcttcatttgatttaccaaatggaaatgaaggtgatcgatctattaatgaatcaattgcttatcttgttgatacaaattggagtcttaaattcgtaattatatattacgactttcagtgtgcttatgttggtaatat

SEQ ID NO: 57614 - protein, 369 aa, Capsicum annuum
MRSMNLVDLWAQQACLVFNQTLSYKSFNGFMKIPLKNSKINPKLNKKRPFSPLTVSAIATTKEDERIEAAQTEEPFNFKIYVTEKAISVNKALDEAIIVKEPHVIHEAMRYSLLAGGKRVRPMLCLAACELVGGNQENAMAAACAVEMIHTMSLIHDDLPCMDNDDLRRGKPTNHKIYGEDVAVLAGDSLLAFAFEHIVNSTAGVTPSRIVGAVAELAKSIGTEGLVAGQVADIKCTGNASVSLETLEFIHVHKTAALLESSVVLGAILGGGTNVEVEKLRRFARCIGLLFQVVDDILDVTKSSEELGKTAGKDLVVDKTTYPKLLGLEKAKEFAAELNREAKQQLEGFDSRKAAPLIALADYIAYRDN

SEQ ID NO: 57615 - DNA, 1271 bp, Catharanthus roseus
  CDS (68)..(1141)
gaattcaattacaacatgggttccagcccaatcaatttattgtttggagaatggcagatccagttctatgcgctctaatctttgtcaccctctcaaaaatcaacttcccatttctttttttctttcgggcacaatccgaaagcccattttcagttgttctcgtctctcaatttctgccattataacgaaagaacaaacccaagaagagagcgaaagcaaaagcaagaaagaggtagccttttcttcctcatcttcatttgatttcaaggcatatatgattggaaaggccaattctgttaataaggcattggaagatgcagtcttggttagggaacctttgaaaattcatgaatctatgaggtactcacttctagctggtggtaaaagagttcgtcctatgctctgtattgctgcttgtgaactttttggtggaacagaatctgttgccatgccttctgcttgtgctgttgagatgattcatactatgtctctgatgcacgatgaccttccctgtatggataatgatgatttgagaagagggaagccgacaaatcataaggtttttggggaggatgttgctgttttagctggggatgcccttcttgcatttgcctttgaacatatagcaactgctaccaaaggtgtctcttccgaaagaattgtgagagtagttggggaattggctaagtgtattggttcagaagggctggtggctggacaggttgttgatgtgtgctctgagggcattgctgatgtagggcttgagcatttagagttcatccatattcacaagactgcagctttattagaagggtctgtggttttaggggcaattgtgggtggtgctaatgatgaacaaatttccaaattgaggaaatttgctaggtgtattgggttgttgtttcaggttgtagatgatattcttgatgttactaaatcttctcaagaattaggaaaaactgcagggaaagacttggtggcagataaggtcacttatcctaaacttcttggtattgataagtccagagaatttgctgagaagttgaatagagaagctcaagaacaacttgctgagtttgatcctgaaaaggctgctccattaattgctctagcaaattacatagcctacagagataactaataatatgttgtttaagttataagagaatttcacatttaagatagactataccaatagaattagatattgttgtcacacaagatatgagctggtaattctttcacattgttaatggaaatgatccgaattc

SEQ ID NO: 57616 - protein, 357 aa, Catharanthus roseus
MRSNLCHPLKNQLPISFFLSGTIRKPIFSCSRLSISAIITKEQTQEESESKSKKEVAFSSSSSFDFKAYMIGKANSVNKALEDAVLVREPLKIHESMRYSLLAGGKRVRPMLCIAACELFGGTESVAMPSACAVEMIHTMSLMHDDLPCMDNDDLRRGKPTNHKVFGEDVAVLAGDALLAFAFEHIATATKGVSSERIVRVVGELAKCIGSEGLVAGQVVDVCSEGIADVGLEHLEFIHIHKTAALLEGSVVLGAIVGGANDEQISKLRKFARCIGLLFQVVDDILDVTKSSQELGKTAGKDLVADKVTYPKLLGIDKSREFAEKLNREAQEQLAEFDPEKAAPLIALANYIAYRDN

SEQ ID NO: 57617 - DNA, 1450 bp, Hevea brasiliensis
  CDS (140)..(1252)
cggcacgaggttcattctctctcttgaaggtcatcctccatttctcctcctccgcattcaactatggctgaagcctgaggactaatccataatctctcatttctttcagctttctttctgtcctttcgttaatctcaagatgagttcagtgaatttgggctcatgggttcacacctcctacgtcttaaaccaagctaccagatccagatccaaatccaaatccttctctctacctttcaatcctctaaaaagtttagcaatttcctttgcttatagaaaatcagagcgacccatttcatctgtctctgcgattattaccaaggaagaagaaactcttcaagaagagcagaataatccaccaccctcttttgatttcaaatcctacatgctccaaaaaggcaattccattaaccaagctttagaagctgccattccactccaagaacccgctaaaattcacgagtctatgcgttattccctcttggccggcggcaagagggtacgaccggccctctgcctcgctgcgtgtgagcttgttggtgggaatgactccatggcgatgcctgctgcatgcgctgtggaaatgattcatactatgtctcttatccatgatgacctcccttgcatggataacgacgatctccgccgtggcaagcccaccaatcacatcgtgtttggagaggacgtggcggttctcgccggtgacgcactcctagcatttgcttttgaacacatcgctgtttctactttaaatgtttcttctgctagaattgtccgggcagttggggaattagcgaaggcgatcggggcagaagggttagttgctggccaagtagttgatataaattctgagggctcatctgaggtggatttagagaagcttgaatttattcacatccacaagaccgctaagttgttggagggggctgtggtgctaggggctatattgggcggaggaaccgatgaggaagtggagaaattgaggaaatatgctagggatattgggttgttgttccaagttgttgacgatattcttgatgtgactaaatcatcccaagaattggggaaaactgcaggcaaggacttggtggcggacaaggttacatatcccaagcttttggggattgagaagtcgagggaatttgcagagaagctgaataaggaagctcaggagcagctggctggatttgatcctgaaaaggcagctccattgattgctttggctaattacatcgctcacaggcaaaactaatgcattgttttatcaattgtttgttttgtatgttcacatgaaaaatttggactgctctttatatagctttaaagaagcttagctctgtatcaattctagcaaatacaattcaatagcaatttgtccacttattttacatctctttgaccatgcgcaattgctgatctcgaattttgaatttaaaaaaaaaaaaaaaaa

SEQ ID NO: 57618 - protein, 370 aa, Hevea brasiliensis
MSSVNLGSWVHTSYVLNQATRSRSKSKSFSLPFNPLKSLAISFAYRKSERPISSVSAIITKEEETLQEEQNNPPPSFDFKSYMLQKGNSINQALEAAIPLQEPAKIHESMRYSLLAGGKRVRPALCLAACELVGGNDSMAMPAACAVEMIHTMSLIHDDLPCMDNDDLRRGKPTNHIVFGEDVAVLAGDALLAFAFEHIAVSTLNVSSARIVRAVGELAKAIGAEGLVAGQVVDINSEGSSEVDLEKLEFIHIHKTAKLLEGAVVLGAILGGGTDEEVEKLRKYARDIGLLFQVVDDILDVTKSSQELGKTAGKDLVADKVTYPKLLGIEKSREFAEKLNKEAQEQLAGFDPEKAAPLIALANYIAHRQN

SEQ ID NO: 57619 - DNA, 1101 bp, Sinapis alba
  CDS (1)..(1101)
atggcttcttcagtgactcctctaggttcatgggttcttcttcaccatcatccttcaactatcttaacccaatccagatccagatctcctccttctctcatcacccttaaacccatctccctcactccaaaacgcaccgtttcgtcttcttcctcctcttccctcatcaccaaagaagacaacaacctcaaatcctcttcctcttccttcgatttcatgtcttacatcatccgcaaagccgactccgtcaacaaagccttagactccgccgtccctctccgggagccactcaagatccacgaagcgatgcgttactctctcctcgccggaggaaaacgcgtcagaccagttctctgcatcgccgcgtgcgagctagtcggaggagaagagtctttagctatgccggcgcgttgcgccgtggaaatgatccacaccatgtcgttgatccacgacgacttgccttgtatggataacgacgatctccgccgcggaaagcccacgaatcacaaagtttacggcgaagacgtggcggttttagccggagacgcgcttctttcgttcgccttcgagcatttagcgtcggctacgagctcggaggtttctccggcgagagtggttagagctgtgggagagttggctaaagccatcggcaccgaagggctcgtggcgggacaagtggtggatataagcagtgaagggttggacttaaacaacgtcggattggagcatttgaagtttatacatttgcataaaacggcggcgttgcttgaagcttcagcggttttgggtgggatcatcggtggagggagtgatgaagagatcgagaggctgaggaagttcgcgaggtgtattgggttgttgtttcaggtggttgatgatatcttggacgtgacgaaatcgtctcaagaactggggaaaaccgctgggaaagatttgattgctgataagttgacttatccgaagctcatgggtttggagaaatcgagagagttcgctgagaagttgaatacagaggcacgtgatcagcttttagggtttgattccgacaaggttgctcctttgttggctttggctaattacattgccaatagacagaactga

SEQ ID NO: 57620 - protein, 366 aa, Sinapis alba
MASSVTPLGSWVLLHHHPSTILTQSRSRSPPSLITLKPISLTPKRTVSSSSSSSLITKEDNNLKSSSSSFDFMSYIIRKADSVNKALDSAVPLREPLKIHEAMRYSLLAGGKRVRPVLCIAACELVGGEESLAMPARCAVEMIHTMSLIHDDLPCMDNDDLRRGKPTNHKVYGEDVAVLAGDALLSFAFEHLASATSSEVSPARVVRAVGELAKAIGTEGLVAGQVVDISSEGLDLNNVGLEHLKFIHLHKTAALLEASAVLGGIIGGGSDEEIERLRKFARCIGLLFQVVDDILDVTKSSQELGKTAGKDLIADKLTYPKLMGLEKSREFAEKLNTEARDQLLGFDSDKVAPLLALANYIANRQN

SEQ ID NO: 57621 - DNA, 981 bp, Arabidopsis thaliana
  CDS (1)..(981)
atgttgtttagtggttcagcgatcccattaagcagcttctgctctcttccggagaaaccccacactcttcctatgaaactctctcccgctgcaatccgatcttcatcctcatctgccccggggtcgttgaacttcgatctgaggacgtattggacgactctgatcaccgagatcaaccagaagctggatgaggccataccggtcaagcaccctgcggggatctacgaggctatgagatactctgtactcgcacaaggcgccaagcgtgcccctcctgtgatgtgtgtggcggcctgcgagctcttcggtggcgatcgcctcgccgctttccccaccgcctgtgccctagaaatggtgcacgcggcttcgttgatacacgacgacctcccctgtatggacgacgatcctgtgcgcagaggaaagccatctaaccacactgtctacggctctggcatggccattctcgccggtgacgccctcttcccactcgccttccagcacattgtctcccacacgcctcctgaccttgttccccgagccaccatcctcagactcatcactgagattgcccgcactgtcggctccactggtatggctgcaggccagtacgtcgaccttgaaggaggtccctttcctctttcctttgttcaggagaagaaattcggagccatgggtgaatgctctgccgtgtgcggtggcctattgggcggtgccactgaggatgagctccagagtctccgaaggtacgggagagccgtcgggatgctgtatcaggtggtcgatgacatcaccgaggacaagaagaagagctatgatggtggagcagagaagggaatgatggaaatggcggaagagctcaaggagaaggcgaagaaggagcttcaagtgtttgacaacaagtatggaggaggagacacacttgttcctctctacaccttcgttgactacgctgctcatcgacattttcttcttcccctctga

SEQ ID NO: 57622 - protein, 326 aa, Arabidopsis thaliana
MLFSGSAIPLSSFCSLPEKPHTLPMKLSPAAIRSSSSSAPGSLNFDLRTYWTTLITEINQKLDEAIPVKHPAGIYEAMRYSVLAQGAKRAPPVMCVAACELFGGDRLAAFPTACALEMVHAASLIHDDLPCMDDDPVRRGKPSNHTVYGSGMAILAGDALFPLAFQHIVSHTPPDLVPRATILRLITEIARTVGSTGMAAGQYVDLEGGPFPLSFVQEKKFGAMGECSAVCGGLLGGATEDELQSLRRYGRAVGMLYQVVDDITEDKKKSYDGGAEKGMMEMAEELKEKAKKELQVFDNKYGGGDTLVPLYTFVDYAAHRHFLLPL

SEQ ID NO: 57623 - DNA, 1047 bp, Bacillus subtilis
  CDS (1)..(1047): transl_table=11
atgttaaatatcattcgtttactggcggagtcgctgccacgcatatcggatggaaatgaaaacacagatgtttgggtgaatgatatgaaatttaaaatggcctactcttttttaaatgacgatattgatgtaatcgaaagagaacttgaacaaaccgtacgttccgattacccgcttttaagcgaggcaggtcttcacctgctgcaggccggagggaaacgtattcggcctgttttcgtgctgctttctggcatgtttggcgattatgatattaataagattaaatatgtcgccgtcactctggaaatgattcacatggcatctttggttcatgatgatgtcattgatgatgcagagcttcgccgaggaaaaccgacaatcaaagcaaagtgggacaatcgtattgcgatgtacacaggcgattatatgcttgcgggatctcttgaaatgatgacgagaattaacgaaccgaaagcccataggattttgtcacagacgatcgttgaagtttgtctaggggaaattgagcagatcaaagacaaatacaacatggaacaaaatctcagaacgtatctccgccgtatcaaaagaaaaacagctctcttgatcgcggtcagctgccagcttggtgccattgcgtctggagctgatgagaagattcataaggcattgtactggtttgggtattacgtcggcatgtcttatcagattattgatgatattcttgattttacttcaactgaggaagagctgggtaaacccgtaggaggagatttgcttcaaggaaacgtcacattgccagtgctgtatgccctgaaaaatcctgcattaaaaaaccagcttaaattgattaacagtgagacaacgcaggaacagcttgaaccaatcattgaagaaatcaaaaaaacagatgcaattgaagcatctatggcagtaagcgaaatgtatctgcagaaagcttttcagaaattaaacacgcttcctcgagggcgcgcacgctcgtctcttgcagccatcgcaaaatatatcggtaaaagaaaattttaa

SEQ ID NO: 57624 - protein, 348 aa, Bacillus subtilis
MLNIIRLLAESLPRISDGNENTDVWVNDMKFKMAYSFLNDDIDVIERELEQTVRSDYPLLSEAGLHLLQAGGKRIRPVFVLLSGMFGDYDINKIKYVAVTLEMIHMASLVHDDVIDDAELRRGKPTIKAKWDNRIAMYTGDYMLAGSLEMMTRINEPKAHRILSQTIVEVCLGEIEQIKDKYNMEQNLRTYLRRIKRKTALLIAVSCQLGAIASGADEKIHKALYWFGYYVGMSYQIIDDILDFTSTEEELGKPVGGDLLQGNVTLPVLYALKNPALKNQLKLINSETTQEQLEPIIEEIKKTDAIEASMAVSEMYLQKAFQKLNTLPRGRARSSLAAIAKYIGKRKF

SEQ ID NO: 57625 - DNA, 789 bp, Aquifex aeolicus
  CDS (1)..(789): transl_table=11
atggaaaggatagaaacctggaaagaaaaaatagaaaaaagacttaatgaaatcctgaaacccgaaggtccagaagaattaatagaagctatgaagtactatcccttacaaaagggaaagaggataagacccctctttacggttgcggtcgcaagtgctctcggagggaatgaagatgatgctataaccgttggctctggtatagaactcattcacaactactcccttatacacgacgatcttccctgtatggacaacgatgtctggagaagaggcctccctacgtgccacataaagttcggagaagcgatggcactccttgcgggagatgcactcctgacttacacctttgaggtcctatcacaaagggaaaattacaaaaccctttcctgtgaagagatacttgagataaacaaaattatcgctcaaaaggcaggttctaacggaatggtagggggacaggttcttgacataaaggggtatgaggacctctacgaggtcagtgtaaaaaaaacaggggcactctttgaagcttgctttatgtgcggagctgtggtagcgaagagaagggaaaaactcaaggagatggaaagtattggcagaaaagtaggcttactctttcaaatggttgacgactaccttgacaaagatggattttacgagaaactcggagaatgtttaaaagaagaaataaaaaaactatacgaagaactaaaagaaaaagaaattttcaaggaaagccaagaactcagataccttctagaccttatatacaagaggattacctga

SEQ ID NO: 57626 - protein, 262 aa, Aquifex aeolicus
MERIETWKEKIEKRLNEILKPEGPEELIEAMKYYPLQKGKRIRPLFTVAVASALGGNEDDAITVGSGIELIHNYSLIHDDLPCMDNDVWRRGLPTCHIKFGEAMALLAGDALLTYTFEVLSQRENYKTLSCEEILEINKIIAQKAGSNGMVGGQVLDIKGYEDLYEVSVKKTGALFEACFMCGAVVAKRREKLKEMESIGRKVGLLFQMVDDYLDKDGFYEKLGECLKEEIKKLYEELKEKEIFKESQELRYLLDLIYKRIT

SEQ ID NO: 57627 - DNA, 894 bp, Bacillus stearothermophilus
  CDS (1)..(894): transl_table=11
atggcgcagctttcagttgaacagtttctcaacgagcaaaaacaggcggtggaaacagcgctctcccgttatatagagcgcttagaagggccggcgaagctgaaaaaggcgatggcgtactcattggaggccggcggcaaacgaatccgtccgttgctgcttctgtccaccgttcgggcgctcggcaaagacccggcggtcggattgcccgtcgcctgcgcgattgaaatgatccatacgtactctttgatccatgatgatttgccgagcatggacaacgatgatttgcggcgcggcaagccgacgaaccataaagtgttcggcgaggcgatggccatcttggcgggggacgggttgttgacgtacgcgtttcaattgatcaccgaaatcgacgatgagcgcatccctccttccgtccggcttcggctcatcgaacggctggcgaaagcggccggtccggaagggatggtcgccggtcaggcagccgatatggaaggagaggggaaaacgctgacgctttcggagctcgaatacattcatcggcataaaaccgggaaaatgctgcaatacagcgtgcacgccggcgccttgatcggcggcgctgatgcccggcaaacgcgggagcttgacgaattcgccgcccatctaggccttgcctttcaaattcgcgatgatattctcgatattgaaggggcagaagaaaaaatcggcaagccggtcggcagcgaccaaagcaacaacaaagcgacgtatccagcgttgctgtcgcttgccggcgcgaaggaaaagttggcgttccatatcgaggcggcgcagcgccatttacggaacgccgacgttgacggcgccgcgctcgcctatatttgcgaactggtcgccgcccgcgaccattaa

SEQ ID NO: 57628 - protein, 297 aa, Bacillus stearothermophilus [sequence omitted]

SEQ ID NO: 57629 - DNA, 819 bp, Bacillus subtilis
  CDS (1)..(819): transl_table=11
gtgacaaataaattaacgagctttctggcggaccggaaaaaaacaattgaaaatcagctttctgtctatacagaaaagcttgatatgccggactcattaaagaaatctatgctatattctctacaggccggcggaaagcggttgcggcctctgattgtactggctgttttaaatgcatatggaaaaagcgaaaaagacggcattccggtgggctgtgctgtcgaaatgattcacacgtattcgttaattcatgatgatcttccatgcatggatgatgacgatttgcgccgcgggaagccgacaaaccataaagtgtttggtgaagcgacggcagtattagcgggtgacgggctgctcacagaaagctttaagctgattacctcccacgtgtcagacgaggtgtcagcagaaaagcgcctgcggcttgtgaatgaactgatttcagcggcaggcaccgaaggcatggtcggtgggcaagtagctgatatggaagcgggaaaccgacaagtcacgcttgaagagctcgaatccattcatgaacggaaaacttccaagctccttggcttttgtgtaatcgccggtgctattttggctgatgcgcctgaggaagacattgaaacactgcgtaccttcagcagccacattggaatcggatttcaaatcagagacgatattttagatttagaaggcagtgaagagaaaatcggcaaacgtgtcggctcggataccacaaatgacaaatcgacatacccgtcgcttctttcattggaaggggccaaacataaattggatgttcatataaaagaggcgaacgattga

SEQ ID NO: 57630 - protein, 272 aa, Bacillus subtilis
MTNKLTSFLADRKKTIENQLSVYTEKLDMPDSLKKSMLYSLQAGGKRLRPLIVLAVLNAYGKSEKDGIPVGCAVEMIHTYSLIHDDLPCMDDDDLRRGKPTNHKVFGEATAVLAGDGLLTESFKLITSHVSDEVSAEKRLRLVNELISAAGTEGMVGGQVADMEAGNRQVTLEELESIHERKTSKLLGFCVIAGAILADAPEEDIETLRTFSSHIGIGFQIRDDILDLEGSEEKIGKRVGSDTTNDKSTYPSLLSLEGAKHKLDVHIKEAND

SEQ ID NO: 57631 - DNA, 999 bp, Bradyrhizobium japonicum
  CDS (1)..(999): transl_table=11
atgcagactggttccacgccacacgacgaccgagctggcgtttccgcgaacggcatattgggcgcgcaggcgcgcggcgcatccggcaggctgctgcccgagatctggatgcaggacggcgcaaagcgggtcgaagaggcgctggcgcgtcttctctgcgccgaagacgacggtgagaccgagctgatggcggcgatgcgctacgccaccttgcatggcggcaagcgcacccgcgccttgctctgtttggctgccggcgcactggccgacacgccggcgcacatgctcgatgacgtcggtgccgccatcgagatgatgcacgcctgtacgttggtccacgacgatctgcccgcgatggacgacgacgtgcttcgccgcggccttccgaccgtgcacgtcaagttcggcgaagccaccgcgatcctggtcggcgatgcgctgcaggcgcacgccttcctgaccctggcgagcctgaatgcgccgggcgacagccctatcgcgctcgtgcgcgaactggcgcaggcggtgtccgccgagggggccgcaggcgggcaggccatagatctgtcgctggttggaaagcacgtcgagctggacaggatcgtggcgatgcaccggatgaagagcggagcgctagtgcgcgcgtccgttcgcatgggcgcgctatgcgctgtcggcgtgaatgccgcgcacgctgcactttactgtgcgctggatcactacagcgcctgtttcggcctggcgttacaggtgatcgacgacattctcgacgtgacagcggataccgcggcgctgggcaagacccccggcaaggacgcggcggcgcagaagccgacctgcgcgtcgatcatgggactgcaggaagcacgccagttcgcgctggatctgttgcgcgatgccggcgaggccatcgcgccgctggggccgcgtgcggaacggttggcgcaactcatacagcgggccaacgcgtatctgttcaaacacgcgccacgcgcatga

SEQ ID NO: 57632 - protein, 332 aa, Bradyrhizobium japonicum
MQTGSTPHDDRAGVSANGILGAQARGASGRLLPEIWMQDGAKRVEEALARLLCAEDDGETELMAAMRYATLHGGKRTRALLCLAAGALADTPAHMLDDVGAAIEMMHACTLVHDDLPAMDDDVLRRGLPTVHVKFGEATAILVGDALQAHAFLTLASLNAPGDSPIALVRELAQAVSAEGAAGGQAIDLSLVGKHVELDRIVAMHRMKSGALVRASVRMGALCAVGVNAAHAALYCALDHYSACFGLALQVIDDILDVTADTAALGKTPGKDAAAQKPTCASIMGLQEARQFALDLLRDAGEAIAPLGPRAERLAQLIQRANAYLFKHAPRA

SEQ ID NO: 57633 - DNA, 885 bp, Buchnera aphidicola subsp
  CDS (1)..(885): transl_table=11
atgaatttttctcatttatatgacatctactataatcgtataaataaaaagttgttcgaaataatacaagaattgccctttcaggattctgttctttttagagcaatgaaatacagtaccttatcaggaggaaaaagattacgtgcatgtttaatatatgctactggagaaacatttcaagtcaatattgctgcacttgatgttatatctgctgctgttgaattagttcattcgtattctttaattcatgatgatttgccatgtattgataacgattattttagaagagggaaaatttcttgtcatataaagtatggtgaaaattttgctttattggcaggtgatgcattacaaggattggcatttaatattttatcaaatagtaatatgccaggagtacacgattctattcgtttaaaaatgattgctgagttttctaatgcaattggttattctgggatgtgtattggtcaaatgctagatttagaaaaagaaagaaaaaaaataaatatatctgaattagaaaagattaatttatataaaactgcatttttaattcggtgctctatacgtttagcttattttgcttctaacaatttttctaaagaagttttatttattttagataaattttcagtttctattggtttggcttttcaaattcaagatgatatcttggatttaaaaaatgatatcaaaaagttagagagtaaaagaaataaaacaaaaaatacatatccattattaataggattaaaaaaatctaaaattaaaataaaagaattatataaagaagctttttttacattagaaattttaaaaaaaaattttaatgttaatatattaaaattactgacacagtttataatgaaacgttttaaataa

SEQ ID NO: 57634 - protein, 294 aa, Buchnera aphidicola subsp
MNFSHLYDIYYNRINKKLFEIIQELPFQDSVLFRAMKYSTLSGGKRLRACLIYATGETFQVNIAALDVISAAVELVHSYSLIHDDLPCIDNDYFRRGKISCHIKYGENFALLAGDALQGLAFNILSNSNMPGVHDSIRLKMIAEFSNAIGYSGMCIGQMLDLEKERKKINISELEKINLYKTAFLIRCSIRLAYFASNNFSKEVLFILDKFSVSIGLAFQIQDDILDLKNDIKKLESKRNKTKNTYPLLIGLKKSKIKIKELYKEAFFTLEILKKNFNVNILKLLTQFIMKRFK

SEQ ID NO: 57635 - DNA, 900 bp, Escherichia coli
  CDS (1)..(900): transl_table=11
atggactttccgcagcaactcgaagcctgcgttaagcaggccaaccaggcgctgagccgttttatcgccccactgccctttcagaacactcccgtggtcgaaaccatgcagtatggcgcattattaggtggtaagcgcctgcgacctttcctggtttatgccaccggtcatatgttcggcgttagcacaaacacgctggacgcacccgctgccgccgttgagtgtatccacgcttactcattaattcatgatgatttaccggcaatggatgatgacgatctgcgtcgcggtttgccaacctgccatgtgaagtttggcgaagcaaacgcgattctcgctggcgacgctttacaaacgctggcgttctcgattttaagcgatgccgatatgccggaagtgtcggaccgcgacagaatttcgatgatttctgaactggcgagcgccagtggtattgccggaatgtgcggtggtcaggcattagatttagacgcggaaggcaaacacgtacctctggacgcgcttgagcgtattcatcgtcataaaaccggcgcattgattcgcgccgccgttcgccttggtgcattaagcgccggagataaaggacgtcgtgctctgccggtactcgacaagtatgcagagagcatcggccttgccttccaggttcaggatgacatcctggatgtggtgggagatactgcaacgttgggaaaacgccagggtgccgaccagcaacttggtaaaagtacctaccctgcacttctgggtcttgagcaagcccggaagaaagcccgggatctgatcgacgatgcccgtcagtcgctgaaacaactggctgaacagtcactcgatacctcggcactggaagcgctagcggactacatcatccagcgtaataaataa

SEQ ID NO: 57636 - protein, 299 aa, Escherichia coli
MDFPQQLEACVKQANQALSRFIAPLPFQNTPVVETMQYGALLGGKRLRPFLVYATGHMFGVSTNTLDAPAAAVECIHAYSLIHDDLPAMDDDDLRRGLPTCHVKFGEANAILAGDALQTLAFSILSDADMPEVSDRDRISMISELASASGIAGMCGGQALDLDAEGKHVPLDALERIHRHKTGALIRAAVRLGALSAGDKGRRALPVLDKYAESIGLAFQVQDDILDVVGDTATLGKRQGADQQLGKSTYPALLGLEQARKKARDLIDDARQSLKQLAEQSLDTSALEALADYIIQRNK

SEQ ID NO: 57637 - DNA, 1080 bp, Micrococcus luteus
  CDS (105)..(980): transl_table=11
agtgagtttagagaaatccattgaattgtatgagcaaggtgtcaaattatctcaagcatgtcaattaaagctatctgaagcagaagaaaagattgcaaaattaaatgctgcaggagaaactgacaatgaatcgtgactttcttaatctgattaatgaatcattgttaaataaatatcatcctgcgcaatcaagactacatgaagcaatcaactattcattaagtgcaggtggcaagcgcattagaccattacttgttctgactactttagatagtttaggtggcaatgcacatgacggtttaccatttggcattgcgcttgaaatgattcatacgtattctttaattcacgatgacttgccggcaatggataatgatgactatcgtcgcggtaaactcacgaatcataagcgttttgatgaagcaacagctatactcgctggagatgcattgctcactgatgcttttcaatgcattttaaatacgcagttaaacgcagaaattaaattatcattgattaatttattaagtactgcttctggatctaatggcatggtttacggccaaatgctcgatatgcaaggtgaacataaaacattgacattaaatgaactggaacgtattcacatacataaaaccggtgaattgattcgtgcagcaattgtaagtgcaggtatcataatgaattttaatgatgcacaaattgagcaactcaatattattggtaagaacgtaggtttaatgttccagataaaagatgatattcttgatgttgaagggtcgttcgaaaatatcggaaaaacagttggcagtgatttaaataatgataaaagtacatatgtatcactcttaggacttgaagcttcaaagcaattacttaatgataagctaactgaaacatatgatgcgcttaaaacgttacaaccgattaatgacaatctgaaaacattaattacttatatcgttgaaagaaataaataatataagcaatcaataaaagctttgatttttacttttattgattgcttttgtttattaattcttgacttgtgattattatttttcatgtgttacgaaagcg

SEQ ID NO: 57638 - protein, 291 aa, Micrococcus luteus
MLQEKLTMNRDFLNLINESLLNKYHPAQSRLHEAINYSLSAGGKRIRPLLVLTTLDSLGGNAHDGLPFGIALEMIHTYSLIHDDLPAMDNDDYRRGKLTNHKRFDEATAILAGDALLTDAFQCILNTQLNAEIKLSLINLLSTASGSNGMVYGQMLDMQGEHKTLTLNELERIHIHKTGELIRAAIVSAGIIMNFNDAQIEQLNIIGKNVGLMFQIKDDILDVEGSFENIGKTVGSDLNNDKSTYVSLLGLEASKQLLNDKLTETYDALKTLQPINDNLKTLITYIVERNK

SEQ ID NO: 57639 - DNA, 945 bp, Oryza sativa
  CDS (1)..(945)
atggtcacgccggagctgaacggcggcgacgtcggcgtcggcgtcggcggtggtagcttcgactttcagcggtatctgtctgccagggccgacgccgtgcacgacgcgctggaccgggccatgccgcgcggcttcccggagcggctctgcgagtccatgcgctactccgtcctcgccggcggcaagcgggtgcgccccgtgctcgcgctggccgcgtgcgagctcgtcggcggggacgccgcggcggccacgcccgtcgcctgcgcggtcgagatgatccacaccatgtcgctcatccacgacgacatgccgtgcatggacgacgacgccctccgccggggccgcccctccaaccacgtcgccttcggcgagttcaccgccctcctcgccggcgacgcgctccacgccctcgcgttcgagcacgtggcgcgcggctgcggcgaccacggcgtccccgcggaccgcacgctccgggcggtcgccgagctcgggagcgcctcgggcaccggcggggtcgccgccgggcaggtcgccgacaaggagagcgagggcctccccgtcagcctcgccatgctggagtacatccacgtgcacaagacggcgaggctcctcgaggccgccgccgtgtccggcgccatcgtcggcgggggcgcggacgccgaggtggagagggtccggcggtacgcgcgctgcgtcgggctcctcttccaggtggtcgacgacgtgctcgacatgacgagcacatcggagcagctcgggaagacggccgggaaggacgtcgaggccgacaaggccacttacccgaagctgctcggcgtcgacaaggcccgcgagtacgccgccgacctcctcgccatggccgaggcggagctcgacgggttcgacgccgagcgcgccgcgccgctgcgacacctcgcgcggttcatcgcctacaggcagcattaa

SEQ ID NO: 57640 - protein, 314 aa, Oryza sativa
MVTPELNGGDVGVGVGGGSFDFQRYLSARADAVHDALDRAMPRGFPERLCESMRYSVLAGGKRVRPVLALAACELVGGDAAAATPVACAVEMIHTMSLIHDDMPCMDDDALRRGRPSNHVAFGEFTALLAGDALHALAFEHVARGCGDHGVPADRTLRAVAELGSASGTGGVAAGQVADKESEGLPVSLAMLEYIHVHKTARLLEAAAVSGAIVGGGADAEVERVRRYARCVGLLFQVVDDVLDMTSTSEQLGKTAGKDVEADKATYPKLLGVDKAREYAADLLAMAEAELDGFDAERAAPLRHLARFIAYRQH

SEQ ID NO: 57641 - DNA, 969 bp, Brassica napus
  CDS (1)..(969)
atgctgttaagcgcttcagcgactcctctccgattttgtgggtttgttcccgagaaaccctgtcgtggtgtgcgcatgaaacaatcaattcggtcatcatcgtccaataacttcgatctgaggacgtattggacaaccctaataacggagatcaaccagaagctggacgaagcgataccagtcaagtaccctgcagggatctatgaggcgatgagatactcagtcctcgctaaaggcgccaagcgtgcccctcctgtaatgtgcgtggccgcctgcgagctcttcggtggcgatcgactcgccgctttccccaccgcatgtgcccttgaaatggtccacgcggcttcgctgattcacgatgacctcccctgtatggacgatgatcctgtccgcagaggaaagccatctaaccacactgtcttcggcgctgacatggccattctggctggtgatgccctcttcccactcggcttccagcacattgtctctctcacccctcctcaccttgttccccgatccaccatcctccgtctcatctccgagattgcccgcaccgtcggctccaccggcatggctgcagggcagtacgttgacctcgaaggaggcccctttcctatttcctttgctcaggagaagaaattcggagccatgggggagtgctcagccgtctgtggaggtctcttgggtggtgccactgacgatgagcttcagagtctcagattgtacggcagagctgttgggatgctgtatcaggtggtggatgacatcagagacgacgacaagacgaagaagaagaagagctatgcgggagtctttggttcagagagggcaatggaaatggcagatgagcttagtgtaaaggccaagaaggagctgcaagtgtttgacaactatggagacgcatcggttgctcctctctacagtttcgttgactacgctgctcaccgagacttccttcttcatgtctga

SEQ ID NO: 57642 - protein, 322 aa, Brassica napus
MLLSASATPLRFCGFVPEKPCRGVRMKQSIRSSSSNNFDLRTYWTTLITEINQKLDEAIPVKYPAGIYEAMRYSVLAKGAKRAPPVMCVAACELFGGDRLAAFPTACALEMVHAASLIHDDLPCMDDDPVRRGKPSNHTVFGADMAILAGDALFPLGFQHIVSLTPPHLVPRSTILRLISEIARTVGSTGMAAGQYVDLEGGPFPISFAQEKKFGAMGECSAVCGGLLGGATDDELQSLRLYGRAVGMLYQVVDDIRDDDKTKKKKSYAGVFGSERAMEMADELSVKAKKELQVFDNYGDASVAPLYSFVDYAAHRDFLLHV

SEQ ID NO: 57643 - DNA, 1281 bp, Glycine max
  CDS (1)..(1281)
atgatgtctgtcacaggcaaaagcattgattttgctggcaaaaacttggtctcttgtggctgctcttccaatgcttcttcgtttgataggtacactgtgaggaactatgccaagctgaatagtaataattctaaagggtgtggcagagatcatggggctcgtaaattggtttgttgtaagaagaggagcactcattgtcgggtttcttctatgaagactgcacagcctacggtgaatggggggactcatgcatttgaaggccttaccacaggattggacttgaagggttattcagaagaccccatttcccctgctaggctttttgaagtggttgccgatgatctgctaactctcaataaaaatcttcagtcgattgtaggagcagaaaatccagttttgatgtctgcagctgagcagatttttagtgctggtggaaagaggatgagaccagctttggtgttcttggtgtcaagggcgactgcagagttacttggcttgaaggaacttactgcaaagcatcgacgtttagcagagataattgaaatgattcatactgcaagtttgatacatgatgatgtactagatgagagtgaccttcgacgagggaagaaaactgttcatcaaatgtttggaacaagagttgcagtgctggctggagacttcatgtttgcacagtcatcatggtatctagccaaccttgaaaatattcaagtcattaaactcatcagtcaggtgataaaagattttgcaagtggggaaataaagcaggcttcaagcttgtttgattgtgatgtacaacttgacgagtatctaattaagagctattacaagacagcatccttgattgctgccagcacaaaaggagccgcgatctttagtggtgctgacagcagcgtgactgagaaaatgtacgaatatggaaggaatcttggtctatccttccaagttgtggatgacatattggatttcactcaatcagccgagcaactgggaaagcctgctggcagtgaccttgccaagggcaacctgactgcaccagtaattttcgcactggagaaagaaccgaaattgagggatatcatcgagtctgaattcagtgaggttggttcccttgaggaagccatcaatttggtcaagagttgtgggggcattgaaagagcacaagagttagcaaaagagaaagccgatcttgcaattcaaagtctccaatgcctacctcagagtgtatttcgtttagcccttgaagatatggtggcatataaccttcaacggattgcataa

SEQ ID NO: 57644 - protein, 426 aa, Glycine max
MMSVTGKSIDFAGKNLVSCGCSSNASSFDRYTVRNYAKLNSNNSKGCGRDHGARKLVCCKKRSTHCRVSSMKTAQPTVNGGTHAFEGLTTGLDLKGYSEDPISPARLFEVVADDLLTLNKNLQSIVGAENPVLMSAAEQIFSAGGKRMRPALVFLVSRATAELLGLKELTAKHRRLAEIIEMIHTASLIHDDVLDESDLRRGKKTVHQMFGTRVAVLAGDFMFAQSSWYLANLENIQVIKLISQVIKDFASGEIKQASSLFDCDVQLDEYLIKSYYKTASLIAASTKGAAIFSGADSSVTEKMYEYGRNLGLSFQVVDDILDFTQSAEQLGKPAGSDLAKGNLTAPVIFALEKEPKLRDIIESEFSEVGSLEEAINLVKSCGGIERAQELAKEKADLAIQSLQCLPQSVFRLALEDMVAYNLQRIA

SEQ ID NO: 57645 - DNA, 1110 bp, Brassica napus
  CDS (1)..(1110)
atggcttcttcagtgactctaggttcatgcccatgggttcttcaccatcatccttcaacccaatccaaaacacccagatctagatctccttctctcatcacccttaaacccatcaccctcaccccaaaacgcaccgtttcgtctgcttcccacaccatctcctcttccctcgtcaccaaagaagacaacaacctcaaatccaccaccacctcctccttcgacttcatgtcgtacatcctccgcaaagccgactccgtcaacagagccctggactccgccgtccccctccgggagccgctcaagatccacgaggcgatgcgctactccctcctcgccggcggcaaacgcgtcaggcccgtcctctgcatcgccgcctgcgagctcgtcggcggcgaagagtccctcgccatgccggcggcctgcgccgtcgagatgatccacaccatgtcgctgatccacgacgacttgccgtgcatggacaacgacgacctccgccgcgggaagccgacgaaccacaaggtttacggcgaggacgtggcggtcctggccggagacgcgcttctctccttcgccttcgagcatttggcgtcggcgacgagctccgacgtttctccggcgagagtggtcagagccgtcggagagttggcgaaagctataggaaccgaagggctggtggcgggacaagtggcggatataagcagcgaagggttagacttaaacgacgtcggattggatcatttagagtttattcatttgcataaaacggcggcgttgcttgaggcttcagccgttttgggcgggatcgtcggtggagggagtgatgaagagatcgagaggctgaggaagttcgcgaggtgtatcggtctgttgtttcaggtggttgatgatatcctggacgtgaccaagtcgtctcaggagctggggaaaaccgccgggaaagatttgatcgctgataagctgacgtatccgaagctcatgggattggagaaatcgagagagttcgctgagaagttgaatagagaggcgcgtgatcagcttttggggtttgattccgacaaggttgctcctttgttggctttggctaattacattgccaatagacagaactga

SEQ ID NO: 57646 - protein, 369 aa, Brassica napus
MASSVTLGSCPWVLHHHPSTQSKTPRSRSPSLITLKPITLTPKRTVSSASHTISSSLVTKEDNNLKSTTTSSFDFMSYILRKADSVNRALDSAVPLREPLKIHEAMRYSLLAGGKRVRPVLCIAACELVGGEESLAMPAACAVEMIHTMSLIHDDLPCMDNDDLRRGKPTNHKVYGEDVAVLAGDALLSFAFEHLASATSSDVSPARVVRAVGELAKAIGTEGLVAGQVADISSEGLDLNDVGLDHLEFIHLHKTAALLEASAVLGGIVGGGSDEEIERLRKFARCIGLLFQVVDDILDVTKSSQELGKTAGKDLIADKLTYPKLMGLEKSREFAEKLNREARDQLLGFDSDKVAPLLALANYIANRQN

SEQ ID NO: 57647 - DNA, 1263 bp, Brassica napus
  CDS (1)..(1263)
atgttaatcacgaggggtatttctcgcaagttccgcaccttctatggctgctctcgatctctcatcgcctctccccgcctcgcaatcatacccaatcggagtcactcctcttgctccgactctacaaaaaacaagggttacgtttgcagagatacttcttatgcattgacttctccgggttttgggagctttagacatcagctctatcaccagagcagctccgttgttgaggaggagcttgaccccttttcccttgatgctgatgagctgtcacttcttagtaataagttgagagccatggtagttgccgaggttcccaagcttgcttctgcggctgaatacttcttcaaaaagggtgtggaaggcaaacagtttcgtccaactattatgctgctgatggcgactgctctgaatgtacgtgtaccagaagcattggctgctgaatcagcagatgtagtctcatcagagttacgtgtaaggcaacggggtattgctgaaatcaccgagatgatacatgttgcaagcctactgcatgatgatgtcttagatgatgctgatacaaggcgtggtgttggttccttaaactttgtaatgggtaacaagatatcggtattagcaggagactttttgctttctcgggcttgtgtggctcttgctgctcttaaaaacacagaggttgtatcgttgcttgcaactgttgtagaacatcttgttaccggtgaaaccatgcaaatgactagcacaactgatcagcgtcatagtatggactactacatgcagaagacatattataagacggcatcactaatctcaaacagctgcaaagcagtggcattactcgctggacaatcagcagaagttgccatgttagcttttgaatacgggaagaatctgggcttggcattccaattgatagacgacgttctcgacttcaccggcacatctgcgtctctaggaaagggatccttatcagacatccgacatgggatcataacagctccaatcctctttgccatggaggagtttccacaactacgcaaagttgttggtcaacttgaaaaagatccaacgaacgttgacattgctttagagtatcttgggaagagcaatgggatacaaaggacaagagacttagctatggaacatgcgaatctcgcagcagcagcaattgggtctctacctgaaacagacgatgaagatgtcaaaagatcgaggcgggcacttattgacttgacacatagagtcatcaccagaaacaagtaa

SEQ ID NO: 57648 - protein, 420 aa, Brassica napus
MLITRGISRKFRTFYGCSRSLIASPRLAIIPNRSHSSCSDSTKNKGYVCRDTSYALTSPGFGSFRHQLYHQSSSVVEEELDPFSLDADELSLLSNKLRAMVVAEVPKLASAAEYFFKKGVEGKQFRPTIMLLMATALNVRVPEALAAESADVVSSELRVRQRGIAEITEMIHVASLLHDDVLDDADTRRGVGSLNFVMGNKISVLAGDFLLSRACVALAALKNTEVVSLLATVVEHLVTGETMQMTSTTDQRHSMDYYMQKTYYKTASLISNSCKAVALLAGQSAEVAMLAFEYGKNLGLAFQLIDDVLDFTGTSASLGKGSLSDIRHGIITAPILFAMEEFPQLRKVVGQLEKDPTNVDIALEYLGKSNGIQRTRDLAMEHANLAAAAIGSLPETDDEDVKRSRRALIDLTHRVITRNK

SEQ ID NO: 57649 - DNA, 966 bp, Brassica napus
  CDS (1)..(966)
atgctattaagcgcttcagcgactcctctccgatttggtgggcatgttcccgagaaaccctgtcgtatgcgcatgaaacaagcaattcgatcatcatcgtccaataacttcgatctgaggacgtattggacaaccctaataacggagatcaaccagaagctggacgaagcgataccagtcaagtaccctgcagggatctatgaggcgatgagatactcagtcctcgctaaaggcgccaagcgtgcccctcctgtaatgtgcgtggccgcctgcgagctcttcggtggcgatcgactcgccgctttccccaccgcatgtgcccttgaaatggtccacgcggcttcgctgattcacgatgacctcccctgtatggacgatgatcctgtccgcagaggaaagccatctaaccacactgtcttcggcgctgacatggccattctggctggtgatgccctcttcccactcggcttccagcacattgtctctctcacccctcctcaccttgttccccgatccaccatcctccgtctcatctccgagattgcccgcaccgtcggctccaccggcatggctgcagggcagtacgttgacctcgaaggaggcccctttcctatttcctttgctcaggagaagaaattcggagccatgggggagtgctcagccgtctgtggaggtctcttgggtggtgccactgacgatgagcttcagagtctcagattgtacggcagagctgttgggatgctgtatcaggtggtggatgacatcagagacgacgacaagacgaagaagaagaagagctatgcgggagtctttggttcagagagggcaatggaaatggcagatgagcttagtgtaaaggccaagaaggagctgcaagtgtttgacaactatggagacgcatcggttgctcctctctacagtttcgttgactacgctgctcaccgagacttccttcttcatgtctga

SEQ ID NO: 57650 - protein, 321 aa, Brassica napus
MLLSASATPLRFGGHVPEKPCRMRMKQAIRSSSSNNFDLRTYWTTLITEINQKLDEAIPVKYPAGIYEAMRYSVLAKGAKRAPPVMCVAACELFGGDRLAAFPTACALEMVHAASLIHDDLPCMDDDPVRRGKPSNHTVFGADMAILAGDALFPLGFQHIVSLTPPHLVPRSTILRLISEIARTVGSTGMAAGQYVDLEGGPFPISFAQEKKFGAMGECSAVCGGLLGGATDDELQSLRLYGRAVGMLYQVVDDIRDDDKTKKKKSYAGVFGSERAMEMADELSVKAKKELQVFDNYGDASVAPLYSFVDYAAHRDFLLHV

SEQ ID NO: 57651 - DNA, 1053 bp, Glycine max
  CDS (1)..(1053)
atgagtgccctcaatttgaacgcatggccacgccccagatccagatccagatcccgatccccaacctttcacgccgtcaataagttacccttcttcaccgttaccaaacggagagcattctcgctctctgcggtgctcacggtcgagacggaagagaagccaccaatcttcgacttcaagaactacatgctttccaaagcgtccgcggtcaacaaggccctcgacgactccgtttcgctccgcgagcccaagaagatccacgaggcgatgcggtactcgctcctcgccggcggcaagcgcgtgcgccctgtgttatgcgtggcggcgtgcgagctcgtcggcgggcacgaggccacggcgatgcccgccgcctgcgccctcgagatgatccacaccatgtcgctcatccacgacgacctcccctgcatggacaacgacgatctccgccgcggcaagcccaccaaccacacggtcttcggcgaggacgtcgccgtcctcgccggcgacgccctcctggccttcgccttcgagcacatcgccgcctccacccggggggcctcggcgccccggatcctccgcgcgatcggcgagctcgcgcggtcgatcggctccgagggcctcgttgccggccaggtcgtcgacatcaactctgagggcctggccgacgttggcctagagcgcctggagttcatccacgtccacaagaccgccgcgctcctcgagggtgcggttgtcctcggcgccatcctcggcggcggcaccgacgacgaggtcgaaaaattgagaaaattcgctcgctacattggtctactctttcaggttgttgatgacattctcgatgttactaagtcttcccaggaattgggaaagaccgctggaaaagaccttgtggctgataaggttacttaccccaagcttttggggattgagaagtctaaggagtttgctgcgaaactgaacaaggatgctcaggatcagcttgctggctttgaccctgttaaggctgctcctttgattgctttagccaattacattgcttataggcagaactag

SEQ ID NO: 57652 - protein, 350 aa, Glycine max
MSALNLNAWPRPRSRSRSRSPTFHAVNKLPFFTVTKRRAFSLSAVLTVETEEKPPIFDFKNYMLSKASAVNKALDDSVSLREPKKIHEAMRYSLLAGGKRVRPVLCVAACELVGGHEATAMPAACALEMIHTMSLIHDDLPCMDNDDLRRGKPTNHTVFGEDVAVLAGDALLAFAFEHIAASTRGASAPRILRAIGELARSIGSEGLVAGQVVDINSEGLADVGLERLEFIHVHKTAALLEGAVVLGAILGGGTDDEVEKLRKFARYIGLLFQVVDDILDVTKSSQELGKTAGKDLVADKVTYPKLLGIEKSKEFAAKLNKDAQDQLAGFDPVKAAPLIALANYIAYRQN

SEQ ID NO: 57653 - DNA, 1287 bp, Zea mays
  CDS (1)..(1287)
atgtcctggcggtggactctcgcgcgccgcgtcgccacgctggccgcgatcggtggcggcggtgcccaggcgcagaggctcctgtccacctcgtcagccggcggtggcactggcctcctgggtcggcactacatacccctcgcctcccagattcggagcaaggtagttggttgcagaggagctgctcttgtgagctccagatggttgcatgaggcccaataccaggttcgccaggacggggcttccagggctcaggaacagcaagatccatttgaattagtcgccgatgagctatcacttcttgcaaataggttacgatccatggtggctgctgaggtccccaaactggcatcagcagctgagtactttttcaaggtgggagcagagggaaaaagattccgacctacggttttgttgctcatggcatcagctctgaaatttcctttgtcagagtcaacagaaggaagagttctcagtatattggcagataaactccgcacaaggcaacagaacattgctgagataactgaaatgattcatgtcgcaagccttctgcatgatgatgttcttgatgatgctgatactaggcgtggtgtcagttcattgaatctcatcatggggaacaagctttctgtgctggctggtgatttccttctgtctagagcatgtgtggcccttgcagcacttgggaacacagaggtggtttctctaatggcaactgctgtagaacatctagttactggtgaaactatgcagatctcaacaagcagagagcaacggcgaagcatggagtactacctgcagaagacatactacaaaacggcatcattgatatcaaatagttgcaaggctgttgctattcttgcagggcacacaactgaggtctcggtgcttgcatatgaatatggtcgaaacctgggtctagccttccagttaattgatgatgttcttgatttcaccggcacctctgcatcccttgggaagggttcattgtctgatattcgccacggaattattactgccccgatgctatatgcgatggaggaattcccacaactgcaagaagttgttgaccggggttttgataatcctgcaaatgttgaaattgcccttgactatctccagaagagccgtgggattgaaaagacaaaagagcttgcacgagaacatgctgatcgtgcagtcaaggctatagaatctctacctgatagcgacgacgaggatgttctgacttcaaggcgtgctcttattgatatcacagaaagagtcatcacacggacaaaatag

SEQ ID NO: 57654 - protein, 428 aa, Zea mays
MSWRWTLARRVATLAAIGGGGAQAQRLLSTSSAGGGTGLLGRHYIPLASQIRSKVVGCRGAALVSSRWLHEAQYQVRQDGASRAQEQQDPFELVADELSLLANRLRSMVAAEVPKLASAAEYFFKVGAEGKRFRPTVLLLMASALKFPLSESTEGRVLSILADKLRTRQQNIAEITEMIHVASLLHDDVLDDADTRRGVSSLNLIMGNKLSVLAGDFLLSRACVALAALGNTEVVSLMATAVEHLVTGETMQISTSREQRRSMEYYLQKTYYKTASLISNSCKAVAILAGHTTEVSVLAYEYGRNLGLAFQLIDDVLDFTGTSASLGKGSLSDIRHGIITAPMLYAMEEFPQLQEVVDRGFDNPANVEIALDYLQKSRGIEKTKELAREHADRAVKAIESLPDSDDEDVLTSRRALIDITERVITRTK

SEQ ID NO: 57655 - DNA, 20 bp, Artificial sequence
  primer
atggttgcccaacaaacacg

SEQ ID NO: 57656 - DNA, 27 bp, Artificial sequence
  primer
ttaatattttctggcaacaatatattc

SEQ ID NO: 57657 - protein, 394 aa, Artificial sequence
  consensus sequence
  Variant (2)..(16): Xaa in position 2 to 16 is any amino acid
  Variant (17)..(31): Xaa in position 17 to 31 is any or no amino acid
  Variant (33)..(35): Xaa in position 33 to 35 is any amino acid
  Variant (36)..(37): Xaa in position 36 to 37 is any or no amino acid
  Variant (42)..(42): Xaa in position 42 is any amino acid
  Variant (45)..(45): Xaa in position 45 is any amino acid
  Variant (47)..(55): Xaa in position 47 to 55 is any amino acid
  Variant (56)..(81): Xaa in position 56 to 81 is any or no amino acid
  Variant (83)..(83): Xaa in position 83 is any amino acid
  Variant (85)..(85): Xaa in position 85 is any amino acid
  Variant (87)..(87): Xaa in position 87 is any amino acid
  Variant (90)..(91): Xaa in position 90 to 91 is any amino acid
  Variant (94)..(94): Xaa in position 94 is any amino acid
  Variant (98)..(98): Xaa in position 98 is any amino acid
  Variant (100)..(100): Xaa in position 100 is any amino acid
  Variant (103)..(103): Xaa in position 103 is any amino acid
  Variant (105)..(106): Xaa in position 105 to 106 is any amino acid
  Variant (110)..(110): Xaa in position 110 is any amino acid
  Variant (113)..(113): Xaa in position 113 is any amino acid
  Variant (114)..(129): Xaa in position 114 to 129 is any or no amino acid
  Variant (131)..(137): Xaa in position 131 to 137 is any amino acid
  Variant (139)..(139): Xaa in position 139 is any amino acid
  Variant (144)..(144): Xaa in position 144 is any amino acid
  Variant (146)..(148): Xaa in position 146 to 148 is any amino acid
  Variant (150)..(150): Xaa in position 150 is any amino acid
  Variant (152)..(167): Xaa in position 152 to 167 is any amino acid
  Variant (168)..(184): Xaa in position 168 to 184 is any or no amino acid
  Variant (186)..(186): Xaa in position 186 is any amino acid
  Variant (187)..(188): Xaa in position 187 to 188 is any or no amino acid
  Variant (190)..(192): Xaa in position 190 to 192 is any amino acid
  Variant (195)..(196): Xaa in position 195 to 196 is any amino acid
  Variant (198)..(210): Xaa in position 198 to 210 is any amino acid
  Variant (211)..(226): Xaa in position 211 to 226 is any or no amino acid
  Variant (229)..(230): Xaa in position 229 to 230 is any amino acid
  Variant (232)..(238): Xaa in position 232 to 238 is any amino acid
  Variant (240)..(257): Xaa in position 240 to 257 is any amino acid
  Variant (258)..(264): Xaa in position 258 to 264 is any or no amino acid
  Variant (267)..(267): Xaa in position 267 is any amino acid
  Variant (270)..(271): Xaa in position 270 to 271 is any amino acid
  Variant (274)..(274): Xaa in position 274 is any amino acid
  Variant (277)..(277): Xaa in position 277 is any amino acid
  Variant (278)..(284): Xaa in position 278 to 284 is any or no amino acid
  Variant (287)..(287): Xaa in position 287 is any amino acid
  Variant (288)..(288): Xaa in position 288 is any or no amino acid
  Variant (290)..(290): Xaa in position 290 is any amino acid
  Variant (292)..(292): Xaa in position 292 is any amino acid
  Variant (293)..(295): Xaa in position 293 to 295 is any or no amino acid
  Variant (297)..(297): Xaa in position 297 is any amino acid
  Variant (299)..(301): Xaa in position 299 to 301 is any amino acid
  Variant (302)..(303): Xaa in position 302 to 303 is any or no amino acid
  Variant (305)..(314): Xaa in position 305 to 314 is any amino acid
  Variant (315)..(336): Xaa in position 315 to 336 is any or no amino acid
  Variant (338)..(339): Xaa in position 338 to 339 is any amino acid
  Variant (340)..(340): Xaa in position 340 is any or no amino acid
  Variant (342)..(345): Xaa in position 342 to 345 is any amino acid
  Variant (346)..(383): Xaa in position 346 to 383 is any or no amino acid
  Variant (385)..(390): Xaa in position 385 to 390 is any amino acid
  Variant (391)..(393): Xaa in position 391 to 393 is any or no amino acid
LXXXXXXXXXXXXXXXXXXXXXXXXXXXXXXYXXXXXGGKRXRPXLXXXXXXXXXXXXXXXXXXXXXXXXXXXXXXXXXXXAXAXEXIHXXSLXHDDXPXMDXDXXRRGXPTXXXXXXXXXXXXXXXXXHXXXXXXXAXLAGDXLXXXAXFXXXXXXXXXXXXXXXXXXXXXXXXXXXXXXXXXGXXXGXXXGQXXDXXXXXXXXXXXXXXXXXXXXXXXXXXXXXKTXXLXXXXXXXGXXXXXXXXXXXXXXXXXXXXXXXXXGLXFQXXDDXLDXXXXXXXXGKXXGXDXXXXKXTXXXXXGXXXXXXXXXXXXXXXXXXXXXXXXXXXXXXXXAXXXLXXXXXXXXXXXXXXXXXXXXXXXXXXXXXXXXXXXXXXXXXXLXXXXXXXXXR

SEQ ID NO: 57658 - protein, 15 aa, Artificial sequence
  protein pattern
  Variant (2)..(2): Xaa in position 2 is any amino acid
  Variant (3)..(3): Xaa in position 3 is Ile, Leu or Val
  Variant (5)..(5): Xaa in position 5 is Ala, Cys, Ser, Thr or Val
  Variant (6)..(6): Xaa in position 6 is any amino acid
  Variant (9)..(9): Xaa in position 9 is Ile, Met or Val
  Variant (13)..(13): Xaa in position 13 is Leu or Met
  Variant (15)..(15): Xaa in position 15 is Ala, Cys or Ser
EXXHXXSLXHDDXPX

SEQ ID NO: 57659 - protein, 13 aa, Artificial sequence
  protein pattern
  Variant (2)..(2): Xaa in position 2 is Asp or Asn
  Variant (4)..(5): Xaa in position 4 to 5 is any amino acid
  Variant (9)..(10): Xaa in position 9 to 10 is any amino acid
  Variant (11)..(11): Xaa in position 11 is Ala, Ser or Thr
  Variant (12)..(12): Xaa in position 12 is any amino acid
DXDXXRRGXXXXH

SEQ ID NO: 57660 - protein, 12 aa, Artificial sequence
  protein pattern
  Variant (2)..(2): Xaa in position 2 is Ile, Leu or Val
  Variant (3)..(3): Xaa in position 3 is any amino acid
  Variant (6)..(6): Xaa in position 6 is Ile, Leu, Met or Val
  Variant (7)..(7): Xaa in position 7 is any amino acid
  Variant (10)..(10): Xaa in position 10 is Ile, Leu or Val
GXXFQXXDDXLD

SEQ ID NO: 57661 - protein, 7 aa, Artificial sequence
  protein pattern
  Variant (5)..(5): Xaa in position 5 is Ile, Leu, Met or Val
GGKRXRP

SEQ ID NO: 57662 - protein, 16 aa, Artificial sequence
  protein pattern
  Variant (2)..(2): Xaa in position 2 is Ile, Leu or Val
  Variant (4)..(4): Xaa in position 4 is Ala, Ser, Thr or Val
  Variant (7)..(7): Xaa in position 7 is any amino acid
  Variant (9)..(15): Xaa in position 9 to 15 is any or no amino acid
AXLXGDXLXXXXXXXL

SEQ ID NO: 57663 - DNA, 900 bp, Synechocystis sp.
  CDS (1)..(900): transl_table=11
atgcagtctcccctctccctctgtctttttgctcccgaacacgttgcccatagactcaggtctattttccagggcgatcgccattacctatcgacttttcaagcactagatgatttttgtgcctttctagaagacaaacctgagcggattgattgcctgttagtctattacgaagctaattcccttccagtgctgaatcgtctctatgaacaggggcgattgttgccgattattttgctcgaacccagtccttctgccctagccaaaaccaccgacgaacaccccaccattgtctatcacaacgctgaaattcatctgcccgaatcccaatggtcggaactgcccaccgtcgtagaccgggcgatcgcccattacctacaccttggccccatctgtaccctccccaaccaaacggaaactatccccgccccgattgtcgatgaatcatcccaaagctttttactcctacaacaaagaaggctggctgacaaacttaaagaaagactcggttacctaggagtgtactacaaacgtaagcccagtcacttttaccgcaacttttccccccaggaaaaacaagaatacctagaagatttaagctcccaatatcgagagattattctcagttattttagtgacgaaggcacagttaatgacctgttagatcaatttgttaatcaggctttctttgccgacctagccatttctcaaatcctggaaattcacatggaattaatggatgaattttcccagcatctaaagctagaagggcggagcgaagaagtcctcctagactatcgtttagtgttgatcgacatcctcgcccatctgggggaaatgtatcgccgttccatcccccgggaggacattccctttgatgtatattatcagacggattaa

SEQ ID NO: 57664 - protein, 299 aa, Synechocystis sp.
MQSPLSLCLFAPEHVAHRLRSIFQGDRHYLSTFQALDDFCAFLEDKPERIDCLLVYYEANSLPVLNRLYEQGRLLPIILLEPSPSALAKTTDEHPTIVYHNAEIHLPESQWSELPTVVDRAIAHYLHLGPICTLPNQTETIPAPIVDESSQSFLLLQQRRLADKLKERLGYLGVYYKRKPSHFYRNFSPQEKQEYLEDLSSQYREIILSYFSDEGTVNDLLDQFVNQAFFADLAISQILEIHMELMDEFSQHLKLEGRSEEVLLDYRLVLIDILAHLGEMYRRSIPREDIPFDVYYQTD

SEQ ID NO: 57665 - DNA, 978 bp, Trichodesmium erythraeum IMS101
  CDS (1)..(978): transl_table=11
atgaagatttctcggattacagattctcaaatcaacccagacttacctactgtacctaaaactttgtctactaaactatttatttgtatatatttacatgatgataaatttgccacttcagtaaccaagttactgagtcaagatcgctaccttgtggcattgaccaaatctgatcgagaatttgtccagcttattgaggagaatactaatatagattgtctcctcttccaagaggatcctgaactaacttctttgatacataagttacaccatagatctattttattacctgctgttattattaaaaaatctgaatcagaaaattctctggaaaatcagcagttaactgacactgataataattttactgaatatactacacagcataattatcaaccctttatttaccatcaagcagaagcttcattattaatcaatcaactaggcaaaatagatttttatgttgagcaagcaattcaaaaatttctcaaactttctcctgctagttcctcaaaagataaatctcaaatatctagtcaagccactgatgattatactaaaaatatacttcatcaacagcaacacagattatatgcaaaattaagggaaagattaggatacctaggtgtgtattacaaaaggaatcccacaaattttattaggaatatggctccaggggagcgtgataagtttgtagaccaacttaagctagaatatcgtcatattgttctcaaatatttttctcaggataattctctaaacaataatatagatgactttgttaacctatgttttttctcagatattcctgtaacacaagttgtggaaattcacatggatttaatggatgaatttgctatacaactaaggttggaaggacgtagtgaggaaatgttattggactatagattaactcttatagatacaatagcacacttatgtgaaatgtatcgacgttctattcctagagaatcttga

SEQ ID NO: 57666 - protein, 325 aa, Trichodesmium erythraeum IMS101
MKISRITDSQINPDLPTVPKTLSTKLFICIYLHDDKFATSVTKLLSQDRYLVALTKSDREFVQLIEENTNIDCLLFQEDPELTSLIHKLHHRSILLPAVIIKKSESENSLENQQLTDTDNNFTEYTTQHNYQPFIYHQAEASLLINQLGKIDFYVEQAIQKFLKLSPASSSKDKSQISSQATDDYTKNILHQQQHRLYAKLRERLGYLGVYYKRNPTNFIRNMAPGERDKFVDQLKLEYRHIVLKYFSQDNSLNNNIDDFVNLCFFSDIPVTQVVEIHMDLMDEFAIQLRLEGRSEEMLLDYRLTLIDTIAHLCEMYRRSIPRES

SEQ ID NO: 57667 - DNA, 987 bp, Synechococcus sp. CC9311
  CDS (1)..(987): transl_table=11
ttggcctgtgccgcaatcgaaagacaaacaaagatcttcgaccttcgtgctctctttcgtcaagattcaattgcacacttttcgttttggatgaccaggccggcactcacgatcgcgttcttgttgaggtcgcctgagctcgaatcggcttgctgtcagtggttgccaggcaatcgctatacccctgtagatcttggactggaggactcagcggtcgatgttgtctctgctttggaacgacaacgtgaggctgttgatgcagttgtgattgagcaatcactcctgcaagagcagatacgggaagacttgttggctcgcggtttgctgtttccagctgttgtcgtgggcgaattgatggggcgtgtcgattaccaccccgaagaagttcaccttcccggcgatcagcttgagcagcttggttacaacgttgacgcagcgatttcacgctttcttcgtcacgggcagaaagatattcgccctgaagacggatcctctgaatcagatcaggttggcgggcagcctgagggaagtgcttggaagttgtcgagccgcttgcaggagaggcttggctatctaggagtcttttacaagcgagatccttcgcgatttttggccaatcttccgccgaatgaacagcgcgagttgcttcagtccttgcagcgcacctatcgagatctattgattggttatttccgtgaccctgctgctgccaaccaggctctagagagttttgtgaacaccgctttttttggcgacttgcccattacccaaaccgttgagatccatatgaatctgattgacgacttttggaaacaactcagacttgaagggcataaagacgacttccttcaggattaccgccttgcactgctggatgtcatggctcacctctgtgaaatgtaccgacggtcagtccctggagatattcccttagttcctgccgggtctcaacgacgtcagctacagaattcggaggtgtccttatga

SEQ ID NO: 57668 - protein, 328 aa, Synechococcus sp. CC9311
MACAAIERQTKIFDLRALFRQDSIAHFSFWMTRPALTIAFLLRSPELESACCQWLPGNRYTPVDLGLEDSAVDVVSALERQREAVDAVVIEQSLLQEQIREDLLARGLLFPAVVVGELMGRVDYHPEEVHLPGDQLEQLGYNVDAAISRFLRHGQKDIRPEDGSSESDQVGGQPEGSAWKLSSRLQERLGYLGVFYKRDPSRFLANLPPNEQRELLQSLQRTYRDLLIGYFRDPAAANQALESFVNTAFFGDLPITQTVEIHMNLIDDFWKQLRLEGHKDDFLQDYRLALLDVMAHLCEMYRRSVPGDIPLVPAGSQRRQLQNSEVSL

SEQ ID NO: 57669 - DNA, 930 bp, Crocosphaera watsonii WH 8501
  CDS (1)..(930): transl_table=11
ttgtgtttatctatccacagaccattgcagacgcgactatccatttgtctttgtagcagtgataaacctttcactcagttattggccaatcatctgagtggcgatcgctatcgtctacatatcatcgatcaagtagaagagttaatacctttcttaaaggctcatagtgaaactatagattgtttaattgtcagagaggaagcatctattctgcccttattcaaccaactgtatgaaagaggaaccctcttaccagttattattgtcgagaagggggaagatccatccatagctttggctaatgtagaatcacccacttttctctaccatagtgctgaggtgcgtcatggggtgagccagttgggggatgttcagatgactattgatcgtgccatcaccaagtttttgcacttggggcctagttgttgtcttgctgatcgctccctgtctgctcaaggagatattgatacagaaaaacatcagagttttttactgttacaacagcgtcgtctagcggaaaaactcaaagaaagattaggttatttaggagtatattataagcgaaatcctcaatatttttatcgcaatctttccccagaagataaacaagccttactgaaagaattaatgactaattatcgagagataattttaaattattttggcgaagatgccgacattaatcaagctattgatcaatttgtcaatcaagctttctttgctgatatttctgtgtcccgtgtcttagaactgcacatggaactgatggacgaattctcacaacaactcaaattagaaggacgcagtgaagaaattctgctagactatcgcctaaccattattgacattttggcccatttgggagaaatgtatcgtcgttgcattcctagaggagatttactttttgatttattaaatcaaatggattaa

SEQ ID NO: 57670 - protein, 309 aa, Crocosphaera watsonii WH 8501
MCLSIHRPLQTRLSICLCSSDKPFTQLLANHLSGDRYRLHIIDQVEELIPFLKAHSETIDCLIVREEASILPLFNQLYERGTLLPVIIVEKGEDPSIALANVESPTFLYHSAEVRHGVSQLGDVQMTIDRAITKFLHLGPSCCLADRSLSAQGDIDTEKHQSFLLLQQRRLAEKLKERLGYLGVYYKRNPQYFYRNLSPEDKQALLKELMTNYREIILNYFGEDADINQAIDQFVNQAFFADISVSRVLELHMELMDEFSQQLKLEGRSEEILLDYRLTIIDILAHLGEMYRRCIPRGDLLFDLLNQMD

SEQ ID NO: 57671 - DNA, 888 bp, Synechococcus sp. WH 5701
  CDS (1)..(888): transl_table=11
atgacccagccggcgctcaccgtggcctcgctgatccgcgatgagcagctgcgccaggcctgcagcacctggttgccccagggacgctatgagttgatggagctgggtctgcagcaggatcccgccgccgagctggagcgctgctgggaacagtttgatgcggttctgctggagcccggagtgctctcgatcgaggctttccagcgcctgcgggcccagggccggatcctgccggcggtggtgctgggccagctcagcgggccgatggagtttttccaggacgaagtgcatctccctcctgatcagatggagcagctcagctacagtcttgatgcagccatttcccgctgtcttcgccgcagaagttcaagcggatcgggggggggcctcgaggccagtgattcccatgctggggagagtgatcagtcgaactggaggttgccccaccgcctgcgcgagaggcttggctaccttggaattttctacaagcgtgattcctcccgctttctgcgcaatctctctgcggctgagcgaaaggtgctgctgcgctccctgcagcgaacataccgagacctgctgatcagctattttcgagatccagcagctgccaatcaggccctggaaagtttcgtgaatacggcattcttcagcgatcttcccatcactaaaacagtggaaatccacgtggacatgatcgacgaattctggaaaaaactacaacttgaaggtcacaagcaggatttcctcaaggactatcgtttggccttgcttgatgtcatggcccacctctgcgaaatgtatcgacgctcactccctccggaggtcacggacaagcccagcgaaggaatggtcgccaagatcatcaccgcatcccaggtgcaatcatga

SEQ ID NO: 57672 - protein, 295 aa, Synechococcus sp. WH 5701
MTQPALTVASLIRDEQLRQACSTWLPQGRYELMELGLQQDPAAELERCWEQFDAVLLEPGVLSIEAFQRLRAQGRILPAVVLGQLSGPMEFFQDEVHLPPDQMEQLSYSLDAAISRCLRRRSSSGSGGGLEASDSHAGESDQSNWRLPHRLRERLGYLGIFYKRDSSRFLRNLSAAERKVLLRSLQRTYRDLLISYFRDPAAANQALESFVNTAFFSDLPITKTVEIHVDMIDEFWKKLQLEGHKQDFLKDYRLALLDVMAHLCEMYRRSLPPEVTDKPSEGMVAKIITASQVQS

SEQ ID NO: 57673 - DNA, 21 bp, Artificial sequence
  primer
atgcagtctcccctctccctc

SEQ ID NO: 57674 - DNA, 21 bp, Artificial sequence
  primer
ttaatccgtctgataatatac

SEQ ID NO: 57675 - protein, 302 aa, Artificial sequence
  consensus sequence
  Variant (2)..(18): Xaa in position 2 to 18 is any amino acid
  Variant (19)..(19): Xaa in position 19 is any or no amino acid
  Variant (21)..(23): Xaa in position 21 to 23 is any amino acid
  Variant (26)..(39): Xaa in position 26 to 39 is any amino acid
  Variant (40)..(42): Xaa in position 40 to 42 is any or no amino acid
  Variant (45)..(47): Xaa in position 45 to 47 is any amino acid
  Variant (49)..(49): Xaa in position 49 is any amino acid
  Variant (50)..(50): Xaa in position 50 is any or no amino acid
  Variant (52)..(67): Xaa in position 52 to 67 is any amino acid
  Variant (69)..(71): Xaa in position 69 to 71 is any amino acid
  Variant (73)..(73): Xaa in position 73 is any amino acid
  Variant (77)..(88): Xaa in position 77 to 88 is any amino acid
  Variant (89)..(114): Xaa in position 89 to 114 is any or no amino acid
  Variant (117)..(118): Xaa in position 117 to 118 is any amino acid
  Variant (120)..(121): Xaa in position 120 to 121 is any amino acid
  Variant (123)..(125): Xaa in position 123 to 125 is any amino acid
  Variant (127)..(134): Xaa in position 127 to 134 is any amino acid
  Variant (136)..(136): Xaa in position 136 is any amino acid
  Variant (139)..(141): Xaa in position 139 to 141 is any amino acid
  Variant (143)..(169): Xaa in position 143 to 169 is any amino acid
  Variant (170)..(175): Xaa in position 170 to 175 is any or no amino acid
  Variant (178)..(180): Xaa in position 178 to 180 is any amino acid
  Variant (182)..(182): Xaa in position 182 is any amino acid
  Variant (191)..(191): Xaa in position 191 is any amino acid
  Variant (195)..(195): Xaa in position 195 is any amino acid
  Variant (197)..(198): Xaa in position 197 to 198 is any amino acid
  Variant (200)..(200): Xaa in position 200 is any amino acid
  Variant (203)..(204): Xaa in position 203 to 204 is any amino acid
  Variant (206)..(206): Xaa in position 206 is any amino acid
  Variant (208)..(211): Xaa in position 208 to 211 is any amino acid
  Variant (213)..(214): Xaa in position 213 to 214 is any amino acid
  Variant (216)..(218): Xaa in position 216 to 218 is any amino acid
  Variant (221)..(225): Xaa in position 221 to 225 is any amino acid
  Variant (228)..(233): Xaa in position 228 to 233 is any amino acid
  Variant (235)..(239): Xaa in position 235 to 239 is any amino acid
  Variant (243)..(243): Xaa in position 243 is any amino acid
  Variant (247)..(247): Xaa in position 247 is any amino acid
  Variant (249)..(255): Xaa in position 249 to 255 is any amino acid
  Variant (260)..(260): Xaa in position 260 is any amino acid
  Variant (262)..(262): Xaa in position 262 is any amino acid
  Variant (266)..(268): Xaa in position 266 to 268 is any amino acid
  Variant (270)..(270): Xaa in position 270 is any amino acid
  Variant (274)..(278): Xaa in position 274 to 278 is any amino acid
  Variant (280)..(280): Xaa in position 280 is any amino acid
  Variant (285)..(285): Xaa in position 285 is any amino acid
  Variant (287)..(287): Xaa in position 287 is any amino acid
  Variant (289)..(290): Xaa in position 289 to 290 is any amino acid
  Variant (294)..(294): Xaa in position 294 is any amino acid
  Variant (301)..(301): Xaa in position 301 is any amino acid
LXXXXXXXXXXXXXXXXXXLXXXRYXXXXXXXXXXXXXXXXXLEXXXEXXDXXXXXXXXXXXXXXXXLXXXGXLLPXXXXXXXXXXXXXXXXXXXXXXXXXXXXXXXXXXXXXXYHXXEXXLXXXQXXXXXXXXDXAIXXXLXXXXXXXXXXXXXXXXXXXXXXXXXXXXXXXXXRLXXXLXERLGYLGVXYKRXPXXFXRNXXPXEXXXXLXXLXXXYRXXXXXYFXXXXXXNXXXXXFVNXAFFXDXXXXXXXEIHMXLXDEFXXXLXLEGXXXXXLXDYRLXLXDXXAHLXEMYRRSXP

SEQ ID NO: 57676 - protein, 60 aa, Artificial sequence
  protein pattern
  Variant (4)..(4): Xaa in position 4 is Gln or Thr
  Variant (8)..(8): Xaa in position 8 is Ala, Gly or Ser
  Variant (10)..(10): Xaa in position 10 is Ile or Leu
  Variant (11)..(11): Xaa in position 11 is Ala, Pro or Ser
  Variant (12)..(12): Xaa in position 12 is Ile or Val
  Variant (13)..(13): Xaa in position 13 is Ser or Thr
  Variant (14)..(15): Xaa in position 14 to 15 is any amino acid
  Variant (16)..(16): Xaa in position 16 is Leu or Val
  Variant (18)..(18): Xaa in position 18 is Ile or Leu
  Variant (20)..(20): Xaa in position 20 is Met or Val
  Variant (21)..(21): Xaa in position 21 is Asp, Glu or Asn
  Variant (22)..(22): Xaa in position 22 is Leu or Met
  Variant (23)..(23): Xaa in position 23 is Ile or Met
  Variant (25)..(25): Xaa in position 25 is Asp or Glu
  Variant (27)..(29): Xaa in position 27 to 29 is any amino acid
  Variant (31)..(31): Xaa in position 31 is any amino acid
  Variant (35)..(35): Xaa in position 35 is His or Arg
  Variant (36)..(36): Xaa in position 36 is any amino acid
  Variant (37)..(37): Xaa in position 37 is Asp, Glu or Gln
  Variant (38)..(38): Xaa in position 38 is Asp or Glu
  Variant (39)..(39): Xaa in position 39 is Phe, Ile or Val
  Variant (41)..(41): Xaa in position 41 is any amino acid
  Variant (46)..(46): Xaa in position 46 is Ala, Thr or Val
  Variant (47)..(48): Xaa in position 47 to 48 is Ile or Leu
  Variant (50)..(50): Xaa in position 50 is Ile or Val
  Variant (51)..(51): Xaa in position 51 is Leu or Met
  Variant (55)..(55): Xaa in position 55 is Cys or Gly
FVNXAFFXDXXXXXXXEXHXXXXDXFXXXLXLEGXXXXXLXDYRLXXXDXXAHLXEMYRR

SEQ ID NO: 57677 - protein, 59 aa, Artificial sequence
  protein pattern
  Variant (3)..(3): Xaa in position 3 is any amino acid
  Variant (4)..(7): Xaa in position 4 to 7 is any or no amino acid
  Variant (16)..(16): Xaa in position 16 is Phe or Tyr
  Variant (20)..(20): Xaa in position 20 is any amino acid
  Variant (22)..(22): Xaa in position 22 is Gln, Ser or Thr
  Variant (23)..(23): Xaa in position 23 is any amino acid
  Variant (25)..(26): Xaa in position 25 to 26 is any amino acid
  Variant (28)..(28): Xaa in position 28 is Phe, Leu or Met
  Variant (29)..(29): Xaa in position 29 is Ala, Pro or Ser
  Variant (31)..(31): Xaa in position 31 is Glu, Gly, Asn or Gln
  Variant (32)..(32): Xaa in position 32 is Asp or Glu
  Variant (33)..(33): Xaa in position 33 is any amino acid
  Variant (34)..(34): Xaa in position 34 is Asp, Gln or Arg
  Variant (35)..(36): Xaa in position 35 to 36 is any amino acid
  Variant (37)..(37): Xaa in position 37 is Leu or Val
  Variant (38)..(38): Xaa in position 38 is any amino acid
  Variant (39)..(39): Xaa in position 39 is Asp, Glu, Gln or Ser
  Variant (41)..(42): Xaa in position 41 to 42 is any amino acid
  Variant (43)..(43): Xaa in position 43 is Glu, Asn, Gln or Thr
  Variant (46)..(46): Xaa in position 46 is Asp, Glu or His
  Variant (47)..(47): Xaa in position 47 is Ile or Leu
  Variant (48)..(48): Xaa in position 48 is Ile, Leu or Val
  Variant (49)..(49): Xaa in position 49 is Ile or Leu
  Variant (50)..(50): Xaa in position 50 is any amino acid
  Variant (53)..(53): Xaa in position 53 is any amino acid
  Variant (54)..(54): Xaa in position 54 is Asp, Glu or Gln
  Variant (55)..(55): Xaa in position 55 is Asp, Glu or Pro
  Variant (56)..(56): Xaa in position 56 is Ala, Gly or Asn
  Variant (57)..(57): Xaa in position 57 is Ala, Asp, Ser or Thr
  Variant (58)..(58): Xaa in position 58 is Ala, Ile, Leu or Val
KLXXXXXERLGYLGVXYKRXPXXFXXNXXPXXXXXXXXXLXXXYRXXXXXYFXXXXXXN

SEQ ID NO: 57678 - protein, 30 aa, Artificial sequence
  protein pattern
  Variant (2)..(2): Xaa in position 2 is Ile or Val
  Variant (3)..(3): Xaa in position 3 is His or Arg
  Variant (4)..(4): Xaa in position 4 is any amino acid
  Variant (5)..(5): Xaa in position 5 is Gly or Pro
  Variant (6)..(6): Xaa in position 6 is any amino acid
  Variant (7)..(7): Xaa in position 7 is Asp or Ser
  Variant (9)..(9): Xaa in position 9 is any amino acid
  Variant (10)..(10): Xaa in position 10 is Glu, Gly or Ser
  Variant (11)..(11): Xaa in position 11 is Asp, Glu or Gln
  Variant (12)..(12): Xaa in position 12 is Leu or Val
  Variant (13)..(14): Xaa in position 13 to 14 is any amino acid
  Variant (15)..(15): Xaa in position 15 is Asn, Ser, Thr or Val
  Variant (16)..(16): Xaa in position 16 is Ile, Leu or Val
  Variant (18)..(18): Xaa in position 18 is any amino acid
  Variant (21)..(21): Xaa in position 21 is Ala, Ser or Thr
  Variant (22)..(22): Xaa in position 22 is His, Lys or Arg
  Variant (23)..(23): Xaa in position 23 is any amino acid
  Variant (25)..(25): Xaa in position 25 is His or Arg
  Variant (26)..(27): Xaa in position 26 to 27 is any amino acid
  Variant (28)..(28): Xaa in position 28 is Pro, Gln or Ser
  Variant (29)..(29): Xaa in position 29 is any amino acid
  Variant (30)..(30): Xaa in position 30 is Cys, Asp or Ser
EXXXXXXQXXXXXXXXDXAIXXXLXXXXXX

SEQ ID NO: 57679 - DNA, 1416 bp, Synechocystis sp.
  CDS (1)..(1416): transl_table=11
atggtgatacgatcaggcaaaactaatttaaatcctccctgtgctctaatggccccatcctcgtcctgtgattgcataattgtcggctcagggttgtcgggattgatcgcggcccgtaatttatctcgggttaactattctgtcttagttattgaagcccaggaacgcttggggggcagaatgtatggagaatatttgccatcgggacaatggattgaccggggaggccaatgggtgggccctacccaggatcgttttctggccttgcttaatgaatacaacatagaacgttttcccagtcctgctgatggcttaaaggtattgttatttgatgggaaacgttacgagtttgatggtttttttcaaggagtgttccaaggggaagcgccgaaaataagctctgatgaatggaatgatgccatggtggcatgggaaaaatttaatacccttgcccaaagtctggacgagcaacatcccgaagctacgccagaaaacaaaaagttagacagtcaaacctttgccgattggattaaagaaaatacccatacagcattcggccattggtatttttcctatatgtgtcgtgctgtggggtttttaggccccgccgagccttctcaggtatctcttttgcacatcctatggggccataaatctgcctcccaaggggaaaatccagaagcagaactattacatggtggggcgggacaaattcctcaaaaaattgccgctgaattggggaattccatcctcttaggggaaccggtcatacacattgcccaggacgacaaaggggtagaggtgaccactacaacaggaaaatatcagggaaaattcgccattgtggcaaccccgccccatttggccggaagaattacctatagtccccccatgcctcctctccgccagcaactcacccaaagagtacccatgggcacctgctgtaagcttttgatttcctacgatcgccctttttggcgggagaaaggtttagccggtattggcttgggtaacaccacctggatcgaattatgtgctgatagttccgatccaaccacgggagtgggagtaattgcttccttcgtagttggcgatcggtatggaaaatggattgccatgggcgaagcggaacgccgtcaaggagtactgtcagatctggctctgtactttggcgaggaagctttatctcctgagacctacgatgaagttgattggcccagtgaacaatgggttgggggagggtatgccgcctttatgcctcccggagtctggacaagttttggccaagccctgagcgcccctgtaggtcgtattcattgggccgggacggaaatagccccccgctgggctggcttttttgatggtgcaattcgtactggggaagcggcggctaaagccattatcggtctactttaa

SEQ ID NO: 57680 - protein, 471 aa, Synechocystis sp.
MVIRSGKTNLNPPCALMAPSSSCDCIIVGSGLSGLIAARNLSRVNYSVLVIEAQERLGGRMYGEYLPSGQWIDRGGQWVGPTQDRFLALLNEYNIERFPSPADGLKVLLFDGKRYEFDGFFQGVFQGEAPKISSDEWNDAMVAWEKFNTLAQSLDEQHPEATPENKKLDSQTFADWIKENTHTAFGHWYFSYMCRAVGFLGPAEPSQVSLLHILWGHKSASQGENPEAELLHGGAGQIPQKIAAELGNSILLGEPVIHIAQDDKGVEVTTTTGKYQGKFAIVATPPHLAGRITYSPPMPPLRQQLTQRVPMGTCCKLLISYDRPFWREKGLAGIGLGNTTWIELCADSSDPTTGVGVIASFVVGDRYGKWIAMGEAERRQGVLSDLALYFGEEALSPETYDEVDWPSEQWVGGGYAAFMPPGVWTSFGQALSAPVGRIHWAGTEIAPRWAGFFDGAIRTGEAAAKAIIGLL

SEQ ID NO: 57681 - DNA, 1347 bp, Mycobacterium tuberculosis H37Rv
  CDS (1)..(1347): transl_table=11
gtgacaaacccaccgtggactgtcgatgttgtcgtggtgggcgcgggcttcgccgggctggccgcggcccgcgagctgacgcgacagggtcacgaggtgctggtgttcgaaggccgcgatcgggtgggcggccgctcgttaaccggtcgcgtggcaggggtgcccgcggatatgggcggctcgttcatcggcccgacccaagacgccgtgctggcgttggccaccgagctggggatcccgacaaccccgacccaccgcgacggccgaaacgtcatccagtggcggggatcggcacgcagctatcgtggcaccatccccaagctgtcgctgaccgggctcatcgacatcggccggttgcgttggcaattcgagcgaattgcccgcggcgttccggtggccgccccctgggatgcgcggcgcgcgcgtgaactcgacgacgtgtcgctcggggagtggttgcgcttggtgcgcgccacatcgtcctcgcggaacctgatggccatcatgacccgggtgacctggggttgtgagcccgacgatgtctcgatgctgcacgccgcccgctacgtacgcgcggccggcggcctggaccggctgctcgacgtcaaaaatggtgcccagcaggaccgtgtgccgggggggacacagcagatcgcccaggcggccgccgcccaactcggcgcacgcgtcctgctcaacgccgcggtgcgtcgcatcgaccggcacggagcgggtgtgacggtcacgtccgatcagggtcaggccgaggccgggttcgtcatcgtcgccattccaccggcccatcgcgtggccatcgagttcgatcccccgctgccgccggaatatcagcagctcgcccaccattggccgcagggccggctgagcaaggcctacgcggcctattcgacgccgttctggcgggccagcgggtattccggccaggcgctgtccgatgaggcgccggtgttcatcaccttcgacgtcagtccgcacgccgacgggccaggcattctgatggggttcgtcgatgctcgcgggttcgactcgctacccatcgaagagcgccgccgcgatgcattgcgctgctttgcgtcgctgttcggcgacgaagcgctcgacccccttgattatgttgactatcgttggggtacagaggaattcgcgccgggtggtccgaccgcggcggtaccgccggggtcgtggacgaaatacggtcactggttacgtgagccggtcggtccgattcactgggcgagcactgagaccgcggacgaatggaccgggtatttcgacggcgccgtcagatccggtcagcgtgccgccgccgaggtcgccgccctgctatga

SEQ ID NO: 57682 - protein, 448 aa, Mycobacterium tuberculosis H37Rv
MTNPPWTVDVVVVGAGFAGLAAARELTRQGHEVLVFEGRDRVGGRSLTGRVAGVPADMGGSFIGPTQDAVLALATELGIPTTPTHRDGRNVIQWRGSARSYRGTIPKLSLTGLIDIGRLRWQFERIARGVPVAAPWDARRARELDDVSLGEWLRLVRATSSSRNLMAIMTRVTWGCEPDDVSMLHAARYVRAAGGLDRLLDVKNGAQQDRVPGGTQQIAQAAAAQLGARVLLNAAVRRIDRHGAGVTVTSDQGQAEAGFVIVAIPPAHRVAIEFDPPLPPEYQQLAHHWPQGRLSKAYAAYSTPFWRASGYSGQALSDEAPVFITFDVSPHADGPGILMGFVDARGFDSLPIEERRRDALRCFASLFGDEALDPLDYVDYRWGTEEFAPGGPTAAVPPGSWTKYGHWLREPVGPIHWASTETADEWTGYFDGAVRSGQRAAAEVAALL

SEQ ID NO: 57683 - DNA, 1347 bp, Mycobacterium avium subsp. paratuberculosis K-10
  CDS (1)..(1347): transl_table=11
gtgtcagggccgccgcggatcgtcgacgtcgtcgtggtcggcgccggctttgccgggctggccgccgcccgcgagctcaaccggcagggccatgacgtggtggtcttcgagggccgcgaccgggtgggcgggcggtcgttcaccggcagcgtcgccgggctgccggccgatctgggcgggacgttcgtcgggcccacccaggacgcggtgctggcgttggcggccgaactcgaggtgccgaccaccccgacgcaccacgagggcaagaacctgatccactggcgcggctggacgcacgcctaccacggcaccattcccaagctgtccctgaccggcctgctggacatcggccggctgcgctggcagttcgaccggatcgcccgcagcattccgctggcggcgccgtgggaggcccggcgggcggccgaactggacggcctgtcgctgggcggctggctgcgctcggtgcgcgccaccgcctcgtcgcacgcgctgctggcgatggtggcccgggtgacctggggatgtgagcccgacgaggtgtcgatgctgcacgccgcccggtacgcgcacgcggccggcgggctggaccggctgctcgacgtcgaggacggcgcccaacaggaccgcttccccggcggcacccagcagatcgccgcggccgcggccgccgaactgggcgcacgggtggtgctgggcgcgccggtgcgccggatcgagcggcacggtgcgggcgtgaccgtgcgcaccgacctcggcgacaccgaggccgggttcgtcatcgtggccatcccgccggcgcatcgcgccgcgatcgagttcgccccgccgctgcccgccgagtacgagcagctggcccggcactggccgcagggccggctcagcaaggcctacgcggcctattccaccccgttttggcgggccgacggtttctccgggcaggcgctgtcggacgagggcccggttttcatcaccttcgacgtcagcccgcacccggacggcccgggcatcctgatgggtttcgtggacgcccgcgccttcgactcgctgcccgccgaccagcgccgccgcgacgcattgcgttgtttcgcaacgcttttcggcgacgacgcgctcaagcccctcgactatgtcgatcaccgttggggcgctgaggaattcgcgcccggcggacccaccgcggcggtgccgccggggtcgtggacgcggttcgggcggtggctgcgcgaacccgtcgggccgatccactgggccggcaccgaaaccgccgacgagtggaccggattcctcgacggcgccatccgctccggccggcgcgccgccgccgaggttatcgccctgctatga

SEQ ID NO: 57684 - protein, 448 aa, Mycobacterium avium subsp. paratuberculosis K-10
MSGPPRIVDVVVVGAGFAGLAAARELNRQGHDVVVFEGRDRVGGRSFTGSVAGLPADLGGTFVGPTQDAVLALAAELEVPTTPTHHEGKNLIHWRGWTHAYHGTIPKLSLTGLLDIGRLRWQFDRIARSIPLAAPWEARRAAELDGLSLGGWLRSVRATASSHALLAMVARVTWGCEPDEVSMLHAARYAHAAGGLDRLLDVEDGAQQDRFPGGTQQIAAAAAAELGARVVLGAPVRRIERHGAGVTVRTDLGDTEAGFVIVAIPPAHRAAIEFAPPLPAEYEQLARHWPQGRLSKAYAAYSTPFWRADGFSGQALSDEGPVFITFDVSPHPDGPGILMGFVDARAFDSLPADQRRRDALRCFATLFGDDALKPLDYVDHRWGAEEFAPGGPTAAVPPGSWTRFGRWLREPVGPIHWAGTETADEWTGFLDGAIRSGRRAAAEVIALL

SEQ ID NO: 57685 - DNA, 1329 bp, Strongylocentrotus purpuratus
  CDS (1)..(1329)
atggcagagaagagagaccaggagtgtgacgtggtggtagtaggggcggggctgtctggtctgactgcagcttatcgtatccagcagaatgtaccaggatgcaaggttcttgttgttgaggcaaaagatcggatcggtggaagaacgatgactgtggagatgcaaggagcacatggacctgattcgtgggacctcggaggtcagtgggtgtcaagttcacagcaccatgtcctgtggctcctggaagagctcggtatagaacattacccacaattcaacagcgggaagaggcttctacaggcaggcaaggagtttggtataaccgaacatcatgatagcattccctcattaccactactttctcttgtagacctcaacagatttatcacaaatttggatagcgttgctaagtacgtgcccagtgatgagccatggacagcggtcaaagctgatgagtatgataacatgacgctagaacaactggtagaaggctcgacatggacaacagttgccagggacaccatagagacgggttggcaggtggtgagcggtctgaggctacgagagattagcgccctctcgtacatgttctacctcagttcatccggaggactggagaagctggtggagacagccgttggatcagctcaggagcttagaataaagggtggatcgcaaggtattagtcaccaactagcagagaggatagacatctccaacattctgctgtccgaacccgtcgttgccatcgaccaaagccaaccagagaaggtcaaagttcacacacagtctggcaagcatttcacctgcaagcacatcattgtagctgctccccctcactgcacaggatcgatacagtacttaccagatcagcccacaagaagaatacgactgacaacatctatgcacccaggtcatctattcaagtttgttgcaacgtataaaaaggcattttggagagaagctggttactctggtgagatcgtctgtaacggtagctgcgccacggtacccgggtgcaacaaggcacccattcagtacgtccttgacgccaccagctcagagggaaaccccgccctcgtcggcttcattggaaaccccagtctgtggggacaagttagcgttgataccaggaaggcagccatattgaaccacctagcagatttctttggagacgctgcaaagaaacccatagacttcatggaaaaggactgggcattagaaccatataacggaggctgtcccgatacattgggctggcaccgagacagctacccagtggatgggctatctgaacggagccgtccaagcagggttgagggccgctga

SEQ ID NO: 57686 - protein, 442 aa, Strongylocentrotus purpuratus
MAEKRDQECDVVVVGAGLSGLTAAYRIQQNVPGCKVLVVEAKDRIGGRTMTVEMQGAHGPDSWDLGGQWVSSSQHHVLWLLEELGIEHYPQFNSGKRLLQAGKEFGITEHHDSIPSLPLLSLVDLNRFITNLDSVAKYVPSDEPWTAVKADEYDNMTLEQLVEGSTWTTVARDTIETGWQVVSGLRLREISALSYMFYLSSSGGLEKLVETAVGSAQELRIKGGSQGISHQLAERIDISNILLSEPVVAIDQSQPEKVKVHTQSGKHFTCKHIIVAAPPHCTGSIQYLPDQPTRRIRLTTSMHPGHLFKFVATYKKAFWREAGYSGEIVCNGSCATVPGCNKAPIQYVLDATSSEGNPALVGFIGNPSLWGQVSVDTRKAAILNHLADFFGDAAKKPIDFMEKDWALEPYNGGCPDTLGWHRDSYPVDGLSERSRPSRVEGR

SEQ ID NO: 57687 - DNA, 1611 bp, Ustilago maydis 521
  CDS (1)..(1611)
atggcttggaaaagaccagcgtggctgcctggctctggtacttggaatcagtccaagccttgtaccagcaagggtcagtcaacatcgacatccaaagatcgagtttcgcacaaggatcggccgtccgagagcgactcgaccactgtcgcctcacgatgcacagacaccacaacggccaagtctggtgcttggaccaccaagctaacacggacgggcgatgtggatgtgatcatcatcggtgctggcttgtccgggctgatcgcggccgatgagctcgttagagctggcctgggtgttagggtgctcgaggcaaatgaccgcgtcggtggcaggacgctcgatgtgcgtctggatgatggcaacgtggtcgaaatgggcggtcaatggatcggccctggacagaatcagatcctgaagctcatcaaagagctcggtctggatacgcacgacacgtacgatcagggacgcagcatctaccgctccaccgacggcaagatcaagtcgtacaagaacatgattccctgcggtgtgctcgcatcgctcgatcttctcatggccacgcgcaagatcaacagcctatccaaaggtgtacctgcaaagacaccgtgtcaggccaagaatgcgcgatactgggacgaacgatccatcggctgttggatcgatgacgccatgtggacaacagagggcaagcagctctttcgaatggccatcaaagccgtgtatgcggaagactcggaatcgatcagcttcttggaccttcttgccaccgtggcgggtgcaggtggagatatcgagcaagtgttgagcgatgcgcagacgacgcgtatcgttcaaggcccgcaatccatcagtgagcgtcttgcagcgcgtctaccgaagcatacgctccaactcaatcaaaaggtgctcaacatccatcgcgcatccgatcaaggcgcagcattgggccaagacgctttctacgaggtctcgaccgtgcagggactgagtgtcaaggcgcctgttgtcatcatcactccgcctcgaccgttgatctgccagatggacttccagccagctttgccgtccggtctgattcagtactaccgtcgtcaaccgatgggctcagcgatcaagttcaacgtcagctacgcttcgcccttttggcgtgcggctggactgagtggtgccatgatcaacgctgacggtatgagcccggttcagatgacgtatgacaactcgcctgcggacgccaagcagggagtgattgttgcgtttgtgctgggaaacaactctcgtcggtttgtacatcagaacgcagatgctgagacgcgcaagaagattgtgctcgagtttctcgcgagcgtgtttgggtgcgaggcgctcaatgctacccacgtgcacgagatgaactggacgctcgctccttatgccacaggaggctatggctctttcaatcctcccggagtgctcaccagcttcgatgaggacgagcgcgacgaaatgtccaagattggcaacctctactttgctggtgacgccaccagcgagatttggcagggctacatggaaggtgccttgctctccggcaggcgcgtagcttcgcgtatcatttccacttttcagccctaa

SEQ ID NO: 57688 - protein, 536 aa, Ustilago maydis 521
MAWKRPAWLPGSGTWNQSKPCTSKGQSTSTSKDRVSHKDRPSESDSTTVASRCTDTTTAKSGAWTTKLTRTGDVDVIIIGAGLSGLIAADELVRAGLGVRVLEANDRVGGRTLDVRLDDGNVVEMGGQWIGPGQNQILKLIKELGLDTHDTYDQGRSIYRSTDGKIKSYKNMIPCGVLASLDLLMATRKINSLSKGVPAKTPCQAKNARYWDERSIGCWIDDAMWTTEGKQLFRMAIKAVYAEDSESISFLDLLATVAGAGGDIEQVLSDAQTTRIVQGPQSISERLAARLPKHTLQLNQKVLNIHRASDQGAALGQDAFYEVSTVQGLSVKAPVVIITPPRPLICQMDFQPALPSGLIQYYRRQPMGSAIKFNVSYASPFWRAAGLSGAMINADGMSPVQMTYDNSPADAKQGVIVAFVLGNNSRRFVHQNADAETRKKIVLEFLASVFGCEALNATHVHEMNWTLAPYATGGYGSFNPPGVLTSFDEDERDEMSKIGNLYFAGDATSEIWQGYMEGALLSGRRVASRIISTFQP

SEQ ID NO: 57689 - DNA, 1746 bp, Strongylocentrotus purpuratus
  CDS (1)..(1746)
atgtcgagaagctttctgaagcaactctccgttgaaaacttgttggaaaacataaaggaagtagtctctagtaaccaagacgaggatggtaccgactcaccgcaaaagcctcgatcccgaagtttcatcttcggtcgatctttcagtacggacgagaacgacaacaacggccagtccaaactcggacccatcgccccttccatcgttgcaatccaaaaccagtctctgtcgtcgtccctccccgagcttgtctctcacgagcccgagcccgctgtggacgtcgctatcgtgggcgctgggttgtccggtctgacggccgcctaccagatcagacaagcgcaaccggacctcagcttggtcgttctcgaagctaaagaaaatgtgggtggtaggacatattcacccatgctaaatacggccacagggactcgacgattcgacctcggagaccagtgggtcaatacagaccagagaactattcttgaacttctggacaaactgaatttggagacctatccggaatacaaggagggcaagaacatcttgattcatgctgacggagaatcggaagaatttgagggtaatatttaccccatcaaccctttcagacgtttagacatcagttcatttgtatccaggatagagagtatgagggaagacctctctaagaaggaccctacagatctaagcgagtctttggaatgggactccatcactttggaacagttcaagaaagaacacatctggacggatgaagcccgacaggtcttcgatgcccttgtcgtcttccacttcggagtcacgccaagagagatgtcccttctcttcttctgccatgttcttaacagtgtcggaggttggaaggtgctcttcggagagaatcaagagttccccgtatcaaggcaactcaaaatcaagggaggagctcagcaggtctgtgaaaacctggccaccgagatcgaccgcgccaacatccggctgaacgacccagtcacgatcatcgaccagactgatgacgagctcgtcaacatcactaccgacagtggatgtcgatacagggcaaagagggtcatcatggccacctcagtggacaactcagttcgtatccagcataaacctagctttccaccgaagagatctcgtatgacgaaattgatgccggctggacattgtatcaaatatgtcgtcacatacgaaaatgcattctggagaaaggatgggatgagcggtcacgtgatcaagttgacggacgaggagcaggccttcgacaacaatgacgacctcatgacgtacgagtacgtgttcgacgcctgctcctgcaacaggaatccgaacgtgacagcgcccgagaaccccgcattgatggggatgatcttttccgagtcgttgagacaactcacgaaggtggaaagaaagaaaatattgctgaagaagctggctgagatctatggagacgaagctctcaagaccatcgattatgcagaaatggactggggtttggatcggtacacaaatggctacccattcagttcaatgatgcccggtgcaatggtctaccatgctaaaggaatcaagaaaccgcatggaagaattcattggtgtggggctgagatgtcatcttcatggtatggatacatggagggctctgttaagtcgggaaaacgagtagcgagcgaagtcaggaaagcactcaacaccaaaataaccgcagaaaagcaaacacaacagccagtggaaattgattga

SEQ ID NO: 57690 - protein, 581 aa, Strongylocentrotus purpuratus
MSRSFLKQLSVENLLENIKEVVSSNQDEDGTDSPQKPRSRSFIFGRSFSTDENDNNGQSKLGPIAPSIVAIQNQSLSSSLPELVSHEPEPAVDVAIVGAGLSGLTAAYQIRQAQPDLSLVVLEAKENVGGRTYSPMLNTATGTRRFDLGDQWVNTDQRTILELLDKLNLETYPEYKEGKNILIHADGESEEFEGNIYPINPFRRLDISSFVSRIESMREDLSKKDPTDLSESLEWDSITLEQFKKEHIWTDEARQVFDALVVFHFGVTPREMSLLFFCHVLNSVGGWKVLFGENQEFPVSRQLKIKGGAQQVCENLATEIDRANIRLNDPVTIIDQTDDELVNITTDSGCRYRAKRVIMATSVDNSVRIQHKPSFPPKRSRMTKLMPAGHCIKYVVTYENAFWRKDGMSGHVIKLTDEEQAFDNNDDLMTYEYVFDACSCNRNPNVTAPENPALMGMIFSESLRQLTKVERKKILLKKLAEIYGDEALKTIDYAEMDWGLDRYTNGYPFSSMMPGAMVYHAKGIKKPHGRIHWCGAEMSSSWYGYMEGSVKSGKRVASEVRKALNTKITAEKQTQQPVEID

SEQ ID NO: 57691 - DNA, 1350 bp, Propionibacterium acnes KPA171202
  CDS (1)..(1350): transl_table=11
atgtacgacagcatcatcattggcgcgggtctagccggactcacggctgctgaagagctcgcctccgcaggacactcggtggtggtcctggaggcccgagcccgggtaggcggccgcttggaaaacgccgagttatccaacgggcaggtcgttgaactgggtggccagtgggttggagaagggcatgaggaacttcgctccctcctctcctcacaagggttagaactggttgattcaaccgacggcgacgtcgttgtcaaggccaggggcagggtctctcacgtcacaagtttgtccgagccgtccgctcattcccttagccccttcgaattggctgacctcggccagggcctgctgaggttccgtcgtctggccgatcgtgttgccaataacaagggctgggcggcggccaatgccacctggttgaaccagtcgttgagtcaatggacagtctcgaatgttcgtaccgaggccggtcgtggctacatcacgaacctcttccgtcaagccttcggtgtgtctgccaatgacactcctctcttcaacggtctggctaaggccaacgccggtgtggacttggaatccctcgtcgccgtcaacggtggccttaagcagcagcgcgttaagggcggggttgctcaggttacccgtaacctcgctgagcctctcggtgacgatcttaaactctccagcccggtccgatccgttcatagtgacgacgacggcgttaccgtcaccactactgatggcacgcagtatcagggacgtagcgtcatcgtcaccgtgccgccgcggctacttaaggacatgacattcgagccagcgctgcctgctgagcgtctcgagatggccgacaaagtgccagctggcaatgtcatcaaggcctacctcgtttatgacagcccatggtggcgcacctctggtgcttccggccagatgggtgctgacgagggcgctgtccgtgtcatttttgatacttctgacgacgagaccggcaagggaatcctcatgggcttcttcgagggcaccgaggcttccggctacgggaaactttcggtcggtctgcgtcaacgtgccttcgaagaggtcgtcgagtcggccttcggcaaggcccccagctcgccgatcgagtaccttgatcgcgactggctctctgagccttacaccggcggatgccacggagcccacttcgctcccagtctgtggacgactacggggccgatccttgccgagccgctgggccgggtgtttttcgcgggggctgagtacgcctcttccttcaacggttatatggagggcgcactgcgcgctgctgctcgcgctgctcaggaggtcctcgacctgctctga

SEQ ID NO: 57692 - protein, 449 aa, Propionibacterium acnes KPA171202
MYDSIIIGAGLAGLTAAEELASAGHSVVVLEARARVGGRLENAELSNGQVVELGGQWVGEGHEELRSLLSSQGLELVDSTDGDVVVKARGRVSHVTSLSEPSAHSLSPFELADLGQGLLRFRRLADRVANNKGWAAANATWLNQSLSQWTVSNVRTEAGRGYITNLFRQAFGVSANDTPLFNGLAKANAGVDLESLVAVNGGLKQQRVKGGVAQVTRNLAEPLGDDLKLSSPVRSVHSDDDGVTVTTTDGTQYQGRSVIVTVPPRLLKDMTFEPALPAERLEMADKVPAGNVIKAYLVYDSPWWRTSGASGQMGADEGAVRVIFDTSDDETGKGILMGFFEGTEASGYGKLSVGLRQRAFEEVVESAFGKAPSSPIEYLDRDWLSEPYTGGCHGAHFAPSLWTTTGPILAEPLGRVFFAGAEYASSFNGYMEGALRAAARAAQEVLDLL

SEQ ID NO: 57693 - DNA, 1482 bp, Ralstonia eutropha JMP134
  CDS (1)..(1482): transl_table=11
atggcagagaaatctccctcagactcagccaacctgccgcgcaggcaatggcttaaatgcgccggcgttgcagccgccgcaggcggattgggccttggtatccgccaggccaatgccggtaccgccaaggccgaacagaagacggacggcgttgttgacgttgccatcatcggcgcggggttggcgggcttgacggctgcgcgcgacctgcaactggctggttgtgactccttcgtggtcttggaagcgcgagaccgggtaggcgggcggacgctcaattacaacatcgagggtggctatgtctccgaagtcggcggccagtggatcggtcccggtcagaccgccgtggcggatcttgcccgccaactggaggtcggtacgttcccgagctactacgaaggaaagacggtggtactgggcggcgacggccggatggagctcgatctaaaagggacgtttggtacggacgaggcggtcagcggaaagctcagcaagctgtcgcgggaggtgccttccggcgccccttggaaatctgcgaaagtcggtgagttggacaagctctcgatcggtgactggctggccaaacagaacatcaagcccgaagatcaagtcgggtggaacgccagcagcactctttccggcggcacagcgccggcgaagatggggctcttgcatttcctttcgatgatcaattcggcggactgcgactattcgcagctcgacagcatcaagcacagcgcccaggaaacccgcttcgttggcgggtcgcaaattctgagcatcaagatggcgaagcaactgggcgacaaggtgcgcctgtcgacgccggtgcgccagattgccggctgggatcgtgatgtcgtcacgctgcagaccgaccacggcgaggtgcgtgcccgaaaagtcatcatggccattcatccggccctgtgtaaccaggtgcagttcaacccgccactgccggaaaagcgcgcagctttgcagcgtgcatggcctgcgcattcgcccgcacgcaagaccgccatggtctaccgccggccgttctggcgtgacaagggtctgaatggacacatcttccaggccaatgggccgttgatctgggccttcgacaactccccgccgggtggagaaatcggaatcatcaacgccttcgttgtgaatgcacagcttccgtcggatcctcgggcagctaaagccatacagaccgaactctacgcccgggcatggggccgcgaagccctgtcgccggtggcctatcacgatcaggactggggccaggcagacccctggaccatcacatgcgtctctgccattcctcccggcttttggagtacgcatggtgaggcactacgcccgccgtgcggcaacctgatctggtcgggcaccgagaccgcagagatttgggccggctacatggatggcgcggtgcgctcgggccatcaggcctctctccacgtgctcaatgcactgcgtcgagcataa

SEQ ID NO: 57694 - protein, 493 aa, Ralstonia eutropha JMP134
MAEKSPSDSANLPRRQWLKCAGVAAAAGGLGLGIRQANAGTAKAEQKTDGVVDVAIIGAGLAGLTAARDLQLAGCDSFVVLEARDRVGGRTLNYNIEGGYVSEVGGQWIGPGQTAVADLARQLEVGTFPSYYEGKTVVLGGDGRMELDLKGTFGTDEAVSGKLSKLSREVPSGAPWKSAKVGELDKLSIGDWLAKQNIKPEDQVGWNASSTLSGGTAPAKMGLLHFLSMINSADCDYSQLDSIKHSAQETRFVGGSQILSIKMAKQLGDKVRLSTPVRQIAGWDRDVVTLQTDHGEVRARKVIMAIHPALCNQVQFNPPLPEKRAALQRAWPAHSPARKTAMVYRRPFWRDKGLNGHIFQANGPLIWAFDNSPPGGEIGIINAFVVNAQLPSDPRAAKAIQTELYARAWGREALSPVAYHDQDWGQADPWTITCVSAIPPGFWSTHGEALRPPCGNLIWSGTETAEIWAGYMDGAVRSGHQASLHVLNALRRA

SEQ ID NO: 57695 - DNA, 1485 bp, Pseudomonas fluorescens PfO-1
  CDS (1)..(1485): transl_table=11
atgagtgcggatctcgatcaactgtcgacgcaatcacgacagcgacggttgttattgcaagcgatcggaggcgcagccctcgccggagggctgggtgtcaccgggcgtgcgatggcgcaaatcgaacctgtagatacctcgatactggatgtggtgatcattggcgcagggctttccgggctaacctccgccagagacctccaggccgctggctgcgagtcttttgccgtgcttgaagcccgcgaccgcgtcggtggtcgcacgctgaaccatgatctgggcaatggcgtgatctccgaagccggtggccaatggatcggcccggggcaaacgtcgatcgccgacttggccagacagctcgatgtcgccaccttccccacctactacaagggcaaggcggtgtatctgatggacgaggtcaacatccaggaagatctcagcgacgggccgaattccaatacagaagtcgtcgcaaaactgaacaagctcgccgaaggcgtccccagcaaagcgccgtggaaagccaaggacgcggctgagctggacaaactgtcggtcggccagtggctggccggtcaaggcatcagcaacgtcgacaagatcggcttcaacatgtccgtgagcctcaccttcggtaccacgccggccggcatgggactcctgcattacctggcgatgatcaactcgtcggactgccgccttgaaaagctcgaagggctccagggcggtgcgcaggaatctcgcctggctggcggctcgcaaattctcagtttgaagatggctcaggcgctgggagataaaatccggttggcgtgcccggtgcgcaagattgtcggttgggatcgtgatgtcgtcgagttgcacaccgatcagggcatcatccgcacgcggcaggtaattgctgcgctgagcccggcgttgtgcaatcagatcctcttcgatccgcccctgccgtccgggcgtgccgagctgcagcggcattggccggcccatgcaccgatgcgcaagaccgtgcacgtctatgagcgcccgttctggcgcgaccaaggcctcaacgggcagattgtgccagtggaaggtccgctgatctgggcctttgacaactccccggcggacggcagcctgggtgtgctcagcggcttcgtcaggaccggccaattaccccatgacccgaaaacggcgcaggacatcctgtcggcgatttacgccagcgccatgggcgaacaagccctgcacccgattcagtttcatgatctggactggggcaagatcgacccgtggagtttgagttgtatttcccctatgccccccggtttctggacgcaatggggcgagtacctgacgccggcggtcggtcgcctgatctggtcgggtaccgagactgcggaaatctgggccggggcaatggacggtgcggtccgcgccggacatcgcgcggcaatggaagcgctgcaggcgttgcttcaaccacggaggagcgcctga

SEQ ID NO: 57696 - protein, 494 aa, Pseudomonas fluorescens PfO-1
MSADLDQLSTQSRQRRLLLQAIGGAALAGGLGVTGRAMAQIEPVDTSILDVVIIGAGLSGLTSARDLQAAGCESFAVLEARDRVGGRTLNHDLGNGVISEAGGQWIGPGQTSIADLARQLDVATFPTYYKGKAVYLMDEVNIQEDLSDGPNSNTEVVAKLNKLAEGVPSKAPWKAKDAAELDKLSVGQWLAGQGISNVDKIGFNMSVSLTFGTTPAGMGLLHYLAMINSSDCRLEKLEGLQGGAQESRLAGGSQILSLKMAQALGDKIRLACPVRKIVGWDRDVVELHTDQGIIRTRQVIAALSPALCNQILFDPPLPSGRAELQRHWPAHAPMRKTVHVYERPFWRDQGLNGQIVPVEGPLIWAFDNSPADGSLGVLSGFVRTGQLPHDPKTAQDILSAIYASAMGEQALHPIQFHDLDWGKIDPWSLSCISPMPPGFWTQWGEYLTPAVGRLIWSGTETAEIWAGAMDGAVRAGHRAAMEALQALLQPRRSA

SEQ ID NO: 57697 - DNA, 1473 bp, Pseudomonas fluorescens PfO-1
  CDS (1)..(1473): transl_table=11
atgagtactgacgcccctcccgatctgaagcgaagacaattactcaaactggccggtgcaaccgccgccgtaggatcgatcggtttgaaccttggcctggccaatgccgccgatgcgctgcaaaaggacagttccgacgatgtatttgatgtggtgatcatcggtgccggcctggctggtttgaccgccgcccgtgatctgcatctggcaggctgtgagtcgctgctggtgcttgaagcgcgtgatcgtgtcggcggccgcaccctcaatcatgacttgggctccggctacatctccgaagccggaggtcagtggatcggtccaggacaaaccgccgtagcggatctggcccgtgagcttgaggtcggcacctttcccagtttctatgacggggaaaccgtgatcctcgggggcgatggacgtgtcgctgtcgatttgaaaggcaccttcggtaccgacgaaagcgtctcggcaaaactcagcgagctgtcgcgtgatgtgccgtgcggtgcgccatggaaatcccccagggtggccgaactggacaagctctcggcgggcgactggctcgctcagcaaaacatcaagccggaagatcgcgcagggtggaatgccagcttcctcctgacctgcggtgtcacgccggcgaagatgggcttcttgcattttctgtcgatgatcaattcggccggcagcgaatacatgcggctcgattcgatcaaggacagcgcgcaaggcacgcggatcgtcggcggttcacaggttctcagcagcaaaatggcgcaattgttgggcgacagggttcgcttgtcgtgcccagtgcgcaaaattgctgactggaaccgcgacatcgtcagactgcaaacggatcagggcgagatccgcgcccgccgggtgatcatggcgattcatcccgcgctgtgccaacgcctgcaattcgatccaccgctgcccgaagctcgcgccgccctgcagcgggcctggccagcgcactcgccggcacgcaagaccgcaatggtttacccgcggcctttctggcgtgacaagggcttgaacggccacatcattcaggtcggtgggccagtcatctgggcctacgacaactcgccgccaaacggcgaaatcggcgtgatcaatgcattcattctgaatgccgcagcccccaccgaccccgaagccgcgaagcgtgtgcagaccgaaatctatgcacgcgccctgggggacgcagcgcttgagccggtttcctaccacgatcacgactgggcgcatttcgacccgtggaccatcacgtgcgtgtcgccgattcctcccggtttctggtcgacacatggcgaggcactgcgtccgccgtgcggcaatctgttctggtcgggcaccgaaaccgctgacatctgggcaggttacatggacggtgccgtgcgcgccggacgccatagcgccttgcaggtgctcaacgcgttacgtcgggcatag

SEQ ID NO: 57698 - protein, 490 aa, Pseudomonas fluorescens PfO-1
MSTDAPPDLKRRQLLKLAGATAAVGSIGLNLGLANAADALQKDSSDDVFDVVIIGAGLAGLTAARDLHLAGCESLLVLEARDRVGGRTLNHDLGSGYISEAGGQWIGPGQTAVADLARELEVGTFPSFYDGETVILGGDGRVAVDLKGTFGTDESVSAKLSELSRDVPCGAPWKSPRVAELDKLSAGDWLAQQNIKPEDRAGWNASFLLTCGVTPAKMGFLHFLSMINSAGSEYMRLDSIKDSAQGTRIVGGSQVLSSKMAQLLGDRVRLSCPVRKIADWNRDIVRLQTDQGEIRARRVIMAIHPALCQRLQFDPPLPEARAALQRAWPAHSPARKTAMVYPRPFWRDKGLNGHIIQVGGPVIWAYDNSPPNGEIGVINAFILNAAAPTDPEAAKRVQTEIYARALGDAALEPVSYHDHDWAHFDPWTITCVSPIPPGFWSTHGEALRPPCGNLFWSGTETADIWAGYMDGAVRAGRHSALQVLNALRRA

SEQ ID NO: 57699 - DNA, 1479 bp, Burkholderia sp. 383
  CDS (1)..(1479): transl_table=11
atgaatcgcaaacccaggccggatgcacagacccggcgcaacctgttgcgcctcgcggcggtgggcgcggcgtcgctcgcggccggcgaagtgtcgctcgcgcatgcggccaacgcagtcaccgggaacgacggcgtgctcgacgtcgcgatcatcggcgccgggctcgcggggctgactgccgcgcgcgacctgaagcgtgccggatgtgaatcgttcgtggtgctcgaggcgcgcgatcgcgtcggcgggcgcacctacaaccacgacctcggtggcggacgaatctccgaagccggcggccaatggttcggtcccggccagacggcgatcgtcgatctcgcgcgcgagctgaaggtcgataccttcgatacctactacgcgggcaagacggtgtttctcgcggacggtgcgcgggtggcccaggacacgcagggcacggtgggcggcaacccggtgatcgcggcccggctcaacgcgatggcgaagcacgtaccgtcggcggcgccgtggaaggcgccgaatgcggcggcgctcgacaccatgtcgctgggcgcgtggctcgcgcagcaaggcctgaccaacgaagagaaattctcgttcagcctggcggcccggttgtcgctcggcacggcgccggcgcaactcggcttgctgcactacctggccacgatcaacagcgcgaacagcgattacgaccagctcgagtcgatcaagggcggcgcgcaggagtcgcgtttcgtcggcggttcgcaggtgctgagcatcaggatggcgaacgaacttggcgaacgggtgaagctgtcctgcccggtgcgcaagattgccggctggaatcgcgaggtggtcgaactcactaccgaccagggcgtggtgcgcgcgcgccgcgtgatcgtcgcgttgaatccggcgctgtgcaaccaggtcgtgttcgatccgccgttgccggacggtcgcgcgcagttgcagcgccggtggcccgcctatgcgccgatgcgcaagacggtgcatgtctacgaccggccgttctggcgggacgacgggtgcaacgggcaggtcatcccggtcaacagcccgctgctgtgggcctatgacaattcgccgccggacgggtcgatcggcgtcatcaacggcttcatcgcaccgggcgcgctcgcgagcgacgcgaaggtggcggagcagacgctttccgcgatctacgcacaggcgctcggcgacaaggcgctgcgcccgacgcagttccacgattacgactggggcaaggtggatccgtggtcgctgacctgcattcatccgattccgcccggcttctggacgaaatggggcgagtacctgcacccgccggtcggtcggctgatctggtcaggaacggagacagccgacatctgggccggcgcgatggatggcgcggtgcgttcggggcatcgcgccgcgctgcaggtattgggtgcgctcgcgcatcggacgaaggaggcttga

SEQ ID NO: 57700 - protein, 492 aa, Burkholderia sp. 383
MNRKPRPDAQTRRNLLRLAAVGAASLAAGEVSLAHAANAVTGNDGVLDVAIIGAGLAGLTAARDLKRAGCESFVVLEARDRVGGRTYNHDLGGGRISEAGGQWFGPGQTAIVDLARELKVDTFDTYYAGKTVFLADGARVAQDTQGTVGGNPVIAARLNAMAKHVPSAAPWKAPNAAALDTMSLGAWLAQQGLTNEEKFSFSLAARLSLGTAPAQLGLLHYLATINSANSDYDQLESIKGGAQESRFVGGSQVLSIRMANELGERVKLSCPVRKIAGWNREVVELTTDQGVVRARRVIVALNPALCNQVVFDPPLPDGRAQLQRRWPAYAPMRKTVHVYDRPFWRDDGCNGQVIPVNSPLLWAYDNSPPDGSIGVINGFIAPGALASDAKVAEQTLSAIYAQALGDKALRPTQFHDYDWGKVDPWSLTCIHPIPPGFWTKWGEYLHPPVGRLIWSGTETADIWAGAMDGAVRSGHRAALQVLGALAHRTKEA

SEQ ID NO: 57701 - DNA, 1599 bp, Burkholderia sp. 383
  CDS (1)..(1599): transl_table=11
atggcgggcgcattccgatcggttcggaacgacgtgccgaacgggccgcctatcgttcgtcatcctgatggatggctcccgagtgaatttcattgcagtagcgaacacaccatgccaaagaagtctttccccaatggagcagccgatctgcatcgacggcagtggctcaagtacgccggtgcgtcagccgcagtcgtgggcacgctggcgatcggcgcacggcaggcgagcgccggcgaaggcggcccgtccggcaatgcgggcgacgtgctcgacgtggccatcatcggcgcggggctggccggcctgacggcggcgcgcgatttgcgccaggccggttgcgaatcgttcgtggtgctcgaggcgcgcgaccgcgtcggcggccggacactcaactacaacgtggaaggcggctacgtcaccgaggtcggcgggcagtggatcgggccgggccagaccgctgtcgccgatctcgctcgcgagctggaggtcggcacgttcccgagctactacgacggcaagacggtcatcctgggcggcgaaggccgcgtggcggtcgacctgaaaggcacgttcggcaccgacgaagccatttcgtcgaagctcagcacgatgtcgcgcgatgtgccgtcgggtgcgccgtggacctcgcctcgggtcggcgagctggacaagctgtcggtggccgactggatggtgaagcaggacatcaagcccgaggaccggatcggttgggacggctcgtgcacgctgtccggcggtgctccgccggtcaagatggggctgctgcacttcctgtcgatgatcaactcggcgtcgtgcgactacacgcagctcgactccatcaagcacagcgcacaggaaacgcgcttcatcggcggatcgcaaattctcagcacgaagatggccgcgcacctgggcgacaaggtgcgcctgtcgacgccggtgcgccggatctcaaactgggatcgcgacgtcgtcacactgcatacggatcacggggacgtgcgagcgcggaaggtcatcatggccatccacccggccctgtgcaaccaggtgcagttcgagccgccgttgccggagaggcgggcgtcgctgcaacgcgcatggcccgctcactcgccggcgcgcaagaccgcgatggtctatcgccgtccgttctggcgcgagaaggggctgaacggccatatcttccaggcgggcgggccggtcatctgggcctacgacaactcgccgcccggtggcgagatcgggatcatcaatgcgttcgtccggaacgcgatgctgccatcggaccggaaggccgcgcaacgcatgctcacggaaatctatgcgcaggcatggggcgacgatgcgctgtcgcccgtgtcgtatcacgaccacgactggagccgcgtcgatccgtggacgatcacgtgcgtgtccgcgattccgccgggtttctggagcgcgcacggcgacggactgcatctgccgtgcggcaacctgatctggtcggggaccgaaaccgcgaacatctgggcgggctacatggatggcgccgtgcgctcgggccaccagggtgcattgcaggcgctgaacggcttgcgccgcgcatag

SEQ ID NO: 57702 - protein, 532 aa, Burkholderia sp. 383
MAGAFRSVRNDVPNGPPIVRHPDGWLPSEFHCSSEHTMPKKSFPNGAADLHRRQWLKYAGASAAVVGTLAIGARQASAGEGGPSGNAGDVLDVAIIGAGLAGLTAARDLRQAGCESFVVLEARDRVGGRTLNYNVEGGYVTEVGGQWIGPGQTAVADLARELEVGTFPSYYDGKTVILGGEGRVAVDLKGTFGTDEAISSKLSTMSRDVPSGAPWTSPRVGELDKLSVADWMVKQDIKPEDRIGWDGSCTLSGGAPPVKMGLLHFLSMINSASCDYTQLDSIKHSAQETRFIGGSQILSTKMAAHLGDKVRLSTPVRRISNWDRDVVTLHTDHGDVRARKVIMAIHPALCNQVQFEPPLPERRASLQRAWPAHSPARKTAMVYRRPFWREKGLNGHIFQAGGPVIWAYDNSPPGGEIGIINAFVRNAMLPSDRKAAQRMLTEIYAQAWGDDALSPVSYHDHDWSRVDPWTITCVSAIPPGFWSAHGDGLHLPCGNLIWSGTETANIWAGYMDGAVRSGHQGALQALNGLRRA

SEQ ID NO: 57703 - DNA, 1410 bp, Synechococcus sp. CC9605
  CDS (1)..(1410): transl_table=11
ttggggagcaaggcgtcgacagcggaatcaacaacaccttctgatgttgacgtggtggtcgttggagcgggtttgtcaggtctgacagccgctcgtcaacttcgcaaaaatggattgagtgttcatcttctcgaagccagagcccgaacgggtgggcgaatgattcgccagacaacatgcacaggcgccgtgattgacctaggcgggcaatggggcggggaaacccaccatcgcttcgagaagcttgtggatgaattgggtcttgaacgcttccccagttactacgacggccagggagtgttggtttgggacgggcaaagagtggtggccgacatggcaacaaagccctccaacagcgtgctgctctttgaagcagatcagatccaacaacctgcagaacaggtggccaacgcaaaaaaagcactgaagacctttcgggccatcgctgcctcagtcgatccagcccgaccctggacaacacccaacgcagctgaactggatcacactaccattcgatcatggtgtgagaagaacagtgattcaaggctgagtgatttcgaactcgaatggctttcggttgttggaggttccggcggctttgatccctgggatgcctccattcttcatctagcgtggacgcaatccgttgcaccccaggatgaggctccagagtcctggttgctcaaaggtgcagctggccaggttgcagaacgactcaccgctgaactcaaacaattcatcagcctgaatgctccggtgcactcagttgagcagaacgacaatggcgtgatcatcagtttcggccaaggcaaaacaatcaatgccaaaactgccatcgtggccatcccacccccactacgccagcgcatcaccttcacacctgatctaccggctgaaacacgttcatttctgcaacgcagccccatgggatccatgatcaaggtgtttgcgatttacaagaacgctttttggagacaaaaaaatctcaatggcttcggcgttggtaatctgaaaaccctcgagctcacggcagacagctctctacccagcggatctcctgggattctcgcaagttttgttaccgcaagtgccgctgttcgcttccaacaacaaaacagccaagaacagcgcaaagccatcctggatgatctgatggcgtattggggccctgaggcaggtgcacccgaagaactaatcattcagaactggaaccaagaagcttggtctactggagccttcaccagttttgtcacgcctggtggctggacaacttacggccagggctggcaacaatctcatggacgcgttcattgggcaggcaccgaggcgtccagccgctggcccgggtacttcgaaggcgccattgaggccggcattcaagcatcgaacaaagcgatatcacaaacatga

SEQ ID NO: 57704 - protein, 469 aa, Synechococcus sp. CC9605
MGSKASTAESTTPSDVDVVVVGAGLSGLTAARQLRKNGLSVHLLEARARTGGRMIRQTTCTGAVIDLGGQWGGETHHRFEKLVDELGLERFPSYYDGQGVLVWDGQRVVADMATKPSNSVLLFEADQIQQPAEQVANAKKALKTFRAIAASVDPARPWTTPNAAELDHTTIRSWCEKNSDSRLSDFELEWLSVVGGSGGFDPWDASILHLAWTQSVAPQDEAPESWLLKGAAGQVAERLTAELKQFISLNAPVHSVEQNDNGVIISFGQGKTINAKTAIVAIPPPLRQRITFTPDLPAETRSFLQRSPMGSMIKVFAIYKNAFWRQKNLNGFGVGNLKTLELTADSSLPSGSPGILASFVTASAAVRFQQQNSQEQRKAILDDLMAYWGPEAGAPEELIIQNWNQEAWSTGAFTSFVTPGGWTTYGQGWQQSHGRVHWAGTEASSRWPGYFEGAIEAGIQASNKAISQT

SEQ ID NO: 57705 - DNA, 1464 bp, Synechococcus sp. CC9605
  CDS (1)..(1464): transl_table=11
atgcagcatctgctgaaaacaattcagacccctattggcaaaatacctgacatgattgacgttattgttgtaggcgctggtgtttcaggtcttacggcagcgcgccgcatagctcaagacagccgcgatgtgcttgtacttgaggctcaagaaaggattggcgggcgactccatcgagtcgaggttgggcatgaagggcgtagggcccttggtgcagcacccggttgggttgatctcggaggtcagtgggcaggcctcacccaaaccaaaacaattgagtatgcgcgcaagctgaacattcccacctttccggtgccggttggtggcaaggacacgttcctctatgacggtcgactaagtcggcacaaccatgcttggccatcgaccccgtacaacgccaaagagctgaagagcgactggcccgacctgaaaataccgaaagagcagcgtgatgacgtcgttgccacttggcaaaagatcgaggccctggcggcaacgattgaccccgctgcgccatggacccatccagaagcgcgcgctcttgacacgatgactatcaccacatggttggagcgcaatgccctcacaccgatggcggcctggtgggtcgatgtcattgcgcgcaactgggggggtaacggcgcttttgaatcgggctcggcgtcaatgctgcatttcgcctgggcgcagcgcgtgtcgccgcagagtcaaacgcctgaagcgttgctgttcgacggtggggctgggcagttcccgtcgcggcttgcagaggcgttgccccctgaggcgattcgtacgagcgagccggtgttgtttatccagcacaccagctcaggtgtgacggtgacaacgcccaaggggacgtaccgcggtcgagccgtcattgtcgcgatgccgccgcatctcactggacgtattcattacgacccgccgctgccggcggcacgtgaccagctgacccagcgctcgcccatgggggccatcatcaaggcgcttgtcgtttacgactcgccctggtggcgtgcaggagacctctctggaaacgctattggaaatcttgatgcaattgagctggttcccgattcgaccaacccacggcccggaagccctggcgtgttggccacctttttgaccggcgaggcggcgacgcgatacggcgctgcccctgagtctgagcgccaagatgccttgttggctgatctggcaaccctattggggcccatggcccgtagtggcgttctcgaatatcacgaatggaactggcccgcgaacccctgggtaggtggagcctactcaaccttttacacccccggcacttggacccagttcggcaagcatttgcgcgaaccggtgggtcgcattttctgggcaggaaccgaagtcagtacagcgtggccgggctatatccacggtgccctacacgcgggtgaacagtctgctgaggcggttacggccgttttgtag

SEQ ID NO: 57706 - protein, 487 aa, Synechococcus sp. CC9605
MQHLLKTIQTPIGKIPDMIDVIVVGAGVSGLTAARRIAQDSRDVLVLEAQERIGGRLHRVEVGHEGRRALGAAPGWVDLGGQWAGLTQTKTIEYARKLNIPTFPVPVGGKDTFLYDGRLSRHNHAWPSTPYNAKELKSDWPDLKIPKEQRDDVVATWQKIEALAATIDPAAPWTHPEARALDTMTITTWLERNALTPMAAWWVDVIARNWGGNGAFESGSASMLHFAWAQRVSPQSQTPEALLFDGGAGQFPSRLAEALPPEAIRTSEPVLFIQHTSSGVTVTTPKGTYRGRAVIVAMPPHLTGRIHYDPPLPAARDQLTQRSPMGAIIKALVVYDSPWWRAGDLSGNAIGNLDAIELVPDSTNPRPGSPGVLATFLTGEAATRYGAAPESERQDALLADLATLLGPMARSGVLEYHEWNWPANPWVGGAYSTFYTPGTWTQFGKHLREPVGRIFWAGTEVSTAWPGYIHGALHAGEQSAEAVTAVL

SEQ ID NO: 57707 - DNA, 1455 bp, Synechococcus elongatus PCC 7942
  CDS (1)..(1455): transl_table=11
atgaaggtttctcgtcgtgccttgctggggggagcggctgcggtagccagcgcgagtgtgttgacgcgatcgccccgcgcccaagcccagtccaagtcaacccgtgcagatgtggttgttgtcggtgccggttatgccggactcgccgctgcttggcaactgcaaaaagctggcctgaaagtcgtggtcctcgaagcccgcgatcgcgtcgggggaagggtttggtcgatcgacctcaaaggtggcggctggctcgatttaggcggtcagtggttgggagcaactcaagaccgatttgccgccctaattcaagagatgggctgccaaacctatccgactcctaactttggcgacaccctctaccgaggcgtgaccagcagtggttactaccgtgtcaaagcagacggcagcaactgggagtccgtacccggcagtgatttgatcgatgaagctgatgaaaagctgtccgcgatggtcgatcagatcgacccgaaggcaccgtggcagcatccgcaagcggcaatctgggacggcctcacctttggtcagtggttggatcaaaatgtgccggacgcgaatgcccgccgtttcctgatcgccagtgtgtcttacgcctgcgccagtccccaagaaatttcgatgttgcaactgctgttcatcattcgcgcctgcggtggcttggcgatgttggatggctttgaaggtgccgctcagcaagatcgaattattggtggtgcgcaagttgtcgcgaagcgattggcagaacggctaggttcacggattcagttcaatcagcccgttcgcaaaattcgctggagcgatcgcggcgtcactgtgtttactgatcagcaggcgatcgcggctcaatccgttgtgattgcggtgccgcccacgctggctggcagcattgaatacgagccaagcctgcccaccgatcgcgcccaaattacccagcgctggccccaaggctgtgtgatcaaagtcggcatggtgtttgaggaaccgttctggcgcaaggatggcctcagtggagcttcgattgactacggttccttagttggtgaaactgccgacagcagtaccccgcccgaatattccaaacagggcattctcaccggctttgtctacgccgaaaccgcgcggcaggttctgagattgtcggctagcgatcgccgtcaacaactgctggcttccctacaaggtcgctttggcgatcggatcctcaaacccgtcttctatcaggagatgaattgggcgatgcagccttggacaaagggttgttatgccggttatctcgcaccgggggcaacctacctgttcaaatctgcagtccgcgatccgatcggccccttgcactgggcgggaacggaaactgcgagtcagtggccaacgtttatcgatggcgcgattcgttcgggggaacgggcggcgcaggcgatctttagccagcggtag

SEQ ID NO: 57708 - protein, 484 aa, Synechococcus elongatus PCC 7942
MKVSRRALLGGAAAVASASVLTRSPRAQAQSKSTRADVVVVGAGYAGLAAAWQLQKAGLKVVVLEARDRVGGRVWSIDLKGGGWLDLGGQWLGATQDRFAALIQEMGCQTYPTPNFGDTLYRGVTSSGYYRVKADGSNWESVPGSDLIDEADEKLSAMVDQIDPKAPWQHPQAAIWDGLTFGQWLDQNVPDANARRFLIASVSYACASPQEISMLQLLFIIRACGGLAMLDGFEGAAQQDRIIGGAQVVAKRLAERLGSRIQFNQPVRKIRWSDRGVTVFTDQQAIAAQSVVIAVPPTLAGSIEYEPSLPTDRAQITQRWPQGCVIKVGMVFEEPFWRKDGLSGASIDYGSLVGETADSSTPPEYSKQGILTGFVYAETARQVLRLSASDRRQQLLASLQGRFGDRILKPVFYQEMNWAMQPWTKGCYAGYLAPGATYLFKSAVRDPIGPLHWAGTETASQWPTFIDGAIRSGERAAQAIFSQR

SEQ ID NO: 57709 - DNA, 1383 bp, Rhodococcus sp. RHA1
  CDS (1)..(1383): transl_table=11
atggcagacatcgaggtcgactattgcgtcgtaggcgctggattcgccggactgacggcggcactgcgtctgaaacaggccggacaatcggtcgcgctcgtggaggcgcgtgaccggatcggcgggcgaacgttcaccgaggtccgcgaagatggttcgtggatagatcggggcggtgcgtggatcgggccgggacaggaccggatctacgccatgatggacgaattcggcgtcaagagttacaagcagtacaccgacggcgaggcgatgatggtcgtcgacggcaagcagtaccggtacaagggcacgattcccctgacgatgagtccctgggcggccgcgaatctcggggccgtgttcgtcgaactcggcgagatgtgtaagacgatcccgctcgaggcgccgtgggaggcgaagaaggcagcgaagtgggactcgatcagcctcgccaaatggctcggcgacaacacgctgtccacacccgcccacgaccttctcgagaccgccatcgccggctgctacacctccgcggcgtccgaagtgtcgatgctgttcgtcctgtaccagatggcatccggcggcggtccgagtttcgtcctcggtgtgaaggacgccgccgaggacgcgcggccggtcggcggaatgggcgccgtctatcgtccgatggcagtcgagatcggcgacgcgctccatctgtcacaacccgtccgggacatcgcacaggacggcgacggcgtgaccgtccgctccgcggatctggccgtgcgcgcccggagggcgatcgtcgcggtacccctcgcgatcgcgagccagatcgtctacgaaccgctgctgccgatggatcggtccttcctgcaccagcgaatgccgagcggtgcggtcatgaaaatcgccgtcctctacgacgaacccttctggcgcgccgccggactgtcggggcagtcggcggcacccgactcccccgcgacgatcaccatcgacgccagtaccgacacgggacgtcccggcgttctgtgcgtcatcgtcgagggaccgatcgcccgcaagctggggacgctgccggaagcggaacggaggaaggccgtgctcgcggagttgaccgcgaggttcggaaataaggcagcctcccccgtcgactacatcgagcagaactggagcgtcgagcggtactccggcggcggcatgctcagtcatgcgccgacgggagtgctcacccaattcgggcacgccctccgcaccccctgcggtcgcattcactgggccggcacggagagttcgtccgtgatgtgcggctgggtcgacggggccatcaggtccggggagcgcgccgcccgcgaagtcaccgaacacgacggcgtgctgtcacccacccggtctcagtag

SEQ ID NO: 57710 - protein, 460 aa, Rhodococcus sp. RHA1
MADIEVDYCVVGAGFAGLTAALRLKQAGQSVALVEARDRIGGRTFTEVREDGSWIDRGGAWIGPGQDRIYAMMDEFGVKSYKQYTDGEAMMVVDGKQYRYKGTIPLTMSPWAAANLGAVFVELGEMCKTIPLEAPWEAKKAAKWDSISLAKWLGDNTLSTPAHDLLETAIAGCYTSAASEVSMLFVLYQMASGGGPSFVLGVKDAAEDARPVGGMGAVYRPMAVEIGDALHLSQPVRDIAQDGDGVTVRSADLAVRARRAIVAVPLAIASQIVYEPLLPMDRSFLHQRMPSGAVMKIAVLYDEPFWRAAGLSGQSAAPDSPATITIDASTDTGRPGVLCVIVEGPIARKLGTLPEAERRKAVLAELTARFGNKAASPVDYIEQNWSVERYSGGGMLSHAPTGVLTQFGHALRTPCGRIHWAGTESSSVMCGWVDGAIRSGERAAREVTEHDGVLSPTRSQ

SEQ ID NO: 57711 - DNA, 1350 bp, Nocardioides sp. JS614
  CDS (1)..(1350): transl_table=11
gtgagcgacgtcgtggtggtgggcgccgggctgtccgggctggcggccgcccggcgcctgcaggcggcgggccggtccgtcgtcgtggtcgaggcgcgggaccgggtcggcgggcgtaccgaggccggggcgctcagcgacgggcagtggatcgagctcggtggccagtgggtcgggcccacccaggaccggatgtacgagctcatcgcggagctcggcttggcgacgatcccgacgtacaacgacggcgacatcgtcttctcgctgtgcgggcgacacggccggctcgccggtcgcaagggcgcggtgccgcggctcaacccgttcgcgatcgccgacctcgcgcagggcacgctgcgcttcgcccggctggcccgccgggtcgacctcgaccgaccctgggacaccgagcgcgccgcggccctcgacgggcagaccttccgcacctgggtgcagcgcaacctgcgcaccccgcagggccgcgcctacttcgagctctactgcgaggcggtcttctccgccgacctctcggacctctcgctgctgcacgcgctgttctacacgcactccggcaccgacatggacacgctgatggctgtggaccggggcgcgcagcaggaccggatcgacggcggctcgtggcggatcagccagcgcctggcggagggtctcgacgtccggctcggccagccggtccggtcggtcgtccaggacgcggccggggtccgggtcgtgacccgtgacggcacgtcgtacgacgcggaccgggtgatcatcacgctcccgccggcgctcgccggccggctggagtacgacccgccgctgcccagctggcgcgaccagctgacccagaaggtgccggccggcagcgtcttcaaggtctacgccgtctacccgacgccgttctggcgcgaggacgggctcaacgggcaggccggctcggacctcggcccggtgaaggtcaccttcgacaacaccccgcccggctacgaccgtggcatcctgatggggttcatcgaggccgccgacggccgggagtgggcccgccgtacccctgaggagaggcgggctgcggtcgtcgactgcttcgtgcgctacttcggtccccgggccgccgagccgctggagtacgtcgagcgcgactggatggccgaggagttcacccgcggctgctacggcgcccacttcgctccgggcgtgtggaccgggttcggccacgccctgcgcgagccggtcgggcggctgcactgggccggcgcggagtgctcgccggtctggaacggctacatggagggcgcggtccgctcgggcgaggccaccgccgacgaggtgcacgcgctgctggggtga

SEQ ID NO: 57712 - protein, 449 aa, Nocardioides sp. JS614
MSDVVVVGAGLSGLAAARRLQAAGRSVVVVEARDRVGGRTEAGALSDGQWIELGGQWVGPTQDRMYELIAELGLATIPTYNDGDIVFSLCGRHGRLAGRKGAVPRLNPFAIADLAQGTLRFARLARRVDLDRPWDTERAAALDGQTFRTWVQRNLRTPQGRAYFELYCEAVFSADLSDLSLLHALFYTHSGTDMDTLMAVDRGAQQDRIDGGSWRISQRLAEGLDVRLGQPVRSVVQDAAGVRVVTRDGTSYDADRVIITLPPALAGRLEYDPPLPSWRDQLTQKVPAGSVFKVYAVYPTPFWREDGLNGQAGSDLGPVKVTFDNTPPGYDRGILMGFIEAADGREWARRTPEERRAAVVDCFVRYFGPRAAEPLEYVERDWMAEEFTRGCYGAHFAPGVWTGFGHALREPVGRLHWAGAECSPVWNGYMEGAVRSGEATADEVHALLG

SEQ ID NO: 57713 - DNA, 1500 bp, Nocardioides sp. JS614
  CDS (1)..(1500): transl_table=11
atgccgcgtccggcactgtcccgccgcctcctgctcggcggcgccgcggccggcgggctggcgctcggcaccggccccctgcacgacgcggtcgctgccggctcgcgccagggtgcgctgcccaggcgggtcgacgccgtcgtggtcggcggcggcctctccgggctcgtcgccgcgcgcgacctggcccgcgacgggcacgacgtactgctcctcgaggcgcgggaccgcgtcggcggccgggtgctcaaccaccacctgaccgtgcccggagcccgcggcgccacgatcgaggccggcggcgcgttcatcggccccacccaggaccacatcgcgcggctcgcgcgcgagctgaaggtgccgacgttcccggagtacaacgagggcaacagcgtctacgtgtcctcgctgaccggccggcaggagtactccggcacggtcccgccggaccccacgatcctccccgacgcggccgtcctgctgacccgcatcgacaacatggccgccgagatcgccgtcgacgcgccgtggacccaccccagcgccgccgagtgggacgcgatgacgctcggcgagtggatccgcgccaacgcggtcaacggcgacggcgtcgagaacctcatcgagtgctggacccagccggggttcggcgccgaccccaacgagctgtccctgctctacgtgctctggtacgtcgcgtgctcgggcaacgagcgcaacgtcgggacgttctcgcgcaactccgacaccgccaacggcgcccaggagcgccgcttcgtcgggggctcgcagctggtcccgctccggctggcgcgccggctgggcgacgtcgtggccctgcgggcggcggtgcgccgcatcgagcagcgcgacggccacgtgctcgtgcacagcgcccgcggcaccgtccgcgcccgccgtgtcgtcgtggcggcgccaccgccgctggtgctcggcatcgagtggttcccccgcctccccacccggcgcctgcagctgctgcgccacctcgacatgggccagctgatgaagtgcgacgcggtctaccgcacgccgttctggcgcgacgccgggctcaacggcttcggcatcaacgacgccggcgcggcccgcgcggtgttcgacaactcgccggccgacggcgagccgggggtgctgctggccttcgtcgggggctccacctggcgtcagtacggcgtgctgccgcgcgccgagcgcaagcgcgcggtgctcgagggcttcgcggcgatgttcggtgagcaggcgctgcacccgatcgagtacgtcgagcaggactggaccgaggagcgctggaccaccggcgggccggtcgccaactatgcacccgggaccatggtgcagctcgggtccgcgatccggcagccgttcggccgcgtgcactgggccggcaccgagacctcgacgtactggaccggctacatggacggtgccgtgcgcgccggcgagcgcgcggcgatcgaggtcggggagcgcctgtga

SEQ ID NO: 57714 - protein, 499 aa, Nocardioides sp. JS614
MPRPALSRRLLLGGAAAGGLALGTGPLHDAVAAGSRQGALPRRVDAVVVGGGLSGLVAARDLARDGHDVLLLEARDRVGGRVLNHHLTVPGARGATIEAGGAFIGPTQDHIARLARELKVPTFPEYNEGNSVYVSSLTGRQEYSGTVPPDPTILPDAAVLLTRIDNMAAEIAVDAPWTHPSAAEWDAMTLGEWIRANAVNGDGVENLIECWTQPGFGADPNELSLLYVLWYVACSGNERNVGTFSRNSDTANGAQERRFVGGSQLVPLRLARRLGDVVALRAAVRRIEQRDGHVLVHSARGTVRARRVVVAAPPPLVLGIEWFPRLPTRRLQLLRHLDMGQLMKCDAVYRTPFWRDAGLNGFGINDAGAARAVFDNSPADGEPGVLLAFVGGSTWRQYGVLPRAERKRAVLEGFAAMFGEQALHPIEYVEQDWTEERWTTGGPVANYAPGTMVQLGSAIRQPFGRVHWAGTETSTYWTGYMDGAVRAGERAAIEVGERL

SEQ ID NO: 57715 - DNA, 1392 bp, Kineococcus radiotolerans SRS30216
  CDS (1)..(1392): transl_table=11
gtgcactccgcaagaaccgaactgaccgcagacgtcgtggtggtgggggccggacccgcggggctcaacaccgcccgccacctcacccgcgccggccacgacgtcgtcgtcctcgaagcgcgcgaccgcgtgggcggccgcacccacaccgaggagcacgacggcgtccccctggagatcggcggccagtggatctcgcccgaccagaccgagctcctcggcctgctcgacgagctcgggatgcagacgtaccagcgctaccgcgagggcgactccgtccacatcgcccccgacggcacccgcacccgctaccgcggcgacaccttccccgtcgccgactccacggccaaggagatccaccggctcaccgagctcatggacgacctcgtggcctccgtcggcgcccgcgagccctgggcccacccgcgcgccctggagctcgacacgatctccttccaccactggctgcggcagcagtccgacgacgaggaggcgtgcacgaccatcgccctcttcatcgccggcgccatgctgacgaaacccccccacgcgttctccaccctgcaggccgtgctgatggccgcctcggcggggtcgttcaccaacctcaccgacgagtgcttcatcctcgaccgccgcgtcgtcggcggcatgcagtccgtctccgagcgcctcgccgccgacctcggcgaccgggtccacctgtcgaccccggtccgcacgatccgccgcctcggcgacggcggcgaggagggcgtggtcgtcgagtccgaccgcgtcaccgtccgcgcccgccgcgtcgtcgtcgccgtcccgccgccgctgttctcccgcatcagctacgacccgcccctgccgcgccgccagcaccagatgcaccagcacctctccatgggcctggtcatcaaggtccacgccgtctaccccacgccgttctggcgcgaggacgggctgtccggcaccgggttcggcacctccacgctggtgcaggaggtctacgacaacaccttccacggcgacgaccgcggcaccctcgtcgccttcgtctccgacgagaaggccgacgccgtgttcgccctgcccgccgaggagcgcaaggcgcgcgtcctcgcctccatcgccgcgttcctcggcgagcgcgccctcgaaccggacgtctactacgagtccgactgggccagcgaggagtggacccgcggcgcctacgccgccagcttcgacctcggcgggctcgcccgctacggcgccgaccagcgcacccccgtcggccccatccactgggcctgctccgacctcgccgccgagggctaccagcacgtcgacggagccctccgctccggccgcgacgccgccgccgacgtcgccggagccctcacccgggccacggcgtga

SEQ ID NO: 57716 - protein, 463 aa, Kineococcus radiotolerans SRS30216
MHSARTELTADVVVVGAGPAGLNTARHLTRAGHDVVVLEARDRVGGRTHTEEHDGVPLEIGGQWISPDQTELLGLLDELGMQTYQRYREGDSVHIAPDGTRTRYRGDTFPVADSTAKEIHRLTELMDDLVASVGAREPWAHPRALELDTISFHHWLRQQSDDEEACTTIALFIAGAMLTKPPHAFSTLQAVLMAASAGSFTNLTDECFILDRRVVGGMQSVSERLAADLGDRVHLSTPVRTIRRLGDGGEEGVVVESDRVTVRARRVVVAVPPPLFSRISYDPPLPRRQHQMHQHLSMGLVIKVHAVYPTPFWREDGLSGTGFGTSTLVQEVYDNTFHGDDRGTLVAFVSDEKADAVFALPAEERKARVLASIAAFLGERALEPDVYYESDWASEEWTRGAYAASFDLGGLARYGADQRTPVGPIHWACSDLAAEGYQHVDGALRSGRDAAADVAGALTRATA

SEQ ID NO: 57717 - DNA, 1422 bp, Synechococcus sp. WH 5701
  CDS (1)..(1422): transl_table=11
atgagtccccctgccgccaaagccgttgacgccgtggtggtgggagccggactctccggcctggtggcggcccgtgctctgcaggccgcgggccgctcggtgcggctgattgaggcggccgccacggtgggggggcggatgaccggtgagcgtctgcagctggttgctgaggcccctgaggctggatgttgcagcgcctggattgacctgggtggccagtgggtcggccccacccagacccgtgtgctggccctcctggaccgccacggcatccgccgtttcgagtccccccatgccggcgacacggtgctggtgttcggcgggagccgctgcaccttcgccggcttcttccagggcttccccgaaggccagcctcccgccgtgcccagcgccgactgggacgacgccatggcggccctggagcggttccagacgctggtggcccagctgccggaaggccacccccaccgccatcccgccgccgccgaactcgatcgccgcagcttccaggactggatcgacgagaacacccacacgcccttcgccgcctggtacttcgcttacttctgccgcgccgtcggctttctcggccccgctgagccggagcaggtgtcgctgttgcatgtgctctggggccagcgcaccgccccccagggcgagcatccggaggagtccctgctccacggcggtgccggccagctgccggccctgctggccggcgagttgggggagggggtgctgcggctgggcgagccggtgcgtgccattgagcaggtgtcccctgaggccgggcagccggtgcgggtgcacaccgatcgggccacctatccctgccgggccgtgatcgtggcgatgccgccggcgcatgcggcccatctgcgcttctcgccggagctgcccgatgaccgccagcagctcaacgacgagatggccatgggcgcctgcgccaaggtgatggtggtgtacgccagcccctggtggcggcagcaggggctgtcggggatcgccatcggcgatcggcccaccgtggagctctgcgccgacagctccgatcccgaaaacggctgtggcgtgctggctgccttcgtggtggggcatcgttaccagcgctgggccgctctggacgaagccaggcgcaggcaagcggtgctggctgatctggccgcctacctgggaccccaggccctcgagcccctggcctatgtggagaaggactggccgtcggtgccgttcgtggctggcgcctatgccggctggatgccgccggggctgtggacccgctgcggtgaggccatgcgccggccccacggccgggtgttctgggccggcaccgaggtggccgagcgctggcccggtttcttcgaaggcgcggtgcgcagcggtgaggaggcagcggcagcagtggtgcaacggcttggctga

SEQ ID NO: 57718 - protein, 473 aa, Synechococcus sp. WH 5701
MSPPAAKAVDAVVVGAGLSGLVAARALQAAGRSVRLIEAAATVGGRMTGERLQLVAEAPEAGCCSAWIDLGGQWVGPTQTRVLALLDRHGIRRFESPHAGDTVLVFGGSRCTFAGFFQGFPEGQPPAVPSADWDDAMAALERFQTLVAQLPEGHPHRHPAAAELDRRSFQDWIDENTHTPFAAWYFAYFCRAVGFLGPAEPEQVSLLHVLWGQRTAPQGEHPEESLLHGGAGQLPALLAGELGEGVLRLGEPVRAIEQVSPEAGQPVRVHTDRATYPCRAVIVAMPPAHAAHLRFSPELPDDRQQLNDEMAMGACAKVMVVYASPWWRQQGLSGIAIGDRPTVELCADSSDPENGCGVLAAFVVGHRYQRWAALDEARRRQAVLADLAAYLGPQALEPLAYVEKDWPSVPFVAGAYAGWMPPGLWTRCGEAMRRPHGRVFWAGTEVAERWPGFFEGAVRSGEEAAAAVVQRLG

SEQ ID NO: 57719 - DNA, 1434 bp, Aspergillus oryzae
  CDS (1)..(1434)
atggcgtctcagtcaaatatcggttcttccaagaccgttgacgtggtagtcatcggcgccggactcagcgggctacgggcagcgttgggtgtgcaagcagccggactctcttatgcagtagtagaagctattgatcgtgtaggaggtaagacactgaccgtgccgtccaagaaaagcggccccggtgtcaacgatgtcggcgccgcctggatcaatgacaccacgcaaagcgagatttataaacttgtccagaagtatggactgcaagtggaaacccaggaaatcccaggccatgatattttccaaagcccagagggctgtgttttgttcaagcatggtgaacttccggtgagcgaggaagacaaggcagcattggctcaagtgttggcgcattttaatgacctcgtttctgacgtcaacctggaagaccctggctcgggtcccaatgcgaaggagctggacagcgtcagtctgcaggaatactgtatccagactttccaatccgaattgattgcgggtctgtttgataccatcatccagtctctcattggcgtggaagccaaagatgtgagtctgttggctttcttgatctctctgaaggctggtaccggatttgaggccgtgacctcagacggcaagaatggaggccagcagctccgcgtgcgacagggcaaccaaaccatttcccagaatatggcgaaggaactaaagccaggttccattcacctctcaagtcctgtaaccgaaatcaaacaggacccagccacaggagcctgcacagtccacacatctaacaacacaaccttccacgcaaagaaagtcatcctatccgtcgcaactcccctctacaagaagattacgttcgatccacccctccctgaatacaaacaacttcttgtaaaagaaaacaaactaggttactacagcaaaatcatcttcgtctttgacagacccttctggcgagccgccggcctcaccggcgccatccaatcgcagacaggacccttcaccttcaccatggacaacagcttcccagatgacgaacagtggtccatcgcctgctttactgtagggcgccgtggtcgtgaatggtcccagctctcgcaggaggaaagacgtcagacagcatgggagcagctccgctccgcgcttgagaacactgatctcccatctggagaaaagatcaaggtcccggagcccatcaatgtgctcgagtatgagtggactaagcaggactttttccttggtggaccggagccgggttctcccccaggtgtgatttctcgggtgggtaaggatgctgtgagaaagccgtttggaagtgtgcattttgtggggacagagactgcgttgcattggaaggggtatatggaaggtgcggtaaggtcgggtgatagaggtgccaaggaggttgttgaggcactcactaaataa

SEQ ID NO: 57720 - protein, 477 aa, Aspergillus oryzae
MASQSNIGSSKTVDVVVIGAGLSGLRAALGVQAAGLSYAVVEAIDRVGGKTLTVPSKKSGPGVNDVGAAWINDTTQSEIYKLVQKYGLQVETQEIPGHDIFQSPEGCVLFKHGELPVSEEDKAALAQVLAHFNDLVSDVNLEDPGSGPNAKELDSVSLQEYCIQTFQSELIAGLFDTIIQSLIGVEAKDVSLLAFLISLKAGTGFEAVTSDGKNGGQQLRVRQGNQTISQNMAKELKPGSIHLSSPVTEIKQDPATGACTVHTSNNTTFHAKKVILSVATPLYKKITFDPPLPEYKQLLVKENKLGYYSKIIFVFDRPFWRAAGLTGAIQSQTGPFTFTMDNSFPDDEQWSIACFTVGRRGREWSQLSQEERRQTAWEQLRSALENTDLPSGEKIKVPEPINVLEYEWTKQDFFLGGPEPGSPPGVISRVGKDAVRKPFGSVHFVGTETALHWKGYMEGAVRSGDRGAKEVVEALTK

SEQ ID NO: 57721 - DNA, 1374 bp, Aspergillus oryzae
  CDS (1)..(1374)
atgttggacgttcttgtgattggagctggctttagcggcctccaggcagcctactcggctcagcaagctggtctctcgactgccgtggttgaagcccgggatcgggttgggggaaagatctggagcgtgccacttgcttcaggccgtggctacgctgagcttggcggagcatggatcaacaacagcctccaaccccgtgtctggaagtatgtagaaagatttggcctggaggttgtaacacagcggttggaaggaacggccgtcatgcaagaaactcaagacagtcgacttgaatttccatttggcgtttcgcccgattggtctgaggcggagaaaaacaacttggcatatatccgcgatcacatccaagcggaatctttgaaacctggcttgccaagtgcacaggatgacaatgttagtttggatcagtatgtccgcaatctcggtgccttgcccaaggttgccaacatggtgaatctctgggcacgggtcatgcatggcgtagagtccaccgaagagtcggcagcctggtttatcgactactgctgtcgcaataagggccttctagctatcagagcggatgattccactggcggacaatatatgagattcaaagacggagcacagtcaattgccgagggaattgctcgcttggtgggagcgcagaatattcacctaggatcaccagttgcttcggtcaacgagcacggctcacatgtcagcgtcgtcacccgtgatggaagaacgttcaatgccaggaagtgtatcttgtcgatccccagtaccatgtacaaggaactgagcatcacccctggtttgccccagcctgttcaggaggtcaccgacgggaccgtcctcggtgactataacaaggctatcgtttgttatgataggccatggtggcgtagcgagggattcaacggttacttcgcgagctacgcaggtcccgttatactggcaagagacaccagtgttgatgaacgaaaccacttctccttgacatgcttcgtcaatggtcagccagggcgtgattggagcaagttgtgtccccatgaacgtcgcgcagtggtcataaagcagatagcaaagatcttcaaagccgatgccaactcggaagccttccggccaattgaagtctttgatcaggtctggaagcacgaggaatttagcagaggcgccttggctcctatccatgcgcttgggcatctcaccaagtacgcatctgtgtatggtaaaccagtcggcaatcttcacttcgtggggacagaatatagcacagaatggaaaggatacatggagggagcgctttgctcgggagaaaggggggctcgtgaggtcgtggaagccgtgaagaaagtaccatcaaaattatga

SEQ ID NO: 57722 - protein, 457 aa, Aspergillus oryzae
MLDVLVIGAGFSGLQAAYSAQQAGLSTAVVEARDRVGGKIWSVPLASGRGYAELGGAWINNSLQPRVWKYVERFGLEVVTQRLEGTAVMQETQDSRLEFPFGVSPDWSEAEKNNLAYIRDHIQAESLKPGLPSAQDDNVSLDQYVRNLGALPKVANMVNLWARVMHGVESTEESAAWFIDYCCRNKGLLAIRADDSTGGQYMRFKDGAQSIAEGIARLVGAQNIHLGSPVASVNEHGSHVSVVTRDGRTFNARKCILSIPSTMYKELSITPGLPQPVQEVTDGTVLGDYNKAIVCYDRPWWRSEGFNGYFASYAGPVILARDTSVDERNHFSLTCFVNGQPGRDWSKLCPHERRAVVIKQIAKIFKADANSEAFRPIEVFDQVWKHEEFSRGALAPIHALGHLTKYASVYGKPVGNLHFVGTEYSTEWKGYMEGALCSGERGAREVVEAVKKVPSKL

SEQ ID NO: 57723 - DNA, 1566 bp, Crassostrea gigas
  CDS (1)..(1566)
atgactatggaggaagatcagctggtggatgttattgttgtaggggcaggtctgagtggtttggcggctgctaagcttttacaagagacaggactggatgtgttggttcttgaagcacgtgacagagtgggtggacggacacttacagagcacaactctcatgttggctatgttgatttgggcggagcctatgttggtccaacacagaacagactcctgcgtctggcggatgaattcgggattaaaacttattttaccaatgaagtggaagacctggtgttttacactaaggggaaatccaagaggtaccacggcgccttttccccagcaagtgggtttttcgagtatttggacatgaataattttttcagacttttggataaaatgggtgaagagattcctcccgatgccccttggagggccccacatgccaaagaatgggaccaaatgaccatgcagcaatttcttgacaaacatgtttggaccaaacaaatctaccgcttctgtaaaaccttcgtcagtgttaacgtcacttcggagccctatgaagcctcagtactttggtttctgtggtatatcaaatgttgtggcggacaaaagcgaattttctcaacaacaaatggcggacaggagagaaagtttgttggcggctcacaacaaatcagcaaaagaattgccgaaaagctgggcaacgaccgagtcctcctgagtcaccctgtgtgccatatcagccagacaactgatggagtgacggtgtccgttactggtggacaacaattcagggctaaacgtgtcattattgcctctccgctacctttacaaaataagatcacatatgaccctcccttgccaagtcttaggaatcaattaatacaaagaatcccgatgggttccgtcatcaaaacattttgctactacaagacccctttttggaaggagaaaggttattgtgggtccactgcaatagacgatgatgcagccatagttgaattcacattggatgatacgaagcatgacggaagtcacccagcgttaatgggatttgttcttgcagataaggcaaaacgttttgtttctatgacaccggaagagaaaaaagagagtatatgtcgtctgtatgctaaagtcttcaaatcagacgaagcgttatatccaatacactatgaagagaagaactggctcggggaacagtggtctgggggttgttacacagccatgatgcccccgggattcctgaccaacttcggcgaagaaataagaagacccgttggtaatttatatttcgcggggacagagacagccacccagtggtcggggtacatggaaggggcggtccaggccggggagagggcggccagagagattttatttgacatgaaaaaaattcccaaatatgaaatttggcaagacgaagaagagaatactcttgtgagagcccgtccgtttgagagcacgttttgggagagaaacctaccgtcagttggggggtttctgaagtgtgtatccgttacaacagctttagcagtcggatcggcgggactgtgtctttattggtggaaacgttaa

SEQ ID NO: 57724 - protein, 521 aa, Crassostrea gigas
MTMEEDQLVDVIVVGAGLSGLAAAKLLQETGLDVLVLEARDRVGGRTLTEHNSHVGYVDLGGAYVGPTQNRLLRLADEFGIKTYFTNEVEDLVFYTKGKSKRYHGAFSPASGFFEYLDMNNFFRLLDKMGEEIPPDAPWRAPHAKEWDQMTMQQFLDKHVWTKQIYRFCKTFVSVNVTSEPYEASVLWFLWYIKCCGGQKRIFSTTNGGQERKFVGGSQQISKRIAEKLGNDRVLLSHPVCHISQTTDGVTVSVTGGQQFRAKRVIIASPLPLQNKITYDPPLPSLRNQLIQRIPMGSVIKTFCYYKTPFWKEKGYCGSTAIDDDAAIVEFTLDDTKHDGSHPALMGFVLADKAKRFVSMTPEEKKESICRLYAKVFKSDEALYPIHYEEKNWLGEQWSGGCYTAMMPPGFLTNFGEEIRRPVGNLYFAGTETATQWSGYMEGAVQAGERAAREILFDMKKIPKYEIWQDEEENTLVRARPFESTFWERNLPSVGGFLKCVSVTTALAVGSAGLCLYWWKR

SEQ ID NO: 57725 - DNA, 1365 bp, Mycobacterium bovis
  CDS (1)..(1365): transl_table=11
atgcggttgactagagcggtgacaaacccaccgtggactgtcgatgttgtcgtggtgggcgcgggcttcgccgggctggccgcggcccgcgagctgacgcgacagggtcacgaggtgctggtgttcgaaggccgcgatcgggtgggcggccgctcgttaaccggtcgcgtggcaggggtgcccgcggatatgggcggctcgttcatcggcccgacccaagacgccgtgctggcgttggccaccgagctggggatcccgacaaccccgacccaccgcgacggccgaaacgtcatccagtggcggggatcggcacgcagctatcgtggcaccatccccaagctgtcgctgaccgggctcatcgacatcggccggttgcgttggcaattcgagcgaattgcccgcggcgttccggtggccgccccctgggatgcgcggcgcgcgcgtgaactcgacgacgtgtcgctcggggagtggttgcgcttggtgcgcgccacatcgtcctcgcggaacctgatggccatcatgacccgggtgacctggggttgtgagcccgacgatgtctcgatgctgcacgccgcccgctacgtacgcgcggccggcggcctggaccggctgctcgacgtcaaaaatggtgcccagcaggaccgtgtgccgggggggacacagcagatcgcccaggcggccgccgcccaactcggcgcacgcgtcctgctcaacgccgcggtgcgtcgcatcgaccggcacggagcgggtgtgacggtcacgtccgatcagggtcaggccgaggccgggttcgtcatcgtcgccattccaccggcccatcgcgtggccatcgagttcgatcccccgctgccgccggaatatcagcagctcgcccaccattggccgcagggccggctgagcaaggcctacgcggcctattcgacgccgttctggcgggccagcgggtattccggccaggcgctgtccgatgaggcgccggtgttcatcaccttcgacgtcagtccgcacgccgacgggccaggcattctgatggggttcgtcgatgctcgcgggttcgactcgctacccatcgaagagcgccgccgcgatgcattgcgctgctttgcgtcgctgttcggcgacgaagcgctcgacccccttgattatgttgactatcgttggggtacagaggaattcgcgccgggtggtccgaccgcggcggtaccgccggggtcgtggacgaaatacggtcactggttacgtgagccggtcggtccgattcactgggcgagcactgagaccgcggacgaatggaccgggtatttcgacggcgccgtcagatccggtcagcgtgccgccgccgaggtcgccgccctgctatga

SEQ ID NO: 57726 - protein, 454 aa, Mycobacterium bovis
MRLTRAVTNPPWTVDVVVVGAGFAGLAAARELTRQGHEVLVFEGRDRVGGRSLTGRVAGVPADMGGSFIGPTQDAVLALATELGIPTTPTHRDGRNVIQWRGSARSYRGTIPKLSLTGLIDIGRLRWQFERIARGVPVAAPWDARRARELDDVSLGEWLRLVRATSSSRNLMAIMTRVTWGCEPDDVSMLHAARYVRAAGGLDRLLDVKNGAQQDRVPGGTQQIAQAAAAQLGARVLLNAAVRRIDRHGAGVTVTSDQGQAEAGFVIVAIPPAHRVAIEFDPPLPPEYQQLAHHWPQGRLSKAYAAYSTPFWRASGYSGQALSDEAPVFITFDVSPHADGPGILMGFVDARGFDSLPIEERRRDALRCFASLFGDEALDPLDYVDYRWGTEEFAPGGPTAAVPPGSWTKYGHWLREPVGPIHWASTETADEWTGYFDGAVRSGQRAAAEVAALL

SEQ ID NO: 57727 - DNA, 1554 bp, Zea mays
  CDS (1)..(1554)
atgcggagggaaggacgcgctgttcgtcgagctgtggaaggcctgcgcggggccgctgtcctgcgtgccgccgcttggggagaaggtctactacctcccgcagggccacatcgagcaggccttttgctcccgaccatcgagaggcggtgcacgtcgcctccatccgtcattgtcatcggcggtggcatctcgggcgttgcagctgcccgtgccctctccaattcttcatttaaggtgactgttttggaatcgagagatcgtattggcgggcgcattcatactgataactcgtttggatgcccaattgatatgggagcctcatggctacacggcgtgtgcaatgagaatccactggcaccattgataagctatcttgggctgaggttataccgcacaagcgatgataactcagttctgtatgatcatgatttagaaagctatgctctctttgataaggatggtaatcaggtcccaaaggagacagtcgataaagttggagaaacattcgagagaattcttgaagagacggtgaaagtgcgcgatgagcaggaacacgacatgccactgctacaggcaatttctattgtgtttgagaggcacccccatctaaagcttgaagggctagatgatcaggtcttacaatggtgtgtctgccggcttgaggcatggtttgctgcagatgcagatgaaatatctctgaagaactgggatcaggagcgtgttcttactggtggacatggactgatggtaaatgggtactatcctgttattgaagctcttgctcaaggtcttgacatcaggcttaaccaaagggtcaccgaaattacccgccagcacaatggagtcaaggtcactactgaagatggcacaagctacttggccgacgcctgcataatctcagtgccactcggcgtgctcaaggcgaacgtaataaagttcgagcctgagctgccccagtggaagagctccgccatcgccgacctcggcgtgggcaccgagaacaagatcgccatgcacttcgacagggtcttttggcccaacgtcgaggtgctgggaatggtcgggccgacgcccaaagcctgtgggtacttcctgaacctgcacaaagccaccggcaatccggtcctcgtgtacatggccgccggaaggttcgcccaggaggtggagaagctgtcggacaaggaagccgtcggcctggtcgtttctcacctgaagaagatgctcccggatgccactgaaccgacgcagtacctggtgtcgcgatggggctccgaccccaactccctggggtcctactcgtgcgacctggtcgcgaagccggccgacgtgtgcgcgaggttcgccgcccccgtcgagaacctgcacttcgccggcgaggcggccagtgccgagcactcggggtccgtgcacggcgcctactcgtcgggcatcgccgctgccgaggaatgcaggaagcggctcctggcgctgaagggcatcccggacctggtccaggtcgcggcgtgggaggagatggccggagctgtggctcctctgcagatttgcaggacctga

SEQ ID NO: 57728 - protein, 517 aa, Zea mays
MRREGRAVRRAVEGLRGAAVLRAAAWGEGLLPPAGPHRAGLLLPTIERRCTSPPSVIVIGGGISGVAAARALSNSSFKVTVLESRDRIGGRIHTDNSFGCPIDMGASWLHGVCNENPLAPLISYLGLRLYRTSDDNSVLYDHDLESYALFDKDGNQVPKETVDKVGETFERILEETVKVRDEQEHDMPLLQAISIVFERHPHLKLEGLDDQVLQWCVCRLEAWFAADADEISLKNWDQERVLTGGHGLMVNGYYPVIEALAQGLDIRLNQRVTEITRQHNGVKVTTEDGTSYLADACIISVPLGVLKANVIKFEPELPQWKSSAIADLGVGTENKIAMHFDRVFWPNVEVLGMVGPTPKACGYFLNLHKATGNPVLVYMAAGRFAQEVEKLSDKEAVGLVVSHLKKMLPDATEPTQYLVSRWGSDPNSLGSYSCDLVAKPADVCARFAAPVENLHFAGEAASAEHSGSVHGAYSSGIAAAEECRKRLLALKGIPDLVQVAAWEEMAGAVAPLQICRT

SEQ ID NO: 57729 - DNA, 23 bp, Artificial sequence
  primer
atggtgatacgatcaggcaaaac

SEQ ID NO: 57730 - DNA, 20 bp, Artificial sequence
  primer
ttaaagtagaccgataatgg

SEQ ID NO: 57731 - protein, 524 aa, Artificial sequence
  consensus sequence
  Variant (3)..(5): Xaa in position 3 to 5 is any amino acid
  Variant (9)..(10): Xaa in position 9 to 10 is any amino acid
  Variant (13)..(13): Xaa in position 13 is any amino acid
  Variant (16)..(17): Xaa in position 16 to 17 is any amino acid
  Variant (19)..(21): Xaa in position 19 to 21 is any amino acid
  Variant (23)..(26): Xaa in position 23 to 26 is any amino acid
  Variant (27)..(28): Xaa in position 27 to 28 is any or no amino acid
  Variant (30)..(30): Xaa in position 30 is any amino acid
  Variant (33)..(34): Xaa in position 33 to 34 is any amino acid
  Variant (36)..(36): Xaa in position 36 is any amino acid
  Variant (40)..(52): Xaa in position 40 to 52 is any amino acid
  Variant (53)..(63): Xaa in position 53 to 63 is any or no amino acid
  Variant (66)..(66): Xaa in position 66 is any amino acid
  Variant (68)..(71): Xaa in position 68 to 71 is any amino acid
  Variant (72)..(72): Xaa in position 72 is any or no amino acid
  Variant (74)..(78): Xaa in position 74 to 78 is any amino acid
  Variant (79)..(79): Xaa in position 79 is any or no amino acid
  Variant (81)..(93): Xaa in position 81 to 93 is any amino acid
  Variant (94)..(94): Xaa in position 94 is any or no amino acid
  Variant (96)..(135): Xaa in position 96 to 135 is any amino acid
  Variant (136)..(157): Xaa in position 136 to 157 is any or no amino acid
  Variant (159)..(165): Xaa in position 159 to 165 is any amino acid
  Variant (166)..(167): Xaa in position 166 to 167 is any or no amino acid
  Variant (169)..(227): Xaa in position 169 to 227 is any amino acid
  Variant (228)..(242): Xaa in position 228 to 242 is any or no amino acid
  Variant (245)..(252): Xaa in position 245 to 252 is any amino acid
  Variant (254)..(255): Xaa in position 254 to 255 is any amino acid
  Variant (257)..(259): Xaa in position 257 to 259 is any amino acid
  Variant (260)..(262): Xaa in position 260 to 262 is any or no amino acid
  Variant (264)..(265): Xaa in position 264 to 265 is any amino acid
  Variant (268)..(269): Xaa in position 268 to 269 is any amino acid
  Variant (271)..(276): Xaa in position 271 to 276 is any amino acid
  Variant (277)..(280): Xaa in position 277 to 280 is any or no amino acid
  Variant (282)..(295): Xaa in position 282 to 295 is any amino acid
  Variant (296)..(304): Xaa in position 296 to 304 is any or no amino acid
  Variant (306)..(319): Xaa in position 306 to 319 is any amino acid
  Variant (320)..(321): Xaa in position 320 to 321 is any or no amino acid
  Variant (323)..(323): Xaa in position 323 is any amino acid
  Variant (326)..(337): Xaa in position 326 to 337 is any amino acid
  Variant (339)..(341): Xaa in position 339 to 341 is any amino acid
  Variant (342)..(342): Xaa in position 342 is any or no amino acid
  Variant (344)..(347): Xaa in position 344 to 347 is any amino acid
  Variant (349)..(350): Xaa in position 349 to 350 is any amino acid
  Variant (355)..(356): Xaa in position 355 to 356 is any amino acid
  Variant (358)..(359): Xaa in position 358 to 359 is any amino acid
  Variant (361)..(386): Xaa in position 361 to 386 is any amino acid
  Variant (387)..(406): Xaa in position 387 to 406 is any or no amino acid
  Variant (408)..(432): Xaa in position 408 to 432 is any amino acid
  Variant (433)..(438): Xaa in position 433 to 438 is any or no amino acid
  Variant (440)..(443): Xaa in position 440 to 443 is any amino acid
  Variant (444)..(453): Xaa in position 444 to 453 is any or no amino acid
  Variant (455)..(461): Xaa in position 455 to 461 is any amino acid
  Variant (463)..(469): Xaa in position 463 to 469 is any amino acid
  Variant (471)..(474): Xaa in position 471 to 474 is any amino acid
  Variant (475)..(477): Xaa in position 475 to 477 is any or no amino acid
  Variant (480)..(489): Xaa in position 480 to 489 is any amino acid
  Variant (490)..(493): Xaa in position 490 to 493 is any or no amino acid
  Variant (495)..(495): Xaa in position 495 is any amino acid
  Variant (497)..(501): Xaa in position 497 to 501 is any amino acid
  Variant (503)..(503): Xaa in position 503 is any amino acid
  Variant (505)..(508): Xaa in position 505 to 508 is any amino acid
  Variant (510)..(510): Xaa in position 510 is any amino acid
  Variant (512)..(512): Xaa in position 512 is any amino acid
  Variant (513)..(514): Xaa in position 513 to 514 is any or no amino acid
  Variant (517)..(519): Xaa in position 517 to 519 is any amino acid
  Variant (521)..(523): Xaa in position 521 to 523 is any amino acid
DVXXXGAGXXGLXAAXXLXXXGXXXXXXVXEAXXRXGGRXXXXXXXXXXXXXXXXXXXXXXXXGGXWXXXXXQXXXXXXLXXXXXXXXXXXXXXGXXXXXXXXXXXXXXXXXXXXXXXXXXXXXXXXXXXXXXXXXXXXXXXXXXXXXXXXXXXXXXPXXXXXXXXXDXXXXXXXXXXXXXXXXXXXXXXXXXXXXXXXXXXXXXXXXXXXXXXXXXXXXXXXXXXXXXXXXXXXXXXXXXXGGXXXXXXXXAXXLXXXXXXLXXPVXXIXXXXXXXXXXVXXXXXXXXXXXXXXXXXXXXXXXIXXXXXXXXXXXXXXXXPXLPXXXXXXXXXXXXGXXXXKXXXXYXXPFWRXXGXXGXXXXXXXXXXXXXXXXXXXXXXXXXXXXXXXXXXXXXXXXXXXXXXFXXXXXXXXXXXXXXXXXXXXXXXXXXXXXXXGXXXXXXXXXXXXXXPXXXXXXXWXXXXXXXGXXXXXXXPGXXXXXXXXXXXXXXPXGXXXXXGXEXXXXWXGXXXGAXXXGXXXA

SEQ ID NO: 57732 - protein, 14 aa, Artificial sequence
  protein pattern
  Variant (2)..(3): Xaa in position 2 to 3 is any or no amino acid
  Variant (5)..(5): Xaa in position 5 is any or no amino acid
  Variant (7)..(7): Xaa in position 7 is Ala, Gly or Ser
  Variant (8)..(8): Xaa in position 8 is any amino acid
  Variant (9)..(9): Xaa in position 9 is Ala, Asp or Glu
  Variant (10)..(10): Xaa in position 10 is Asn or Arg
  Variant (11)..(11): Xaa in position 11 is Ile, Leu or Val
  Variant (14)..(14): Xaa in position 14 is Lys or Arg
VXXVXEXXXXXGGX

SEQ ID NO: 57733 - protein, 14 aa, Artificial sequence
  protein pattern
  Variant (2)..(2): Xaa in position 2 is any amino acid
  Variant (3)..(3): Xaa in position 3 is any or no amino acid
  Variant (5)..(5): Xaa in position 5 is any amino acid
  Variant (6)..(6): Xaa in position 6 is Ile, Leu or Val
  Variant (7)..(7): Xaa in position 7 is any amino acid
  Variant (8)..(8): Xaa in position 8 is Phe or Trp
  Variant (9)..(9): Xaa in position 9 is Ala, Cys, Ser or Val
  Variant (10)..(10): Xaa in position 10 is Gly or Ser
  Variant (11)..(11): Xaa in position 11 is Ala or Thr
  Variant (13)..(13): Xaa in position 13 is any amino acid
  Variant (14)..(14): Xaa in position 14 is Ala or Ser
PXXGXXXXXXXEXX

SEQ ID NO: 57734 - DNA, 1437 bp, Synechocystis sp.
  CDS (1)..(1437): transl_table=11
atgcaagcaacgatgagtcaggattttgattacgatttggtgattattggcgctggcgttggcggccatggggctgctctccacgccgttaaatgtggtctgaaaaccgccatcatcgaagctaaagatatgggcggcacctgtgtgaatcggggttgtatcccttccaaagctctcctcgccgcctccggtcgggtgcgggaaatgtccgaccaagatcatttgcaacaactaggtatccagatcaatggcgttaccttcaccagggaggcgatcgctgcccatgccaacgaccttgtgagtaaaatccaatctgacctgaccaatagcctcacccgtctcaaagtcgataccatccggggttggggtaaagtatccggcccccaggaagtgacggtgatcggggacaacgaaacccgcattctcaaagcaaaagagatcatgttatgcccaggctcggtgccctttgtgccccccggcattgaaattgaccataaaactgtctttaccagtgatgaagcagtgaagttggaaacgttgccccagtggattgccatcattggtagtggttacattggcttggaattttccgacgtttacaccgccctcggttgtgaagtgaccatgattgaagccctgccggatctgatgccagggtttgatccggaaattgccaaaattgccgaacgggtgctgattaaatcccgggacattgaaacctataccggcgtatttgccaccaaaatcaaagcaggttcccctgtggaaattgaactcaccgacgccaaaacaaaagaagtgattgacaccctggaagtggatgcttgtttagtcgccactggccgcattcctgccaccaaaaatttagggctggaaacggtgggagtggaaaccgatcgccggggtttcattgaagttaacgaccaaatgcaagtgattaaggatggcaaaccggtgccccatctctgggcggtgggagatgccacgggcaaaatgatgctggcccatgccgcttctggccaaggagtggtggcagtggaaaatatctgcggccgcaaaactgaggtggactaccgagccattccggcggcggccttcacccatcctgaaattagctacgtgggtttaacggaagctcaagccaaagagctaggggaaaaggaaggatttgtggttagtacggccaaaacttactttaaggggaactccaaagctctagcagaaaaggaaaccgacggcattgccaaagtggtttaccgccaggataccggggaattattgggtgcccacattatcggtattcatgcatcggacctaatccaagaggcggcccaggcgatcgccgaccgcaaatcagtgcgggaattggccttccatgtccatgcccaccccaccctgtcggaagtgttggacgaagcgtataaacgggcggtttaa

SEQ ID NO: 57735 - protein, 478 aa, Synechocystis sp.
MQATMSQDFDYDLVIIGAGVGGHGAALHAVKCGLKTAIIEAKDMGGTCVNRGCIPSKALLAASGRVREMSDQDHLQQLGIQINGVTFTREAIAAHANDLVSKIQSDLTNSLTRLKVDTIRGWGKVSGPQEVTVIGDNETRILKAKEIMLCPGSVPFVPPGIEIDHKTVFTSDEAVKLETLPQWIAIIGSGYIGLEFSDVYTALGCEVTMIEALPDLMPGFDPEIAKIAERVLIKSRDIETYTGVFATKIKAGSPVEIELTDAKTKEVIDTLEVDACLVATGRIPATKNLGLETVGVETDRRGFIEVNDQMQVIKDGKPVPHLWAVGDATGKMMLAHAASGQGVVAVENICGRKTEVDYRAIPAAAFTHPEISYVGLTEAQAKELGEKEGFVVSTAKTYFKGNSKALAEKETDGIAKVVYRQDTGELLGAHIIGIHASDLIQEAAQAIADRKSVRELAFHVHAHPTLSEVLDEAYKRAV

SEQ ID NO: 57736 - DNA, 1779 bp, Oryza sativa
  CDS (84)..(1595)
gctcctctttcttggagcaaaagaagaaaaaaaaataaatccaataacaccacaaggagcccgaagcgaggagagagagagagatggcgctcgcaatcctggcgaggaggcgggcggcggaggcgctgctgcggcggccgctgggggcggcgggggtgtcggcgctgagggcgtcgtacgcggcggtggcgggggaggagagcgacgtggtggtggtgggcggcgggccgggagggtacgtggcggcgatcaaggcggcgcagctggggctcaagaccacctgcatcgagaagaggggcaccctcggcgggacatgcctcaacgtcggctgcatcccctccaaggctctgttgcactcatctcatatgtaccatgaagcaaaaagttcctttgcacaccatggagtgaaattttccaatctggaggtagacctcccagctatgatggcacagaaagacaaggctgtggcaggcctgactaaggggattgaaggtctcttcaagaagaacaaagtgacgtatgtcaaaggctttgggaaacttgcttcgccctcagaggtgtctgttgatctgagcgatggtggcagcacagttgtcaaagggaaaaacataatcattgctacagggtctgatgtaaaatcactccctggagtcacaattgatgagaagaaaatcgtctcatctactggggccttgtgcttgtcagagattccaaagaaattggtggttattggaacaggttacattggtctggagatgggttcggtctggaaccgccttggttcagaggtcaccgttgttgaatttgccccagatatagatccatcaatggatggtgaagtcaggaagcagttccagcgcatgttggagaagcagaagatgaagttcatgctcaagacaaaggtagttggggttgatacctccggagatggtgtgaagctaacacttgaacctgcagctggaggtgagcagagtgtcattgaagctgatattgtattggtttctgctggaagagtcccatatactgctggtattgggttggaaagtgttggtgttgagacagacaaagctggcaggatcctcgtggataagcgcttcatgactaacgtcaatggagtctatgcaattggggatgccatccctgggcccatgcttgcccacaaagctgaagaggatggtgttgcctgtgttgagttcattgctggcaaggaggggcacgtcgactatgacacagtgcctggtgtggtctatacacatccagaggtcgcgtctgttggaaagactgaagagcaggtgaaagctttaggaattccctaccgtgttggcaaatttccgctgttggcaaacagccgtgcaaaggccattgacgatgctgagggcttggtgaaggtggtggctgagaaggaaactgacaagattctgggcgtgcatatcatggctcccggtgctggagagataatacatgaggctgtccttgctttgcagtatggagcatcaagtgaggacatagctcgtacatgccacgctcatcccaccgtgagcgaagccttgaaggaggcctgcctgcaaaccttcacaaaggcgattcacatttaagttctgttttgcttttaacatccaaactgcttggcttcacaaattccaaaattttgtaataattttggatatatgggatcaaaaagccactgtctgtcattttactctcgttcgtgatgctgtgaattgacactagttgccacagccaatagtatatgctattgattccattcccttagatgcc

SEQ ID NO: 57737 - protein, 503 aa, Oryza sativa
MALAILARRRAAEALLRRPLGAAGVSALRASYAAVAGEESDVVVVGGGPGGYVAAIKAAQLGLKTTCIEKRGTLGGTCLNVGCIPSKALLHSSHMYHEAKSSFAHHGVKFSNLEVDLPAMMAQKDKAVAGLTKGIEGLFKKNKVTYVKGFGKLASPSEVSVDLSDGGSTVVKGKNIIIATGSDVKSLPGVTIDEKKIVSSTGALCLSEIPKKLVVIGTGYIGLEMGSVWNRLGSEVTVVEFAPDIDPSMDGEVRKQFQRMLEKQKMKFMLKTKVVGVDTSGDGVKLTLEPAAGGEQSVIEADIVLVSAGRVPYTAGIGLESVGVETDKAGRILVDKRFMTNVNGVYAIGDAIPGPMLAHKAEEDGVACVEFIAGKEGHVDYDTVPGVVYTHPEVASVGKTEEQVKALGIPYRVGKFPLLANSRAKAIDDAEGLVKVVAEKETDKILGVHIMAPGAGEIIHEAVLALQYGASSEDIARTCHAHPTVSEALKEACLQTFTKAIHI

SEQ ID NO: 57738 - DNA, 2108 bp, Oryza sativa
  CDS (43)..(1728)
ttctggcacgagggtcgccccccacgcgctcacctcgccgccatgtactccacggctatctcgctctccgccgccgccaccgccgccgcggcggtcggcggcgcccggccaggcgcgatccggccggcggagctccgcttctgcggcctccgccgcgaggccctcgggctccgctcgctgcgggccccgccgcgagcggccgccacgccgcggaaggcggcggcggctactgggaatggtgcggccgggagcggcgggttcgactacgacctcgtgatcattggggcgggcgtcggcgggcacggcgcagctctccacgccgtcgagaagggtctgaaaactgccataattgagggggatgttgtaggtgggacttgtgtgaacagaggttgtgttccgtcgaaggcacttcttgctgtcagcggtcggatgagggaacttcaagatgaacaccacatgaaatcgttgggtctacaggtttcaacagctggatatgataggcaggctgttgcagatcatgcaaataatctggcctctaaaattcgtagcaacttgactaattcgatgaaagctttgggtgtggatatattgactggttttggcaccattgtgggaaaacaaaaagtgagatatggaaaagttggttttcctgacaatgaaatcactgccagaaatatcattattgcaacggggtctgttccttttgtccccaatggcatcgaaatagatggtaaaaccgtatttactagtgatcatgcactaaaacttgagtcagttcctgactggattgctatcgtgggaagcggttacattggactggaattcagtgatgtatacacggctctgggaagtgaggttacttttgttgaagcacttgatcagttgatgcctggttttgatcctgagattgcaaaattggcccaaaggattcttatcaatcctcggaatatagactatcacactggtgtttttgcaagcaagattactccagcaaaggatggaaaacctgtgttgattgagttaattgatgcaaagacaaaggaacacaaggaaacacttgaggtggatgcagctctcatagctaccggaagggcaccgttcaccaaagggcttggcttggaaaatgtcaacgttgttacacaacgcggttttgttcctgttgatgagcggatgcaagttatggacgcagatggcaatgcggttccaaatttgtattgtattggagatgccaatggcaaactcatgctggctcatgctgccagtgcacaaggaatctcagttgttgagcgaatctctgggaaagacaacatcctaaatcatctaagcatcccggctgcctgtttcactcatccggagattagtatggttgggctaacagagccacaagcgagagaaaaggctgataaggaaggatttgagataagtgttgttaagaccagcttcaaggcaaacacgaaggctctggctgagaatgaaggagatggacttgctaagatgatttaccggcctgacactggagaaattcttggagttcacatattaggtttgcatgctgctgacctcatccacgaggcatcaaacgccattgccctcggaactcgtgtacaagacatcaagtttgctgttcatgcacacccaactttgtctgaggttctggatgagctcttcaaagctgccaaggttaatgcaggtgttcctcattccgtaaatgagcccgtcgcagcctagagaggaacatcatctgggctagccaagcccctcttggaggtccttgattcctgctcacttcccagacgaaatcggcaactgtagttaagtgaggagcctctgacgaactcgaggcaaaaaggttcatagcgccgatctttctgtagcttccatctgtgtatgaacatttccagatttttgtagtttttcgtttggtttaattatacgaggggcttaattatacgaactcgaggcaaaaaggttgattgtcatgtaatatgtagccctggtgtagacttgatcgaaataatcagttctgctgctggtcctgtgtatcataaaaataatttatctgctcagcttaaatatgttatataggacggaatttcagaattcggaag

SEQ ID NO: 57739 - protein, 561 aa, Oryza sativa
MYSTAISLSAAATAAAAVGGARPGAIRPAELRFCGLRREALGLRSLRAPPRAAATPRKAAAATGNGAAGSGGFDYDLVIIGAGVGGHGAALHAVEKGLKTAIIEGDVVGGTCVNRGCVPSKALLAVSGRMRELQDEHHMKSLGLQVSTAGYDRQAVADHANNLASKIRSNLTNSMKALGVDILTGFGTIVGKQKVRYGKVGFPDNEITARNIIIATGSVPFVPNGIEIDGKTVFTSDHALKLESVPDWIAIVGSGYIGLEFSDVYTALGSEVTFVEALDQLMPGFDPEIAKLAQRILINPRNIDYHTGVFASKITPAKDGKPVLIELIDAKTKEHKETLEVDAALIATGRAPFTKGLGLENVNVVTQRGFVPVDERMQVMDADGNAVPNLYCIGDANGKLMLAHAASAQGISVVERISGKDNILNHLSIPAACFTHPEISMVGLTEPQAREKADKEGFEISVVKTSFKANTKALAENEGDGLAKMIYRPDTGEILGVHILGLHAADLIHEASNAIALGTRVQDIKFAVHAHPTLSEVLDELFKAAKVNAGVPHSVNEPVAA

SEQ ID NO: 57740 - DNA, 2186 bp, Zea mays
  CDS (118)..(1815)
gcacgagcataaacccctcctcgcctcctccgcccgagcctgcctcctcatcgacttatacgcctccttctcttaactcgacgcactagcctcagccaattgtcgcatttcgtcgctatggggtccacagcggccgtctccgtctccgcctcggcgatcgcgtcccgcggctgcgccagatccgaggctgcgcggcggccaggtggaatccgggtctgcggactccggagcgaggtcctcacgtgtcactcgcttcggatctcgcaggcgcccgcgaggctgacggtggcgaggccgccgccgccggcggcggcgaccaatggcgcggcggcggggacctgcgggttcgactacgatctcgtcatcatcggcgcgggcgtcgggggtcacggcgccgcgctgcacgccgttgaagagggcttaaaaacagcaataattgagggagatgttgtgggtgggacttgtgtaaacagaggctgtgtcccatcgaaagcgcttcttgctgtcagcggtcgaatgcgggagcttcatgatgaacatcatatgaagtctttgggtctacaggtttcctctcctggatatgacagacaagctgttgctgatcatgcaaacaatcttgcctcgaaaatccgtatgaacttgactaactcaatgaaagctctaggagtggatatattgacaggtgttggcactattgtgggaaagcaaaaagtacgatatggaaaagctggtttcccagataaagaaatcactgccaggaacatcataattgccactggttcagttccttttgttccgaaagggattgagattgatgggaaaactgtatttactagtgatcatgcactgaaacttgagtcagttccagactggatagctattgttggaagtggttacattggacttgagttcagtgatgtatacacagctcttggaagtgaggttacttttgttgaagctcttgaccagctgatgcctggatttgatcctgaaattgcaaaattagcccagagagttcttatcaatcctcggaaaattgactatcacactggtgtttttgcaagcaagattactcctgcaaaggatgggaaacctgtgctcatcgagcttattgatgcaaagacaaaggagcacaaagaaacccttgaggttgacgcagcccttatagctacaggaagggcgccattcaccaaagggcttggcttggaaaacatcaatgttgttacacaacgtggttttgtgcctgttgatgaacggatgcgagtcatggatgcagatggcaatgtggtacccaatttatattgcattggagatgccaatggcaagctcatgcttgcccatgctgccagtgcacaaggaatttcagttgttgaacaaatctctggaaaggatcacatcctaaatcatttaagcatcccagcagcatgtttcacccatccagagattagtatggttggactgacagagccacaagccagagagaaggcagataaagaaggatttgaggtaaatgttgtgaagactagctttaaggctaacactaaagctttggcagaaaatgaaggagatgggattgctaagttgatttaccgacctgacacgggtgaaattcttggggttcacattttgggtttgcatgctgctgatctcattcacgaggcatcaaatgccatcgccctaggaactcgtgtgcaagacatcaagtttgctgttcacgcacaccctacattgtctgaggtcctggatgaactcttcaaagcagccaaggttaattccggtgtttctcattctgtaaatgaaccagttgcagcctagagaaaggccggatagcaagccaaggcagccaccccaaccactcctgaaggtcctcagcttcgtcacgaccctgttttcttccccaaaacgagattgacaacggtaacggggagggtgttgttgtaggcagttgctgtaggttacaaatttgaggaagaaattcatcagtgaatacaagcacacaaatgtttcttttttgggtccagattgttaaaagggtcttttttttgacggtggggtgggtttttgttggcttcgttatttgcatatttgttgttggttgccctgtaagatgaagtgccgaggctagctcagctagtttgaaataattcatgtttcaaaaaaaaaaaaaaaaaaaaaaaaaaaaaaaa

SEQ ID NO: 57741 - protein, 565 aa, Zea mays
MGSTAAVSVSASAIASRGCARSEAARRPGGIRVCGLRSEVLTCHSLRISQAPARLTVARPPPPAAATNGAAAGTCGFDYDLVIIGAGVGGHGAALHAVEEGLKTAIIEGDVVGGTCVNRGCVPSKALLAVSGRMRELHDEHHMKSLGLQVSSPGYDRQAVADHANNLASKIRMNLTNSMKALGVDILTGVGTIVGKQKVRYGKAGFPDKEITARNIIIATGSVPFVPKGIEIDGKTVFTSDHALKLESVPDWIAIVGSGYIGLEFSDVYTALGSEVTFVEALDQLMPGFDPEIAKLAQRVLINPRKIDYHTGVFASKITPAKDGKPVLIELIDAKTKEHKETLEVDAALIATGRAPFTKGLGLENINVVTQRGFVPVDERMRVMDADGNVVPNLYCIGDANGKLMLAHAASAQGISVVEQISGKDHILNHLSIPAACFTHPEISMVGLTEPQAREKADKEGFEVNVVKTSFKANTKALAENEGDGIAKLIYRPDTGEILGVHILGLHAADLIHEASNAIALGTRVQDIKFAVHAHPTLSEVLDELFKAAKVNSGVSHSVNEPVAA

SEQ ID NO: 57742 - DNA, 2273 bp, Glycine max
  CDS (54)..(1766)
gcacgagtacacatctccacttcaccattttccatttccctctccctccaaaaatgcattcctcgctctctctctcgttctccgccacttcctcctccgtcgccactgtttccagatcacgccactcattccactctcccgccgccgccatgcctctcaatctccgcttctgcggcttgaggcgcgatgcatttggttcaggtctcgctgcttctctcaaccgctaccactcccacctccctcgccgccctcactccgccgcagtctctgccgcgctatctagcaatggaagccctcccaaatcgtttgactacgatttgctgataatcggcgccggcgttggcggccacggcgccgcgcttcatgccgttgagaagggtttgaaaacagccattgtggaaggagatgtggtgggagggacatgtgtgaacagaggctgtgttccttccaaagctcttttagccgtgagtggtcgtatgcgagaactaaggagcgatcatcacttgaagtcctttggcttacaggtttctgctgctggctatgacagacaaggagtcgctgatcatgctaataaccttgcttcgaaaatccgtaataatttgaccaactcaatgaaagcacttggagtagacatacttactggttttggaactattctgggtcctcaaaaggtgaaagttggctcttcagacaaaatagtaactgcaaaaaatatcatcattgctactggttctgttccttttgttcctaagggcattgaaattgatgggaagactgtgattaccagtgaccacgcactcaaactggagtctgttcctgattggatagcaattgtaggaagtggatatattggtcttgaattcagtgatgtatatacagcacttggaagtgaggttacttttatagaagctttagatcaacttatgcctggatttgatcctgaaattagcaagttggctcagagggtccttataaatccccggaatattgactatcatactggagtttttgcaaccaagatcacgcctgcaagggatggaaaacctgtcttgattgaacttattgatgcgaaaaccaaggagccgaaagacacgctggaggtggatgctgcactaatagcaactggaagggctccgttcacacaaggtcttggattggagaatattgatgtggtaacacagcgtggttttgttccagtggatgagcacatgcgagtaattgatgcgaatggcaagctggtgcctcatttatattgtattggtgatgcaaatggcaagatgatgcttgctcatgctgccagtgcacaaggaatttcagtggttgaacaagtcactggaaaagatcacgtgctcaatcatttaagcatcccagctgcttgtttcactcatcctgaacttagcatggttggattaacagagcctcaagcaagggtgaaaggtgaaaaagaggggtttgaagtaagtgttgccaaaacaagttttaaagctaacacaaaggctctagcagaaaacgaaggagagggactagccaagttgatatacagacctgacaatggagagatactaggagttcatatttttggtttgcatgcagcagatctcatccatgaagcatccaatgcaatagcattagggacacatattcaggacataaaatttgccgttcatgcacatccaactttgtccgaggttcttgatgaactattcaaatcagcaaaggttaaagcacaagcttctagcccagtaagtgaaccagttgcagtctaatcttcccaaacaaagtataaaattttgaagaaatttacgtgtactagggacttccaaaatattcatcttcaggaggaacacacaaacacattcagaatcctgtaaaagaggggaaccgtttgagggaaatcaagaatgacctgattatggataaccgccgaagcttacatgtaatggtttcttttctacttgatattcttagcgccagtcaaagatgcttatcttcattattgcattttttaaactatagtcaatgagaaggcctctgacagcggcctatttttttagagtgctactagttttgcaccgaacacgtatgtaccattaaacagttttccttcagagatgatgaaattatgcttgtcgacagacctttgggttcaatacgtaatacgtaaaggttcgaaattgttttgggtggaagttttttcccttaaaaaaaaaaaaaaaaaaaaaaaaaaaaaaaaaaaaaaaaaaaaaaaaaaaaaaaaaaaaaaaaaaaaaaaa

SEQ ID NO: 57743 - protein, 570 aa, Glycine max
MHSSLSLSFSATSSSVATVSRSRHSFHSPAAAMPLNLRFCGLRRDAFGSGLAASLNRYHSHLPRRPHSAAVSAALSSNGSPPKSFDYDLLIIGAGVGGHGAALHAVEKGLKTAIVEGDVVGGTCVNRGCVPSKALLAVSGRMRELRSDHHLKSFGLQVSAAGYDRQGVADHANNLASKIRNNLTNSMKALGVDILTGFGTILGPQKVKVGSSDKIVTAKNIIIATGSVPFVPKGIEIDGKTVITSDHALKLESVPDWIAIVGSGYIGLEFSDVYTALGSEVTFIEALDQLMPGFDPEISKLAQRVLINPRNIDYHTGVFATKITPARDGKPVLIELIDAKTKEPKDTLEVDAALIATGRAPFTQGLGLENIDVVTQRGFVPVDEHMRVIDANGKLVPHLYCIGDANGKMMLAHAASAQGISVVEQVTGKDHVLNHLSIPAACFTHPELSMVGLTEPQARVKGEKEGFEVSVAKTSFKANTKALAENEGEGLAKLIYRPDNGEILGVHIFGLHAADLIHEASNAIALGTHIQDIKFAVHAHPTLSEVLDELFKSAKVKAQASSPVSEPVAV

SEQ ID NO: 57744 - DNA, 1491 bp, Bombyx mori
  CDS (1)..(1491)
atgggctataaatttctaaaacttgcctctcctacctttagaagtggaagtttagtacgaattgctacaagacaatatgctaccacacatgatgcagatcttgttgttatcggttcgggccctggtggatacgtagcagctattaaagctgcccagcttggcatgaaggtggtctcagtagaaaaggaccctactttaggaggtacttgtctcaatgttggatgtataccatcaaaagctttactgcacaactcacatctttaccatatggccaaacatgacttcaagcaaaggggtattgaaactggtgaagttacatttgacttcaaaaagatgatggaatataaagctaatgctgttaaaggcctcacaggaggtattgcaatgctctttcagaagaacaaggttaatcttgtcaaaggtgtaggaactatagttgccccaaataaagttgaagtacacggagagaagggtgttgagactgttaataccaaaaatattctaatcgcttctgggtctgaagttacacctttccctggagttacttttgatgagaaacaaataatcacatcgactggagcactttccttggagtcagtaccgaaaaaaatgttggtgattggagctggagttatcggtttggagcttggttctgtttatcaaagacttggtgctgatgttactgcaattgaattcctaactagcattggaggtgttggtattgatggagaggtagccaagactcttcagaaaatcttaagcaaacaaggaatgaaattcaaactgggaactaaagttttaggggttaagaaagaaggtagtactatcaaagttgatgttgaagctgctaaaggtggcaataaggaagtgttggattgcgatgtggtgctaatttcaattggtcgtcgcccttacactaaaggtctcgggctcgacaaagtgggcatcgctttggacgaccgcggccggattcctgtcaacaacaaattccaaactactgtgcccggaatttacgctattggtgatgtaattcacggaccaatgttggctcacaaagcggaggacgaaggtatcgtctgcgtggaaggtattaagggtatgcccgtccacttcaactacgatgcaattccgtcggttatttacacttcacccgaagttggctgggtcggaaagactgaagaagatttaaagaaagaaggcagagcttacaaagtgggtaaattcccgttcctggcgaactccagagcgaaaacgaatggggaaactgaaggtttcgtcaaagtgctttccgataagactacagacgtaatccttgggactcacattattggccctggcggtggtgagttgatcaacgaggctgtactcgcgcaggagtatggtgccgctgctgaagacgttgcgagagtctgtcacgcgcatcctacatgtgccgaagcgctacgtgaagcaaatctagcagcgtactccggaaaaccaatcaacttctaa

SEQ ID NO: 57745 - protein, 496 aa, Bombyx mori
MGYKFLKLASPTFRSGSLVRIATRQYATTHDADLVVIGSGPGGYVAAIKAAQLGMKVVSVEKDPTLGGTCLNVGCIPSKALLHNSHLYHMAKHDFKQRGIETGEVTFDFKKMMEYKANAVKGLTGGIAMLFQKNKVNLVKGVGTIVAPNKVEVHGEKGVETVNTKNILIASGSEVTPFPGVTFDEKQIITSTGALSLESVPKKMLVIGAGVIGLELGSVYQRLGADVTAIEFLTSIGGVGIDGEVAKTLQKILSKQGMKFKLGTKVLGVKKEGSTIKVDVEAAKGGNKEVLDCDVVLISIGRRPYTKGLGLDKVGIALDDRGRIPVNNKFQTTVPGIYAIGDVIHGPMLAHKAEDEGIVCVEGIKGMPVHFNYDAIPSVIYTSPEVGWVGKTEEDLKKEGRAYKVGKFPFLANSRAKTNGETEGFVKVLSDKTTDVILGTHIIGPGGGELINEAVLAQEYGAAAEDVARVCHAHPTCAEALREANLAAYSGKPINF

SEQ ID NO: 57746 - DNA, 1512 bp, Oryza sativa (japonica cultivar-group)
  CDS (1)..(1512)
atggcgctcgcaatcctggcgaggaggcgggcggcggaggcgctgctgcggcggccgctgggggcggcgggggtgtcggcgctgagggcgtcgtacgcggcggtggcgggggaggagagcgacgtggtggtggtgggcggcgggccgggagggtacgtggcggcgatcaaggcggcgcagctggggctcaagaccacctgcatcgagaagaggggcaccctcggcgggacatgcctcaacgtcggctgcatcccctccaaggctctgttgcactcatctcatatgtaccatgaagcaaaaagttcctttgcacaccatggagtgaaattttccaatctggaggtagacctcccagctatgatggcacagaaagacaaggctgtggcaggcctgactaaggggattgaaggtctcttcaagaagaacaaagtgacgtatgtcaaaggctttgggaaacttgcttcgccctcagaggtgtctgttgatctgagcgatggtggcagcacagttgtcaaagggaaaaacataatcattgctacagggtctgatgtaaaatcactccctggagtcacaattgatgagaagaaaatcgtctcatctactggggccttgtgcttgtcagagattccaaagaaattggtggttattggagcaggttacattggtctggagatgggttcggtctggaaccgccttggttcagaggtcaccgttgttgaatttgccccagatatagttccatcaatggatggtgaagtcaggaagcagttccagcgcatgttggagaagcagaagatgaagttcatgctcaagacaaaggtagttggggttgatacctccggagatggtgtgaagctaacacttgaacctgcagctggaggtgagcagagtgtcattgaagctgatattgtattggtttctgctggaagagtcccatatactgctggtattgggttggaaagtgttggtgttgagacagacaaagctggcaggatcctcgtggataagcgcttcatgactaacgtcaatggagtctatgcaattggggatgccatccctgggcccatgcttgcccacaaagctgaagaggatggtgttgcctgtgttgagttcattgctggcaaggaggggcacgtcgactatgacacagtgcctggtgtggtctatacacatccagaggtcgcgtctgttggaaagactgaagagcaggtgaaagctttaggaattccctaccgtgttggcaaatttccgctgttggcaaacagccgtgcaaaggccattgacgatgctgagggcttggtgaaggtggtggctgagaaggaaactgacaagattctgggcgtgcatatcatggctcccggtgctggagagataatacatgaggctgtccttgctttgcagtatggagcatcaagtgaggacatagctcgtacatgccacgctcatcccaccgtgagcgaagccttgaaggaggcctgcctgcaaaccttcacaaaggcgattcacatttaa

SEQ ID NO: 57747 - protein, 503 aa, Oryza sativa (japonica cultivar-group)
MALAILARRRAAEALLRRPLGAAGVSALRASYAAVAGEESDVVVVGGGPGGYVAAIKAAQLGLKTTCIEKRGTLGGTCLNVGCIPSKALLHSSHMYHEAKSSFAHHGVKFSNLEVDLPAMMAQKDKAVAGLTKGIEGLFKKNKVTYVKGFGKLASPSEVSVDLSDGGSTVVKGKNIIIATGSDVKSLPGVTIDEKKIVSSTGALCLSEIPKKLVVIGAGYIGLEMGSVWNRLGSEVTVVEFAPDIVPSMDGEVRKQFQRMLEKQKMKFMLKTKVVGVDTSGDGVKLTLEPAAGGEQSVIEADIVLVSAGRVPYTAGIGLESVGVETDKAGRILVDKRFMTNVNGVYAIGDAIPGPMLAHKAEEDGVACVEFIAGKEGHVDYDTVPGVVYTHPEVASVGKTEEQVKALGIPYRVGKFPLLANSRAKAIDDAEGLVKVVAEKETDKILGVHIMAPGAGEIIHEAVLALQYGASSEDIARTCHAHPTVSEALKEACLQTFTKAIHI

SEQ ID NO: 57748 - DNA, 1686 bp, Oryza sativa (japonica cultivar-group)
  CDS (1)..(1686)
atgtactccacggctatctcgctctccgccgccgccaccgccgccgcggcggtcggcggcgcccggccaggcgcgatccggccggcggagctccgcttctgcggcctccgccgcgaggccctcgggctccgctcgctgcgggccccgccgcgagcggccgccacgccgcggaaggcggcggcggctactgggaatggtgcggccgggagcggcgggttcgactacgacctcgtgatcattggggcgggcgtcggcgggcacggcgcagctctccacgccgtcgagaagggtctgaaaactgccataattgagggggatgttgtaggtgggacttgtgtgaacagaggttgtgttccgtcgaaggcacttcttgctgtcagcggtcggatgagggaacttcaagatgaacaccacatgaaatcgttgggtctacaggtttcaacagctggatatgataggcaggctgttgcagatcatgcaaataatctggcctctaaaattcgtagcaacttgactaattcgatgaaagctttgggtgtggatatattgactggttttggcaccattgtgggaaaacaaaaagtgagatatggaaaagttggttttcctgacaatgaaatcactgccagaaatatcattattgcaacggggtctgttccttttgtccccaatggcatcgaaatagatggtaaaaccgtatttactagtgatcatgcactaaaacttgagtcagttcctgactggattgctatcgtgggaagcggttacattggactggaattcagtgatgtatacacggctctgggaagtgaggttacttttgttgaagcacttgatcagttgatgcctggttttgatcctgagattgcaaaattggcccaaaggattcttatcaatcctcgtaaaattgactatcatactggggtctttgcgagcaagattaccccagcaaaggatggtaaacccgtgttgattgagttaattgatgctaagacaaaggaacacaaggaaacacttgaggtggatgcagctctcatagctaccggaagggcaccgttcaccaaagggcttggcttggaaaatgtcaacgttgttacacaacgcggttttgttcctgttgatgagcggatgcaagttatggacgcagatggcaatgcggttccaaatttgtattgtattggagatgccaatggcaaactcatgctggctcatgctgccagtgcacaaggaatctcagttgttgagcgaatctctgggaaagacaacatcctaaatcatctaagcatcccggctgcctgtttcactcatccggagattagtatggttgggctaacagagccacaagcgagagaaaaggctgataaggaaggatttgagataagtgttgttaagaccagcttcaaggcaaacacgaaggctctggctgagaatgaaggagatggacttgctaagatgatttaccggcctgacactggagaaattcttggagttcacatattaggtttgcatgctgctgacctcatccacgaggcatcaaacgccattgccctcggaactcgtgtacaagacatcaagtttgctgttcatgcacacccaactttgtctgaggttctggatgagctcttcaaagctgccaaggttaatgcaggtgttcctcattccgtaaatgagcccgtcgcagcctag

SEQ ID NO: 57749 - protein, 561 aa, Oryza sativa (japonica cultivar-group)
MYSTAISLSAAATAAAAVGGARPGAIRPAELRFCGLRREALGLRSLRAPPRAAATPRKAAAATGNGAAGSGGFDYDLVIIGAGVGGHGAALHAVEKGLKTAIIEGDVVGGTCVNRGCVPSKALLAVSGRMRELQDEHHMKSLGLQVSTAGYDRQAVADHANNLASKIRSNLTNSMKALGVDILTGFGTIVGKQKVRYGKVGFPDNEITARNIIIATGSVPFVPNGIEIDGKTVFTSDHALKLESVPDWIAIVGSGYIGLEFSDVYTALGSEVTFVEALDQLMPGFDPEIAKLAQRILINPRKIDYHTGVFASKITPAKDGKPVLIELIDAKTKEHKETLEVDAALIATGRAPFTKGLGLENVNVVTQRGFVPVDERMQVMDADGNAVPNLYCIGDANGKLMLAHAASAQGISVVERISGKDNILNHLSIPAACFTHPEISMVGLTEPQAREKADKEGFEISVVKTSFKANTKALAENEGDGLAKMIYRPDTGEILGVHILGLHAADLIHEASNAIALGTRVQDIKFAVHAHPTLSEVLDELFKAAKVNAGVPHSVNEPVAA

SEQ ID NO: 57750 - DNA, 1773 bp, Oryza sativa (japonica cultivar-group)
  CDS (1)..(1773)
atgaactccgcggcggcggcggcggcgtgcgcctcggccccggcgtgggtggtcggcggcggcgccggcgggggagccagatccgcgcgggggccatgcgggatcagggtgtgcgggctcgggggcgaggcggtggcgctccgctcgctgcggatctcgcagggggcggcggtgaggcgggcggcggtggcggcgagggcggccgcggagaacggcgtggcggggagcggcgggttcgactacgacctcgtcatcatcggcgccggcgttggtgggcacggcgcggcgctccacgctgtcgaggagggtttgaaaactgcaattattgagggagatgttgtaggtgggacttgtgtaaacagaggttgtgtcccatcaaaagcacttcttgctgtcagcggtcgcatgagggagcttcatgatgaacatcacatgaagtcattgggtctacaggtttcatcccctggatatgacagacaagctgttgctgatcatgcaaacaatctcgcctctaaaatccgaagcaacttgactaattcaatgaaagctctgggagtggatatattgagtggttttggtgcaattgttggaaaacaaaaggtacggtatggaaaagttggttttccagacaaagaaatcactgcaaggaatatcatcattgctactggatcagttccttttgttcccaagggcatagaggttgatgggaaaactgtttttaccagtgatcatgcactaaaacttgagtctgtcccggactggatagcaatcgttggaagtggatacattgggcttgaattcagtgatgtatatacagctcttggaagtgaggttacttttgttgaagctcttgaccagctaatgcctggttttgatcctgaaattgcaaaattagcccagagagtccttatcaaccctcggaatatagactatcacactggtgtttttgcaagcaagattactccagcaaaggatggaaaacctgtgcagattgagctcattgatgcaaaaacaaaggaacacaaagaaaccctcgaggtggatgcagcccttatagccacaggacgggcaccattcacaaaaggacttggcttggaaaatatcaatgttgttacacagcgtggttttattcctgttgatgagcgaatgcgagtcatggatgcagatggcaatgtggttccgaacttatattgcattggagatgccaatggtaaactcatgcttgctcatgctgccagtgcacagggaatctctgttgtcgaacaaatctctgggagggaccacatcctaaatcatttaagcatccccgctgcttgcttcactcatccagagattagtatggttgggcttacagagccacaagccagagaaaaagctgataaagaaggatttgagataagtgttgttaagaccagctttaaggctaatacaaaagcattggcagaaaatgaaggagatggacttgctaagttgatttaccggcctgacactggagaaattcttggtgtgcacattttgggtttgcacgctgctgacctcatccacgaggcatcaaatgccattgccctaggaactcggttgcaagacatcaagtttgctgttcatgcacacccaacattgtccgaggtgctggacgaactctttaaagcagccaagttgcagcctagagaagggccggagcgcaagccaaagcatccaccacaaccactcctgaaggtccttagtttcgtcacgcgcctgctcacttcccagaaacgaaatcggcaaccatag

SEQ ID NO: 57751 - protein, 590 aa, Oryza sativa (japonica cultivar-group)
MNSAAAAAACASAPAWVVGGGAGGGARSARGPCGIRVCGLGGEAVALRSLRISQGAAVRRAAVAARAAAENGVAGSGGFDYDLVIIGAGVGGHGAALHAVEEGLKTAIIEGDVVGGTCVNRGCVPSKALLAVSGRMRELHDEHHMKSLGLQVSSPGYDRQAVADHANNLASKIRSNLTNSMKALGVDILSGFGAIVGKQKVRYGKVGFPDKEITARNIIIATGSVPFVPKGIEVDGKTVFTSDHALKLESVPDWIAIVGSGYIGLEFSDVYTALGSEVTFVEALDQLMPGFDPEIAKLAQRVLINPRNIDYHTGVFASKITPAKDGKPVQIELIDAKTKEHKETLEVDAALIATGRAPFTKGLGLENINVVTQRGFIPVDERMRVMDADGNVVPNLYCIGDANGKLMLAHAASAQGISVVEQISGRDHILNHLSIPAACFTHPEISMVGLTEPQAREKADKEGFEISVVKTSFKANTKALAENEGDGLAKLIYRPDTGEILGVHILGLHAADLIHEASNAIALGTRLQDIKFAVHAHPTLSEVLDELFKAAKLQPREGPERKPKHPPQPLLKVLSFVTRLLTSQKRNRQP

SEQ ID NO: 57752 - DNA, 1446 bp, Mesorhizobium loti MAFF303099
  CDS (1)..(1446): transl_table=11
gtggctgagaactacgacgtcatcatcatcggctcgggccccggcggctatgtcacggcggtgcgttccgcccagctcggcttcaagacggcgattgtcgagcgcgagcatctcggcggcatctgcctcaactggggctgcatcccgaccaaggcgctgctgcgttcggccgagatcatgcactattccgaccatctgaaggactatggcctgaagctcgatggcaaggtcagcgtcgacacgtcggccgtggtcgaccgctcgcgcaaagtctcgctgcggctcaatggcggcgttgccttcctgatgaagaagaacaaggtcgacgtcatctggggcgaagccaagctgtcgaagcccggtgaggtcgtcgtctccaagacggccaagacgccgatggagccgcagccgccggtaccgaagggcgtcaagggcgagggcacctataccgccaagcacatcatcctggcgaccggcgcgcggccgcgcgcgctgccgggcatcgagccggacggcaagctcatctggacctatttcgaggccatggtgccgaaggaaatgccgaagtcgctgctggtgatgggctcgggcgccatcggcatcgaatttgcctccttctaccgcaccatgggcgccgacgtgacggtggtcgaactgttgccggcggtgatgccggtcgaggatgccgaggtctcgaaattcgcgcaaaaacagttcgagaagcaaggcatgaagatcattctcgaagccaaggtgaccaaggtcgagaagggcgccaactcggtcaccgcgcatgtcgagatgaaggacggcaaggtcgagaagatcaccgccgaccgcatgatctcggccgtcggtgtccagggcaatatcgagaatctcggccttgaagcgctcggcgtgaagaccgaccgcggctgcattgtcgtcgacggctatggcaagaccaatgtaccaggcatctacgccatcggcgatgtcgccggcccgcccatgcttgcccacaaggccgagcatgagggcgtcgtgtgcgtggaaaagatcgctggtttccccggcgtgcacgccatcgacaagctcaagatcccgggctgcacctactgcaatccgcaggtcgcctccgtcggcctgacggaagccaaggccaaggccgaaggcaaggatatccgcgtcggccgcttccagttcgcggctaacggcaaggcgatcgcgcttggcgaggaccagggcttcatcaagaccatcttcgacaagaagaccggtcagctgctcggcgcccatatggtcggcgccgaggtgaccgaactgatccagggctttgtcgtggcgatgaacctcgagacgaccgaggaagagctgatgcacaccatcttcccgcatccgacgctgtcggagatgatgaaggaaagcgtgctcgacgcctatggccgcgccttgaacgcatga

SEQ ID NO: 57753 - protein, 481 aa, Mesorhizobium loti MAFF303099
MAENYDVIIIGSGPGGYVTAVRSAQLGFKTAIVEREHLGGICLNWGCIPTKALLRSAEIMHYSDHLKDYGLKLDGKVSVDTSAVVDRSRKVSLRLNGGVAFLMKKNKVDVIWGEAKLSKPGEVVVSKTAKTPMEPQPPVPKGVKGEGTYTAKHIILATGARPRALPGIEPDGKLIWTYFEAMVPKEMPKSLLVMGSGAIGIEFASFYRTMGADVTVVELLPAVMPVEDAEVSKFAQKQFEKQGMKIILEAKVTKVEKGANSVTAHVEMKDGKVEKITADRMISAVGVQGNIENLGLEALGVKTDRGCIVVDGYGKTNVPGIYAIGDVAGPPMLAHKAEHEGVVCVEKIAGFPGVHAIDKLKIPGCTYCNPQVASVGLTEAKAKAEGKDIRVGRFQFAANGKAIALGEDQGFIKTIFDKKTGQLLGAHMVGAEVTELIQGFVVAMNLETTEEELMHTIFPHPTLSEMMKESVLDAYGRALNA

SEQ ID NO: 57754 - DNA, 1434 bp, Neisseria meningitidis MC58
  CDS (1)..(1434): transl_table=11
atgtctcaatatgatgtagtagtgattggtgcaggcccgggtggatacgttgccgccatccgtgccgcgcaactgggtttcaaaaccgcttgcgtcgatgcaggcgttaacaaagcaggcaatgcccctgcattgggcggtacttgcttgaacgtaggctgtatcccttctaaagccctgttgcaatccagcgaacatttccacgctgcgcaacacgagtttgccgaacacggtatcactgtcggcgacgtaaaattcgacgcggccaaaatgattgagcgcaaagatgccatcgtgaccaagctgaccggcggcgtcaaattcctgttccaaaaaaataaagtaaccagcctgttcggtacggcttcctttgccggtaaaaatggcgatgcttaccaaatcgaagtcgataacaaaggcgagaaaaccgttatcgaagccaaacacgtcatcgtagccaccggttccgtaccgcgtccgctgccacaagtcgctatcgacaatgtgaacgtattggacaacgaaggtgcattgaacctgaccgaagtacctgccaaactcggcgtgatcggttccggcgtgattggtttggaaatgggttccgtatggaaccgcgtgggtgcggaagttaccattcttgaagccgcgccgactttcctggctgccgccgaccaacaaatcgccaaagaagccttcaaatacttcaccaaagagcaaggtctgagcatcgaattgggcgtgaaaatcggcgacatcaagtctgaaggcaaaggtgtttccgttgcttacgaaactgctgctggcgaagccaaaaccgaagtattcgacaaactgatcgttgccatcggccgtattccaaacaccaaaggcctgaacgcggaagccgtaggcttggaaaaagacgagcgcggctttatcaaagtagatggcgaatgccgtaccaacctgcctaacgtatgggcaatcggcgacgtggttcgcggcccgatgttggcacacaaagccagcgacgaaggcgttgccgttgccgaacgcattgccggtcaaaaaccgcatatcgacttcaacaacgtaccgttcgtgatttacaccgatcctgaaatcgcttgggtgggtaaaaccgaagagcagctcaaagccgaaggcgtggagtacaaaaaaggtacttcaggttttggtgcgaatggtcgcgcattggcaatgggcaaagccaaaggtacggttaaagtgttggcagatgccaaaaccgaccgcatcttgggcgtacacatgattggtccggttgtcagcgaattggttaccgaaggcgtgactgcgctcgaattcttcgccagcagcgaagacatcgcccgcattatccatgcccacccaaccttgtccgaagtggttcacgaagctgcattggcggccgacaaacgcgctttgcacggttga

SEQ ID NO: 57755 - protein, 477 aa, Neisseria meningitidis MC58
MSQYDVVVIGAGPGGYVAAIRAAQLGFKTACVDAGVNKAGNAPALGGTCLNVGCIPSKALLQSSEHFHAAQHEFAEHGITVGDVKFDAAKMIERKDAIVTKLTGGVKFLFQKNKVTSLFGTASFAGKNGDAYQIEVDNKGEKTVIEAKHVIVATGSVPRPLPQVAIDNVNVLDNEGALNLTEVPAKLGVIGSGVIGLEMGSVWNRVGAEVTILEAAPTFLAAADQQIAKEAFKYFTKEQGLSIELGVKIGDIKSEGKGVSVAYETAAGEAKTEVFDKLIVAIGRIPNTKGLNAEAVGLEKDERGFIKVDGECRTNLPNVWAIGDVVRGPMLAHKASDEGVAVAERIAGQKPHIDFNNVPFVIYTDPEIAWVGKTEEQLKAEGVEYKKGTSGFGANGRALAMGKAKGTVKVLADAKTDRILGVHMIGPVVSELVTEGVTALEFFASSEDIARIIHAHPTLSEVVHEAALAADKRALHG

SEQ ID NO: 57756 - DNA, 1434 bp, Neisseria meningitidis Z2491
  CDS (1)..(1434): transl_table=11
atgtctcaatatgatgtagtagtgattggtgcaggcccgggcggatacgttgccgccatccgtgccgcacaactgggtttcaaaactgcctgtgtcgatgcaggcgttaacaaagcaggcaatgcccctgcattgggcggtacttgcttgaacgtaggttgtatcccttctaaagccctgttgcaatccagcgaacatttccacgcagcgcaacacgagtttgccgaacacggtatcactgtcggcgacgtaaaattcgacgtggccaaaatgattgagcgcaaagatgccatcgtaaccaaactgaccggcggcgtgaaattcctgttccagaaaaacaaagtaaccagcctgttcggtacggcttcctttgccggcaaaaatggcgatgcttaccaaatcgaagtcgataacaaaggtgagaaaaccgttatcgaagccaaacacgtcatcgtagcgaccggttccgtaccgcgtccgttgccgcaagtcgctatcgacaatgtgaacgtattggacaacgaaggcgcattgaacctgaccgaagtacctgccaaactcggcgtgatcggttccggtgtgattggtttggaaatgggttccgtatggaaccgcgtgggtgcggaagttaccattcttgaagccgcgccgaccttcctggctgccgccgaccaacaaatcgccaaagaagccttcaaatacttcaccaaagagcaaggtctgagcatcgaattgggcgtgaaaatcggcgacatcaagtctgaaggcaaaggtgtttccgttgcttacgaaactgctgccggcgaagccaaaaccgaagtattcgacaaactgatcgttgccatcggccgtattccaaacaccaaaggcctgaacgcggaagccgtaggcttggaaaaagacgagcgcggctttatcaaagtagatggcgaatgccgtaccaacctgcctaacgtatgggcaatcggcgacgtggttcgcggcccgatgttggcacacaaagccagcgacgaaggcgttgccgttgccgaacgcattgccggtcaaaaaccgcatatcgacttcaacaacgtaccgttcgtgatttacaccgatcctgaaatcgcttgggtgggtaaaaccgaagagcagctcaaagccgaaggcgtggagtacaaaaaaggtacttcaggttttggtgcgaatggtcgcgcattggcaatgggcaaagccaaaggtacggttaaagtgttggcagacgccaaaaccgaccgcatcttgggcgtacacatgattggtccggttgtcagcgaattgcttaccgaaggcgtgactgcgctcgaattcttcgccagcagcgaagacatcgcccgcattatccatgcccacccaaccttgtccgaagtggttcacgaagctgcattggcggccgacaaacgcgctttgcacggttga

SEQ ID NO: 57757 - protein, 477 aa, Neisseria meningitidis Z2491
MSQYDVVVIGAGPGGYVAAIRAAQLGFKTACVDAGVNKAGNAPALGGTCLNVGCIPSKALLQSSEHFHAAQHEFAEHGITVGDVKFDVAKMIERKDAIVTKLTGGVKFLFQKNKVTSLFGTASFAGKNGDAYQIEVDNKGEKTVIEAKHVIVATGSVPRPLPQVAIDNVNVLDNEGALNLTEVPAKLGVIGSGVIGLEMGSVWNRVGAEVTILEAAPTFLAAADQQIAKEAFKYFTKEQGLSIELGVKIGDIKSEGKGVSVAYETAAGEAKTEVFDKLIVAIGRIPNTKGLNAEAVGLEKDERGFIKVDGECRTNLPNVWAIGDVVRGPMLAHKASDEGVAVAERIAGQKPHIDFNNVPFVIYTDPEIAWVGKTEEQLKAEGVEYKKGTSGFGANGRALAMGKAKGTVKVLADAKTDRILGVHMIGPVVSELLTEGVTALEFFASSEDIARIIHAHPTLSEVVHEAALAADKRALHG

SEQ ID NO: 57758 - DNA, 1404 bp, Deinococcus radiodurans R1
  CDS (1)..(1404): transl_table=11
atgacgaacaactttgactatgacgtgctggtcatcggcgcgggtcccggcggctatcacgcggccattcgcgcctcgcagctcgggctgaaaacggcctgcgtggagcgcggcgcggtgggcggcgtctgtctcaatatcggctgcattccgaccaaggcgctgctacacgccgccgaaaccatgcaggcgagcaagcacgccgccgagttcgggctgaccttcagcgggcaggcccttgacatcgcccgactcaacggctggaaagacagcatcgtgaagaagctgacgggcggcgtctcggggctgttcaaggccaacaaggtcacgctgctcaccggacaggccagcttcgtggacgaccacaccgtgcaggtgggcgacaagacctacacggcggccaacatcatcatcgccaccggctccgacccggccaaactgccggggctggaagtggaccagcagcagatcgtggactcgaccggcgcgctggtcatgcccgacccggtgccggcccggatgctgtgcgtgggcggcggcgtgatcggcttcgagttcgcgcaggtctacaacaacctcggcagccaggtcaaaatcatcgagtttctgcccagcgtgattcccggcgccgacgccgacgcggtcaaggaattttccaagatcatgagccggcagggcatcgaaatcgtgacccagatgaaggccaaccgcgcagagaaaaagagcgacggcgtgcatgtggaactcgaaaacgtgaagaccggcgagaagaccaccgaagtctttgaccgggtgctcgtcgccgtgggccgccgcccgcgcaccgacggcctgaacccggaacaagccggcgtgaccgtgaccgagcgcggcttcattcccgccgacaagcagcagcgcaccaacgtgccgcacatcttctccatcggggacgtggccggcaaccccatgctggcgcacaaggcgatgaaggaggggctggtggccgccgaggtcatcgccggtaaacccgccgagcaggacgccgtcgccattcccggcgtggtctacaccaaccccgagctcgcctgggtgggtctgaccgaagccgaggcgcaggagaagggctacgaggtcaagaccggcgtgttccccatgagcgcctcaggccgcgccatgacgctgcaagccaccgaaggctttgtcaagatggtcgtggagaaagacaccgacctgctgctgggcgtgcacatcgtggcgccgcacgcctcagacatgctcgccgaagcggggctggcgctcgaaatggccgccaccgccaccgacatttcgctgaccatccacgcgcaccccacgctgggcgagtccatcttggaagcggcggaagcgagccacaagcaggcgattcatatcgtgaaccgctga

SEQ ID NO: 57759 - protein, 467 aa, Deinococcus radiodurans R1
MTNNFDYDVLVIGAGPGGYHAAIRASQLGLKTACVERGAVGGVCLNIGCIPTKALLHAAETMQASKHAAEFGLTFSGQALDIARLNGWKDSIVKKLTGGVSGLFKANKVTLLTGQASFVDDHTVQVGDKTYTAANIIIATGSDPAKLPGLEVDQQQIVDSTGALVMPDPVPARMLCVGGGVIGFEFAQVYNNLGSQVKIIEFLPSVIPGADADAVKEFSKIMSRQGIEIVTQMKANRAEKKSDGVHVELENVKTGEKTTEVFDRVLVAVGRRPRTDGLNPEQAGVTVTERGFIPADKQQRTNVPHIFSIGDVAGNPMLAHKAMKEGLVAAEVIAGKPAEQDAVAIPGVVYTNPELAWVGLTEAEAQEKGYEVKTGVFPMSASGRAMTLQATEGFVKMVVEKDTDLLLGVHIVAPHASDMLAEAGLALEMAATATDISLTIHAHPTLGESILEAAEASHKQAIHIVNR

SEQ ID NO: 57760 - DNA, 1884 bp, Mycoplasma pulmonis UAB CTIP
  CDS (1)..(1884): transl_table=4
atgtataaatttaaattcgctgatatcggtgaaggacttcacgaaggaaaagtagctgaaatttacgtaaaacttggtgatacagttaaagaaggagactctcttttttctgttgaaacagataaaattacaagtgacattccttctcctacaggtggagttattaacaaaattttatttgaactaggtggaactgtccatgttggtgaagaaattttctgaatcgatgatggttcaggacctgcaagtgactctcctgaaccagctgccgctgaagctaaaccagccgctgaagagcacaaatcttcagctggtgatttatttggatctagaagaagaaaaccaggaggctcagctgcagcggcagctcctagtcctgctcctgctcctgttgcagctcctgcaccagcagctgttgctgctccaagtgtagctggaaaagtagctggaaaagcttatacaggtgctgttgaggctgaatatgatgtaattgtaattggagctggtcctggtggatatttagcagctgaagaagctggtaaatatgggctaaaaactttaattattgaaaaacaatattgaggtggagtttgtcttaatgttggatgtattccaactaaagcacttctacatgcaactgaagagctttacaatttagaacactcacatgaacacaatggaattgtagccgattttaaagcactaaaaatcgatagacaaaaaacatgaattaacattcagaaaaacaaaaaaagcgttgttgacaaaattgttggtggtgttaaattcttaatgaaagctgctaaagcaacttctattgaaggagaggctaaatttgttggttctcatgaactagaagttaatggaaaagtataccgcggaaaaaacattattatagctactggttctcttgatagaaaactaaatcttcctggttttgaacaagcttataaagatgaagttgttctttcaagtgacaagttaattaatttagattcacatctacctgaaactctaggaattattggagctggagttatcggagttgaatttgctgaagtttttgctatggcaggaactaaagttactattattcaaaacacagatgcaattttagctaatgctcctcttgcaaaagagattaaaaccgaacttacaaatcaccttaaaaaatacggagttgaatttaaatttaatgcttcaacaacaaaaattgaaaaaaatcaactattttttgaagtaggtggtaaagaagaatcaatgaaatttgacaaaatcctagcagccgttggtagaataccaacacctttaaatgctggtgaagttggaattgaaattggtcaaagaaacgaaattatcgttgatgataaattaatgacaaacgttgaaaatgtttatgccatcggtgatgttactgggaaaaacatgttagctcatgtggcttatagacatgctattagagtagttgagagcattgttggtgaagaagaagtttatccaaaacaagaaattcctggatgtatttatacaaaaccagaaattgcctttgttggtctaacagaacaacaagctaaagaagcaggttatgatgttgtaacttcaaaatatagcttttcaactctaggaaaagctcttgcttcaagtgaaggtaatggatttgttcaactagttgttgataaaaaatacggaagaattcttggttgtcacattataggtaaaaactcaactgattacatagctgaaattgttttagcaatggataatgaaatttctgtttttgaaattgcagctacaattcacccacaccctacatatggtgaaattgtttgagaagcagctagagctctttctctaaagttaaatattgaaaaacacaaaaaataa

SEQ ID NO: 57761 - protein, 627 aa, Mycoplasma pulmonis UAB CTIP
MYKFKFADIGEGLHEGKVAEIYVKLGDTVKEGDSLFSVETDKITSDIPSPTGGVINKILFELGGTVHVGEEIFWIDDGSGPASDSPEPAAAEAKPAAEEHKSSAGDLFGSRRRKPGGSAAAAAPSPAPAPVAAPAPAAVAAPSVAGKVAGKAYTGAVEAEYDVIVIGAGPGGYLAAEEAGKYGLKTLIIEKQYWGGVCLNVGCIPTKALLHATEELYNLEHSHEHNGIVADFKALKIDRQKTWINIQKNKKSVVDKIVGGVKFLMKAAKATSIEGEAKFVGSHELEVNGKVYRGKNIIIATGSLDRKLNLPGFEQAYKDEVVLSSDKLINLDSHLPETLGIIGAGVIGVEFAEVFAMAGTKVTIIQNTDAILANAPLAKEIKTELTNHLKKYGVEFKFNASTTKIEKNQLFFEVGGKEESMKFDKILAAVGRIPTPLNAGEVGIEIGQRNEIIVDDKLMTNVENVYAIGDVTGKNMLAHVAYRHAIRVVESIVGEEEVYPKQEIPGCIYTKPEIAFVGLTEQQAKEAGYDVVTSKYSFSTLGKALASSEGNGFVQLVVDKKYGRILGCHIIGKNSTDYIAEIVLAMDNEISVFEIAATIHPHPTYGEIVWEAARALSLKLNIEKHKK

SEQ ID NO: 57762 - DNA, 1407 bp, Sinorhizobium meliloti 1021
  CDS (1)..(1407): transl_table=11
atggcctatgatctcatcgttatcggaagcggccccggcggctatgtctgcgccatcaaggcggcgcagctcggcatgaaggttgccgtggtcgagaagcgcagcacctatggcggcacatgcctgaatgtcggctgcatcccctccaaggcgctgctgcatgcttccgaaatgttccatcaggctcagcacggcctggaggcgctgggtgtggaggtcgcaaacccgaagctcaaccttcagaagatgatggcccacaaggacgcaaccgttaagtccaacgtcgacggcgtctccttcctcttcaagaagaacaagatcgatggcttccagggcaccggcaaggttctcggccagggcaaggtctcggtcacgaacgaaaagggtgaggagcaggtgctcgaggcgaagaacgtcgtcatcgccaccggctcggatgtcgccggcatcccgggcgtggaggtcgcgttcgacgaaaagaccatcgtctcctcgaccggggcgctcgcgctcgaaaaggtccccgcgagcatgatcgtcgtcggcggcggcgtcatcggcctcgagctcggctcggtctgggcgcgcctcggcgccaaggtgaccgtggtcgaattcctcgacacgattctcggcggcatggacggcgaagtcgccaagcagcttcagcggatgctgaccaagcagggcatcgacttcaagctcggcgccaaggtgacgggcgccgtgaaatcgggcgacggtgccaaggtcaccttcgagcccgttaagggcggcgaggccactacgctcgatgccgaagtcgtgctcatcgctaccggacgcaagccctcgacggacggcttgggtctcgccaaggcgggcgtcgtcctcgattcgcgtggccgcgtggagatcgaccggcattttcagacgagcattgccggcgtctacgcgatcggcgacgtggtgcgtgggccgatgctggcgcacaaggccgaggatgaaggtgtcgccgtggcggagatcatcgcaggtcaggccggccacgtgaactacgacgtcattccgggcgtcgtctacacccagcccgaggtcgcctccgtcggcaagaccgaggaagagctgaaggctgcgggcgtcgcctacaagatcggcaagttccccttcaccgccaatggccgcgcccgcgccatgcttcagacggacggtttcgtgaagattctcgcggacaaggagaccgaccgcgtgctcggcggccacatcatcggcttcggcgccggcgaaatgatccacgagatcgcggtgctgatggagttcggcggatcgtcggaggacctcgggcgcacctgccacgcccatccgacgatgtcggaggcggtaaaggaagcggcgctttccaccttcttcaagccgatccacatgtga

SEQ ID NO: 57763 - protein, 468 aa, Sinorhizobium meliloti 1021
MAYDLIVIGSGPGGYVCAIKAAQLGMKVAVVEKRSTYGGTCLNVGCIPSKALLHASEMFHQAQHGLEALGVEVANPKLNLQKMMAHKDATVKSNVDGVSFLFKKNKIDGFQGTGKVLGQGKVSVTNEKGEEQVLEAKNVVIATGSDVAGIPGVEVAFDEKTIVSSTGALALEKVPASMIVVGGGVIGLELGSVWARLGAKVTVVEFLDTILGGMDGEVAKQLQRMLTKQGIDFKLGAKVTGAVKSGDGAKVTFEPVKGGEATTLDAEVVLIATGRKPSTDGLGLAKAGVVLDSRGRVEIDRHFQTSIAGVYAIGDVVRGPMLAHKAEDEGVAVAEIIAGQAGHVNYDVIPGVVYTQPEVASVGKTEEELKAAGVAYKIGKFPFTANGRARAMLQTDGFVKILADKETDRVLGGHIIGFGAGEMIHEIAVLMEFGGSSEDLGRTCHAHPTMSEAVKEAALSTFFKPIHM

SEQ ID NO: 57764 - DNA, 1428 bp, Caulobacter crescentus CB15
  CDS (1)..(1428): transl_table=11
atggcgcgtcctgaaggcgatagacccatggctcagtacgacgtcgtcatcatcggtggcggtcctggtggctacaacgcggcgatccgcgccggccagctgggcctgaaggtcgcgatcgtcgaaggccgcggcaagctgggcggcacctgcctgaacgtcggctgcatgccgtccaaggccctgctgcacgcctcggagctgtacgccgccgcgacgggtcccgaattcgccaagctgggcatcgaggtgaagcccaagctgaacctctcccagatgatggcccagaaggccgagagcgtcgaagccctgaccaagggcgtcgagttcctgatgaagaagaacaaggtcgagtacgtgaagggctggggccggatcgacggcgtcggcaaggtggtcgtgaaagccgaggacggttcggaaaccaccctcgagaccaagaacatcgtgatcgccaccggctcggagcccaccccgctgccgggcgtgagcgtcgacaacaagcgcatcatcgactccaccggcgccctgtcgctgcccgaagtgcccaagcgcctggtggtcgtcggcgccggcgtgatcggcctggagctgggttcggtctggaagcgcctgggcgccgaggtcaccgtggtcgagtacctggaccgcatcttgccgggcaccgacactgaagtggccaacgccttccagaagatcctggtcaagcagggcttcaagttccagctgggcgccaaggtcacgggcgctgaagccggcgccaagggcgtgaagctgagcttcgagccggtcgccgggggcgaggcccagacgatcgaggccgactacgtgctggtcgccatcggccgtcgcccgtacacccaaggcctgggcctggagacggtcggcgtcacgcccgacaagcgcggcatgatcgccaacgatcacttcaagaccggcgtcgccggcgtctgggtgatcggtgacgtgacctcgggtccgatgctggcccacaaggccgaggacgagggcgtggcctgcatcgagatgatcgcgggcaaggccggtcacgtgaactacggcatcatcccgggcgtggtttacaccagccccgaggtggccacggtcggcaagaccgaggacgaactcaaggccgagggcgtcgcctacaaggtcggcaagttcccgttcttggccaacagccgcgccaagatcaaccacgagaccgacggcttcgtgaagatcctggccgacgccaaaaccgaccgcattctgggcgcccacatgatcggcccgaacgtcggcgacatgatcgccgagtactgcgtggccatggagttcggcggcgcttcggaagacgtggcccgcacctgccacccgcacccgacccgctcggaagccctgcgccaggcggccatgggcgtcgaaggctggacgatgcaggcgtag

SEQ ID NO: 57765 - protein, 475 aa, Caulobacter crescentus CB15
MARPEGDRPMAQYDVVIIGGGPGGYNAAIRAGQLGLKVAIVEGRGKLGGTCLNVGCMPSKALLHASELYAAATGPEFAKLGIEVKPKLNLSQMMAQKAESVEALTKGVEFLMKKNKVEYVKGWGRIDGVGKVVVKAEDGSETTLETKNIVIATGSEPTPLPGVSVDNKRIIDSTGALSLPEVPKRLVVVGAGVIGLELGSVWKRLGAEVTVVEYLDRILPGTDTEVANAFQKILVKQGFKFQLGAKVTGAEAGAKGVKLSFEPVAGGEAQTIEADYVLVAIGRRPYTQGLGLETVGVTPDKRGMIANDHFKTGVAGVWVIGDVTSGPMLAHKAEDEGVACIEMIAGKAGHVNYGIIPGVVYTSPEVATVGKTEDELKAEGVAYKVGKFPFLANSRAKINHETDGFVKILADAKTDRILGAHMIGPNVGDMIAEYCVAMEFGGASEDVARTCHPHPTRSEALRQAAMGVEGWTMQA

SEQ ID NO: 57766 - DNA, 1425 bp, Salmonella typhimurium LT2
  CDS (1)..(1425): transl_table=11
atgagtactgaaatcaaaactcaggtcgtggtacttggggcgggcccggcaggctattctgccgctttccgttgcgctgatttaggtctggaaaccgtaattgtagaacgctacaacacccttggcggtgtttgtctgaacgtcggctgtatcccttctaaagcgctgctgcacgtagcaaaagttatcgaagaagccaaagcgctggctgaacacggtatcgtcttcggtgagccgaaaaccgatatcgacaagattcgtacctggaaagagaaagtgatcacgcagctgaccggcggtctggcgggtatggccaaaggccgtaaagtgaaagtggtcaacggtctgggtaaattcaccggggcgaacaccctggaagtggaaggcgaaaacggcaaaaccgtgatcaacttcgacaacgcgatcatcgcggcaggttctcgtccgatccaattaccgtttattccgcatgaagacccgcgcgtatgggattctaccgacgctctggaactgaaagaagtgccgaagcgtatgctggtcatgggcggcggtatcatcggtctggaaatgggtaccgtataccacgcgctgggttcagagattgacgtggttgaaatgttcgaccaggttatcccggcggctgataaagacatcgttaaagtcttcaccaagcgcatcagcaagaaattcaacctgatgctggaaaccaaagtgactgccgttgaagcgaaagaagacggtatctacgtttcgatggaaggcaaaaaagccccggctgaagcgcagcgttatgatgcggttctggtggcgattggtcgtgtgccgaacggtaaaaacctcgacgcgggcaaagctggcgtggaagttgacgaccgtggctttatccgcgtggacaaacagctgcgcaccaacgtgccgcacatcttcgctatcggcgatatcgtcggtcagccgatgctggcgcataaaggcgttcacgaaggccacgttgccgctgaagttatcgccgggaagaaacactacttcgatccgaaagttatcccgtctatcgcgtacaccgagccagaagtggcatgggttggcctgaccgagaaagaagcgaaagaaaaaggcatcagctatgaaaccgccaccttcccgtgggcagcttctggccgtgctatcgcttctgactgtgcagacggtatgaccaaactgattttcgacaaagaatctcaccgcgtgatcggcggggcgattgtcggtaccaacggcggcgagctgctgggtgaaatcggtctggcgatcgaaatgggctgtgacgcggaagacatcgcgctgaccattcatgcgcacccgactctgcacgagtccgtcggtctggctgctgaagtgttcgaaggtagtattaccgacctgccgaacccgaaagcgaagaagaaataa

SEQ ID NO: 57767 - protein, 474 aa, Salmonella typhimurium LT2
MSTEIKTQVVVLGAGPAGYSAAFRCADLGLETVIVERYNTLGGVCLNVGCIPSKALLHVAKVIEEAKALAEHGIVFGEPKTDIDKIRTWKEKVITQLTGGLAGMAKGRKVKVVNGLGKFTGANTLEVEGENGKTVINFDNAIIAAGSRPIQLPFIPHEDPRVWDSTDALELKEVPKRMLVMGGGIIGLEMGTVYHALGSEIDVVEMFDQVIPAADKDIVKVFTKRISKKFNLMLETKVTAVEAKEDGIYVSMEGKKAPAEAQRYDAVLVAIGRVPNGKNLDAGKAGVEVDDRGFIRVDKQLRTNVPHIFAIGDIVGQPMLAHKGVHEGHVAAEVIAGKKHYFDPKVIPSIAYTEPEVAWVGLTEKEAKEKGISYETATFPWAASGRAIASDCADGMTKLIFDKESHRVIGGAIVGTNGGELLGEIGLAIEMGCDAEDIALTIHAHPTLHESVGLAAEVFEGSITDLPNPKAKKK

SEQ ID NO: 57768 - DNA, 1428 bp, Nostoc sp. PCC 7120
  CDS (1)..(1428): transl_table=11
gtgagtcatgaatttgattacgatttagtcataataggcgctggtgtagggggacatggcgcagccctacacgcggtaagttgcggcttaaagacggcgattatcgaggcagctgacatggggggaacctgtgtcaatcgaggctgtattccatcgaaggcgctgttagctgcttctggacgtgtgcgggaattacgcgatgcccatcacctgaagtctctggggattcaaattggtaatgtggagtttgatcgtcaagcgatcgctaatcatgctaataatctcgtctccaaaattcaaggagatttaacaaatagcctgaaacgtctgggagtcgatatcatcaggggttggggcaaaatcgcggggacacaaaaagtcaccgttacaggcgatggtggtgaaaaaaccatcaccgctaaggatattatcctttcccctggttctgtccccttcgtacctccaggtattgaagtagatggcaaaaccgtcttcaccagcgaccaaggcgtaaagttagaaaccttacctgaatgggtagcaattattggtagtggttacattggtttagaattctcggatatttactcagctttgggctgtgaaatcaccttgattgaagccctcgaccagttaatgccaggatttgaccgcgatattgccaaactcgcggaacgagtgctgattacaccccgcgacattgaaaccaaagttggcatatatgccaaaaaagttattcctggttcgccagtagtaattgaattggcagatttcaaaaccaaggaagttgtcgatgttatcgaagtagatgcttgcctagtagcgacaggacgcatcccagctacaaaaaacctgggtttagaatctattggtgtcgaacttgaccgccgcaactttattcctgtagacgatcgcatggcagtgttatcagcaggtgaagtagtaccccatttgtgggcaattggtgatgccaacggcaaaatgatgctggcacacgcggcttcagcccagggcattgtcgccgtggaaaatatcatcggtagggaaagaacagtagactatcgcagcattcccgccgccgcatttacccatccagaagttagctatgtcggcttaacagaaacaggtgctaaagaattaggccaagctgaaggttttgaagtcgccaccagcagaagttacttcaaaggcaattccaaagccttagctgaaaacgaagccgacggtatagccaaagtcatctaccgcaaagataccggggaagttttaggcgtacatatctttggtttacacgcctccgacttaatccacgaagcatccgccgccgtcgccaatcgtcaaaccgtccaaaccctagcccatttagtccacgcccacccaacattatccgaagtgttggatgaagcgtataaacgagcgatcgtttag

SEQ ID NO: 57769 - protein, 475 aa, Nostoc sp. PCC 7120
MSHEFDYDLVIIGAGVGGHGAALHAVSCGLKTAIIEAADMGGTCVNRGCIPSKALLAASGRVRELRDAHHLKSLGIQIGNVEFDRQAIANHANNLVSKIQGDLTNSLKRLGVDIIRGWGKIAGTQKVTVTGDGGEKTITAKDIILSPGSVPFVPPGIEVDGKTVFTSDQGVKLETLPEWVAIIGSGYIGLEFSDIYSALGCEITLIEALDQLMPGFDRDIAKLAERVLITPRDIETKVGIYAKKVIPGSPVVIELADFKTKEVVDVIEVDACLVATGRIPATKNLGLESIGVELDRRNFIPVDDRMAVLSAGEVVPHLWAIGDANGKMMLAHAASAQGIVAVENIIGRERTVDYRSIPAAAFTHPEVSYVGLTETGAKELGQAEGFEVATSRSYFKGNSKALAENEADGIAKVIYRKDTGEVLGVHIFGLHASDLIHEASAAVANRQTVQTLAHLVHAHPTLSEVLDEAYKRAIV

SEQ ID NO: 57770 - DNA, 1446 bp, Agrobacterium tumefaciens str. C58
  CDS (1)..(1446): transl_table=11
atggctcaatcttatgacgtcatcatcatcggttcgggaccgggcggttatattgccgcgatccgcgcagcccagctcggcatgaaggttgccgtcgtcgagcgcgaacatctggcgggcatctgctccaactggggctgcattcctaccaaggccctgctgcgcaccgccgatgtcatgcacaccgccacccacgccaaggattacggcctgacgctggaaggttcgatcaagcctgacgtgaaggcaatcgtggcgcgctcgcgcggcattgctgcgcgcatgaacaacggcgtcggtttcctgttcaagaagaacaaggtcgatatcatctggggtgaagcgaaaatcaccaagcccggcgaaatcgttgtcggcaagtccaccaagccggtggttcagccgcagggtccggttccgaagaacacgctgggcgagggcacttacaccgccaagcacatcatcgtcgcaacaggcgcccgcccgcgcgcgcttccgggcatcgagccggacggcaagctgatctggacctatttcgaggcgatgaagccggaagagctgccgaagtcgctgctcgtcatgggttcgggcgccatcggcatcgaattcgccagcttctaccgcaccatgggcgtcgatgttaccgtcgtcgagatcatgagccaggtcatgccggtcgaagatgcggaaatctctgcctttgccaagaagcagctggaaaagcagggtatcaagattcatctggagaccaaggtttccaaggtcgagaaggccgcgaattccgttaccgcgacgttggagaagaaggacggttcgtccgagaagatcatcgctgaccggatgatttcggctgtcggcgtcgtggcgaatgtcgaaggcatcggccttgaggccgccggcgtgaagaccgatcgcggtttcatcatcattgacggttacggcaaaaccaacgtgcctggtatttacgccatcggcgatgtcgccggcccgccgctgctcgcccataaggccgagcacgaggccgtcatctgcgttgaaaagatcgctggtctgccgaatgtccatccgatggacaagctcaagatccccggctgcacctattgcaacccgcaggtcgcctcggttggtttgaccgaagccaaggccaaggaacagggccgcgacatccgcgtcggccgtttctcctttgcggcgaacggcaaggcggttgcgctcggtgaagaccagggcatggtcaagaccatcttcgacaagaagaccggcgaactgctcggtgcccatatggtcggtgcggaagtgaccgaactcattcagggcttcgtcgttgccatgaacctcgagacgacggaagaagatttgatgcacacgatcttcccgcatccgaccatttcggaatcaatgaaggaaagcgtgctcgacgcttacggacgtgtgctgaacgcataa

SEQ ID NO: 57771 - protein, 481 aa, Agrobacterium tumefaciens str. C58
MAQSYDVIIIGSGPGGYIAAIRAAQLGMKVAVVEREHLAGICSNWGCIPTKALLRTADVMHTATHAKDYGLTLEGSIKPDVKAIVARSRGIAARMNNGVGFLFKKNKVDIIWGEAKITKPGEIVVGKSTKPVVQPQGPVPKNTLGEGTYTAKHIIVATGARPRALPGIEPDGKLIWTYFEAMKPEELPKSLLVMGSGAIGIEFASFYRTMGVDVTVVEIMSQVMPVEDAEISAFAKKQLEKQGIKIHLETKVSKVEKAANSVTATLEKKDGSSEKIIADRMISAVGVVANVEGIGLEAAGVKTDRGFIIIDGYGKTNVPGIYAIGDVAGPPLLAHKAEHEAVICVEKIAGLPNVHPMDKLKIPGCTYCNPQVASVGLTEAKAKEQGRDIRVGRFSFAANGKAVALGEDQGMVKTIFDKKTGELLGAHMVGAEVTELIQGFVVAMNLETTEEDLMHTIFPHPTISESMKESVLDAYGRVLNA

SEQ ID NO: 57772 - DNA, 1407 bp, Agrobacterium tumefaciens str. C58
  CDS (1)..(1407): transl_table=11
atggcatatgatgtagttgtaatcggaacgggtcccggtggttatgtttgcgcggtcaaggcggcacagctcggcctcaaggtcgcagtgatcgaaaagcgcgcgacctatggcggcacctgcctcaatgtcggctgcattccttccaaggcgttgctgcacgcctccgaaaccttcgcgcatgtggcccacggcgttgatacgcttggtatcgaagtcgccgctccgaagctgaacctcgagaagatgatggggcacaaagacggcgtggtgaaagccaatgtcgacggcgttgctttcctgttcaagaagaacaagatcgatgctttccagggcactggcaaggtggtttccgccggcaaggtttccgtcaccaacgacaagggtgagacccaggagatcgaagccaagaacatcgtcatcgccaccggttccgatgttgccggcattccgggtgtcaaggtcgatatcgatgaaaccgtcatcgtgtcctccaccggtgcgattgctctttccaaggttccggaaaaactcatcgtcgttggcggtggtgtcatcggtctcgagcttggttcggtctggtcgcgtcttggcgcgaaggtgaccgtcgtcgaatatctcgacaacattctcggtggcatggatggcgaagtttccaagcagtcgcagcgtctgctcgccaagcagggtctcgatttcaagcttggcgccaaggtgacggccgttgaaaagaccgctgccggtgcaaaggtcgtattcgagccggtcaagggcggcgcggctgaaacgctggaagctgatgtcgtgctgatctccacggggcgcaagccctacaccgaaggtctcggccttgcggaagccggtgttgtgctcgacagccgcgggcgtgtcgagatcgacggccactacaagaccaatgtcgatggcatctatgcgatcggcgatgtggtgaagggcccgatgctggcacacaaggcggaagatgagggcgttgcgcttgctgaaatcctcgccggccagcgtggccatgtgaactacgacgtcattccggccgtcgtttatacgcagccggaaatcgcttccgtcggcaatacagaagaggaactgaaggccgctggcgtcgcctacaaggtcggtaagttccccttcaccgccaatggccgcgcccgcgccatgcaggtgacggatggtttcgtgaaaatccttgccgacaaggaaaccgaccgggttctcggcggccatatcgtcggcttcggcgccggcgaaatgatccacgagatcaccgtgctgatggaattcggcggttcttcagaggatcttggccgcacctgccacgcgcacccgaccatgtcggaagccgtgaaggaagcagcacttgccaccttcttcaagccgatccacatgtga

SEQ ID NO: 57773 - protein, 468 aa, Agrobacterium tumefaciens str. C58
MAYDVVVIGTGPGGYVCAVKAAQLGLKVAVIEKRATYGGTCLNVGCIPSKALLHASETFAHVAHGVDTLGIEVAAPKLNLEKMMGHKDGVVKANVDGVAFLFKKNKIDAFQGTGKVVSAGKVSVTNDKGETQEIEAKNIVIATGSDVAGIPGVKVDIDETVIVSSTGAIALSKVPEKLIVVGGGVIGLELGSVWSRLGAKVTVVEYLDNILGGMDGEVSKQSQRLLAKQGLDFKLGAKVTAVEKTAAGAKVVFEPVKGGAAETLEADVVLISTGRKPYTEGLGLAEAGVVLDSRGRVEIDGHYKTNVDGIYAIGDVVKGPMLAHKAEDEGVALAEILAGQRGHVNYDVIPAVVYTQPEIASVGNTEEELKAAGVAYKVGKFPFTANGRARAMQVTDGFVKILADKETDRVLGGHIVGFGAGEMIHEITVLMEFGGSSEDLGRTCHAHPTMSEAVKEAALATFFKPIHM

SEQ ID NO: 57774 - DNA, 1704 bp, Arabidopsis thaliana
  CDS (1)..(1704)
atgcaatcggttctttctctttccttctcacaagcatcgcttcctttagcgaatcgtacgctttgttcatccaacgcagctccttctacgccgagaaatctccggttctgtggactccggcgagaagcgttttgcttctctccgtcgaagcaattgacctcgtgccgtttccatattcagagtaggagaatcgaagtctccgccgctgcttcttcttccgctggaaatggagctccatcgaaatcattcgattatgatttgatcattatcggagctggagttggtggccatggagctgcattgcacgccgtcgagaagggactcaaaactgctatcattgaaggagatgttgttggaggtacttgcgttaacagaggctgtgtgccttccaaagctctacttgctgttagtggtaggatgagggaactccagaacgaacatcacatgaaggcttttggtttgcaggtttcagctgctggttatgaccgccaaggtgtggctgaccacgcaagtaacctggctaccaaaattaggaataatctcaccaattctatgaaggcacttggtgttgacatattgacagggtttggcgctgttctgggcccacaaaaggttaaatatggtgacaatattatcaccggaaaagatataatcatcgcaactggatctgtaccgttcgtcccgaaaggaattgaagttgatggaaagactgttatcacaagtgatcatgcattgaaattggagtccgttcctgactggattgcgatagtaggaagtggttatatcggtcttgagttcagtgatgtttacacggcccttggaagtgaggtaacttttattgaggcactggatcaactaatgcctggatttgatcctgagatcagtaagctggctcaaagggttctaataaatacaagaaaaattgactaccatactggagtatttgcaagcaaaatcactccagcaaaggatgggaaaccagtgctgattgaactaattgatgccaaaaccaaggaacccaaggatactttggaggttgacgctgctctaattgctactggaagagctccattcaccaatggtcttggcctggaaaatatcaatgttaccacacaaagaggttttataccagttgatgagcgaatgcgtgttattgatggaaatggaaagctggttccccacttgtactgcatcggtgatgccaatggtaaactgatgcttgctcatgcagctagtgctcaaggaatttctgtggtggagcaagtcacaggtagagatcatgtgcttaatcatcttagcatcccagctgcttgttttactcatcctgaaataagtatggtgggattgacagagcctcaagcgagagagaaagctgagaaagagggattcaaagtaagtatcgccaagacaagtttcaaggcaaacacaaaggccctagccgaaaatgaaggagaaggactcgctaagatgatatacagacctgacaatggtgaaatccttggagttcatatatttggattgcatgctgctgatcttatccatgaagcatcaaacgcgattgctttaggaacacgtattcaggacataaaacttgctgttcatgcacatccaacactgtctgaagttgtagacgaactgtttaaagcagccaaggtcgatagtccagcttcagtaacagcacaaagtgtgaaagttactgtgtaa

SEQ ID NO: 57775 - protein, 567 aa, Arabidopsis thaliana
MQSVLSLSFSQASLPLANRTLCSSNAAPSTPRNLRFCGLRREAFCFSPSKQLTSCRFHIQSRRIEVSAAASSSAGNGAPSKSFDYDLIIIGAGVGGHGAALHAVEKGLKTAIIEGDVVGGTCVNRGCVPSKALLAVSGRMRELQNEHHMKAFGLQVSAAGYDRQGVADHASNLATKIRNNLTNSMKALGVDILTGFGAVLGPQKVKYGDNIITGKDIIIATGSVPFVPKGIEVDGKTVITSDHALKLESVPDWIAIVGSGYIGLEFSDVYTALGSEVTFIEALDQLMPGFDPEISKLAQRVLINTRKIDYHTGVFASKITPAKDGKPVLIELIDAKTKEPKDTLEVDAALIATGRAPFTNGLGLENINVTTQRGFIPVDERMRVIDGNGKLVPHLYCIGDANGKLMLAHAASAQGISVVEQVTGRDHVLNHLSIPAACFTHPEISMVGLTEPQAREKAEKEGFKVSIAKTSFKANTKALAENEGEGLAKMIYRPDNGEILGVHIFGLHAADLIHEASNAIALGTRIQDIKLAVHAHPTLSEVVDELFKAAKVDSPASVTAQSVKVTV

SEQ ID NO: 57776 - DNA, 1386 bp, Thermoanaerobacter tengcongensis MB4
  CDS (1)..(1386): transl_table=11
atggaaaaccttcataccagagaatatgacttggctgtcataggcggagggcctggagggtatgtggcggctatcaaagctgctaaaaaaggggcaaaagtagctctgtttgaaaaggataaattagggggcacatgtcttaatagaggttgtatacctacaaaggcttatgcaagagctgctgaggtctatggaattttaaaaaaggcaaaagagtttggctttgatattcaaataaattattttgattatgcgcaagtagtgaagagaaaggataccattgtaggggaacttgttgaaggcattaaggctttgcttaaagccaataaaatagaggtcttcaataaagaagcgaaggtagacaaagagaagaatgtaatttttgagggagaaaaaatcaaagcgaaaaacattataattgctactggttcatctcctgcagagcttccaattgaaggcattgattcgaaaaatgttctaaatagcgatacaattttggagataacgtctttacccaagagtttatgcattataggtggcggagtaatagggatggaatttgcttttataatgaaccaatttggagtagaagtgtatgtggttgaaatgatgcctaatatcctcccttcccttgataaaaaagtaagttctgctgttaaatttgctgctcagaagagaggcattaagatttatacttcttctactgtggaaaaagtagaggaggagggagaaaactctgtagttacgattagaagcggtgatgatattaagaagatatctgttgataaagtgtttgtttctattggaagaaagttaaatacaagtatagggccaattgtagatttgcttgaatttgataagaaagcgattaaagtcgatgagcacatgaggacaaacatagagggtgtttgggctgtaggagatgtgacaggtaaaatgatgctggcccatgtagcttcttcacagggagaagtggcagttgacaatatttttggaaagtcgagaactttggattactacaagatacctgcagctgtttttacagaaccagaaattggatatttcgggtatacagaagaggaggccaaagaaaaatttggagaaattaaagtaggaagatttgacttcaagcataacgggagagccaaaacttatggtgagacagaaggatttgccaagataatttcaactgaagatggagaagtagttggggcatgggtagtaggtagtggcgcttctgagcttgtgcacataatttcaacggcttgtcagagcggagcaaaagcggaagaattgaaagatgtggtctatgcccatcctacaaagagcgaaactattatggaggcttttaaagatattttcaaagaggcaatccacaaaatttaa

SEQ ID NO: 57777 - protein, 461 aa, Thermoanaerobacter tengcongensis MB4
MENLHTREYDLAVIGGGPGGYVAAIKAAKKGAKVALFEKDKLGGTCLNRGCIPTKAYARAAEVYGILKKAKEFGFDIQINYFDYAQVVKRKDTIVGELVEGIKALLKANKIEVFNKEAKVDKEKNVIFEGEKIKAKNIIIATGSSPAELPIEGIDSKNVLNSDTILEITSLPKSLCIIGGGVIGMEFAFIMNQFGVEVYVVEMMPNILPSLDKKVSSAVKFAAQKRGIKIYTSSTVEKVEEEGENSVVTIRSGDDIKKISVDKVFVSIGRKLNTSIGPIVDLLEFDKKAIKVDEHMRTNIEGVWAVGDVTGKMMLAHVASSQGEVAVDNIFGKSRTLDYYKIPAAVFTEPEIGYFGYTEEEAKEKFGEIKVGRFDFKHNGRAKTYGETEGFAKIISTEDGEVVGAWVVGSGASELVHIISTACQSGAKAEELKDVVYAHPTKSETIMEAFKDIFKEAIHKI

SEQ ID NO: 57778 - DNA, 1461 bp, Streptomyces coelicolor A3(2)
  CDS (1)..(1461): transl_table=11
atgagcggccggacaccagccgccgaccggtcactggagaccggcgtggcgcacatgcatggaggacgtgacgtggcgaacgacgccagcaccgttttcgacctagtgatcctcggcggtggcagcggtggttacgccgcggccctgcgcggggcgcagctgggcctggacgtcgccctgatcgagaagaacaagctcggcggcacctgccttcacaacggttgcattcccaccaaggccctgctccacgcgggcgaggtcgccgaccagtcccgcgagagcgagcagttcggcgtcaagacgtccttcgagggcgtcgacatggccggcgtgcacaagtacaaggacgaggtgatcgccggcctgtacaagggcctgcagggtctggtcgcctcccgcaagatcacctacatcgagggtgagggccggctctcctcccccacctcggtggacgtcaacggccagcgtgtccagggccgccacgtcctgctggcgaccggctccgtgccgaagaccctgccgggcctggagatcgacggcaaccggatcatctcctcggaccacgccctcacgctcgaccgcgtgccgaagtccgcgatcgtgctgggcggcggcgtcatcggcgtcgagttcgcctccgcgtggaagtccttcggttccgaggtcacggtcatcgagggcctcaagcacctcgttccggtcgaggacgagaacagctccaagctcctggagcgcgccttccgcaagcggggcatcaagttcaacctgggcaccttcttccagaaggccgagtacacccaggacggcgtcaaggtcaccctcgccgacggcaaggagttcgaggccgaggtcctgctcgtcgccatcggccgcggccccgtctcgcagggcctgggctacgaggagaacggcgtcgcgacggaccgcggcttcgtcctcgtcgacgagtacatgcggaccaacgtcccgaccatctccgccgtcggtgacctcgttcccaccctccagctcgcgcacgtcggcttcgccgagggcatcctggtggcggagcggctcgccggcctgaagaccgtgccggtcgactatgacggcgtgccgcgggtgacgtactgccacccggaggtcgcctccgtcggtctcaccgaggccagggccaaggaggtctacggcgcggacaaggtcgtctcgatcaagttcccgctgggcggcaacggcaagagccgcatcctgaagaccgcgggcgagatcaagctggtccaggtcaaggacggcgccgtggtcggcgtccacatggtcggcgaccgcatgggcgagcaggtcggcgaggcgcagctgatctacaactgggaggcgctgccggccgaggtggcccagctcatccacgcccacccgacgcagaacgaggcgctcggcgaggcccacctggcgctggccggcaagccgctccacatgcacgactga

SEQ ID NO: 57779 - protein, 486 aa, Streptomyces coelicolor A3(2)
MSGRTPAADRSLETGVAHMHGGRDVANDASTVFDLVILGGGSGGYAAALRGAQLGLDVALIEKNKLGGTCLHNGCIPTKALLHAGEVADQSRESEQFGVKTSFEGVDMAGVHKYKDEVIAGLYKGLQGLVASRKITYIEGEGRLSSPTSVDVNGQRVQGRHVLLATGSVPKTLPGLEIDGNRIISSDHALTLDRVPKSAIVLGGGVIGVEFASAWKSFGSEVTVIEGLKHLVPVEDENSSKLLERAFRKRGIKFNLGTFFQKAEYTQDGVKVTLADGKEFEAEVLLVAIGRGPVSQGLGYEENGVATDRGFVLVDEYMRTNVPTISAVGDLVPTLQLAHVGFAEGILVAERLAGLKTVPVDYDGVPRVTYCHPEVASVGLTEARAKEVYGADKVVSIKFPLGGNGKSRILKTAGEIKLVQVKDGAVVGVHMVGDRMGEQVGEAQLIYNWEALPAEVAQLIHAHPTQNEALGEAHLALAGKPLHMHD

SEQ ID NO: 57780 - DNA, 1437 bp, Xanthomonas axonopodis pv. citri str. 306
  CDS (1)..(1437): transl_table=11
atgagcgaacaattcgacgtcgtcgtcatcggtgccggtccggccggttatcacgccgccatccgtgcggcgcagctgggcatgaaggtcgcctgcatcgacgcggccctgggcaaggacggcaagccggcactgggcggtacctgcctgcgcgtgggctgcattccgtccaaggcgctgctggattcctcgcgccagttctggaacatgggccacctgttcggcgaccacggaatcagcttcaacgacgccaagatggacgtgcccaccatgatcggccgcaaggacaagatcgtgaagcagttcaccggcggcatcgcgatgctgttcaaggccaacaagatcaccccgtactacggcttcggccagttgcagccgggcaacatcgtcaaggtgacccagcatgaaggcggcgagatcgagctcaagggcaccaacgtgatcctggcggccggttcggaatcgatcgaactgccgttcgccaagttcgacggcgacaccatcgtcgacaacgtcggcggcctggatttcaccgccgttcccaagcgtctggccgtcatcggtgccggcgtgatcggcctggagctgggcagcgtgtggaagcgcctgggcgccgaggtgaccatcctcgaagcgctgccggacttcctggccctggccgatgccgaagtggccaagaccgccttgaaggaattcaagaagcagggtctggacatcaagctgggcgccaaggtcggcaagaccgagatcaccggcagcgacgacgccaagcaggtggtgctcagctacaccgacgcgaccggcgagcagaccctgaccgtggacaagctgctggtggccgtgggccgcaaggccgccaccaagaacctgctggccgacggcacgggcgtcaaggtcaccgaccgcggccagatcgaggtcgacgggcattgccacaccggcgtggatggcgtgtgggcgatcggcgactgcgtgcgcggcccgatgctggcgcacaagggcttcgaggaaggcatcgcggtggccgaattgatcgccggcctgccgggtcacgtcaatttcgacaccattccgtgggtcatctacaccgagccggaaatcgcctgggtcggcaagaccgagcagcagctcaaggccgagggcgtcgcctacaaggccggcagcttcccgttcgcagcgatcggtcgcgcggtggcgatgggcgagccggccggcttcgtcaaagtgatcgccgatgccgaaaccgaccgcgtgctgggtatgcacctggtgggcgtgggcgtttccgagctggtgcacgaaggcgtgctgaccatggagttcagcggctcggccgacgacctggcccgcatctgccacgcgcacccgacgctgtccgaagcgatccacgatgccgcgatggcggtgagcaagcgcgcgattcataaggccaattaa

SEQ ID NO: 57781 - protein, 478 aa, Xanthomonas axonopodis pv. citri str. 306
MSEQFDVVVIGAGPAGYHAAIRAAQLGMKVACIDAALGKDGKPALGGTCLRVGCIPSKALLDSSRQFWNMGHLFGDHGISFNDAKMDVPTMIGRKDKIVKQFTGGIAMLFKANKITPYYGFGQLQPGNIVKVTQHEGGEIELKGTNVILAAGSESIELPFAKFDGDTIVDNVGGLDFTAVPKRLAVIGAGVIGLELGSVWKRLGAEVTILEALPDFLALADAEVAKTALKEFKKQGLDIKLGAKVGKTEITGSDDAKQVVLSYTDATGEQTLTVDKLLVAVGRKAATKNLLADGTGVKVTDRGQIEVDGHCHTGVDGVWAIGDCVRGPMLAHKGFEEGIAVAELIAGLPGHVNFDTIPWVIYTEPEIAWVGKTEQQLKAEGVAYKAGSFPFAAIGRAVAMGEPAGFVKVIADAETDRVLGMHLVGVGVSELVHEGVLTMEFSGSADDLARICHAHPTLSEAIHDAAMAVSKRAIHKAN

SEQ ID NO: 57782 - DNA, 1515 bp, Drosophila melanogaster
  CDS (1)..(1515)
atgcaattcacgctccgtcatgttgtttcggcagtagccaagactcctctgcgcaccaatgccgccattctgggtgccctcaacgcccgctgctactccagcacccacgaggcggacatcgtggtgattggctccggacccggtggctatgtcgccgccatcaaggccgcccagatgggcatgaagacggtcagcgtggagaaggaggcaactctgggcggcacctgcctgaatgttggctgcattccctcaaaggcgctgctgaacaactcccactactaccacatggcccactccggtgatctggagaaacgtggtattagctgcggcagcgttagcctggatctggagaagcttatgggtcaaaagtccaacgccgtgaaggctttgaccggtggcattgccatgcttttcaagaagaacaaggtcacacagctgacgggcttcggcaccatcgtcaatcccaacgaggtggaggttaagaaatccgacggctccacggagactgtcaagaccaagaacatcctcatcgccaccggctcggaggttacccccttccctggcattgaaatcgacgaggaagttattgtgagcagcactggcgccctgaagctggccaaggtgcccaagcatctggttgtcatcggcgccggtgtcattggcctggagctgggttcggtatggtcgcgtctgggcgctgaggtcactgccattgagttcatggatacgatcggcggcgtgggcatcgataacgaagtctccaagacgttccaaaaggtgctcaccaagcagggtcttaagttcaagctgggcaccaaggtgacggctgcctctcgcagcggcgacaacgtcaccgtgtccgtggagaacgccaagtctggcgagaaagaggagatccagtgcgacgccctgctggtcagtgttggacgtcgtccctacaccgaaggtttgggtctggaggccgtgggcattgttaaggatgaccgcggcaggatccccgtcaacgccactttccaaactgtggtgcccaatatttacgccatcggcgactgcatccacggacccatgttggcgcacaaggctgaagatgagggcctcatcaccattgagggcatcaacggcggccacgtgcacatcgactacaactgcgtgcccagtgtagtctacacgcatcccgaggtcgcgtgggttggcaagagcgaggagcaactgaagcaggagggtgttgcctacaaggtgggcaagttccccttcctggccaactctcgtgccaagaccaacaacgacaccgacggtttcgtcaaggttctggccgaccaggccaccgataagatcctgggaacccatattatcggacctggtgccggcgagctcattaacgaggctgtgctggccatggagtacggagccgctgccgaggacgttgcccgcgtttgccatgcgcatccaacatgttccgaggccctgcgtgaggccaatgtggcagctgcctttggcaaacccatcaacttctaa

SEQ ID NO: 57783 - protein, 504 aa, Drosophila melanogaster
MQFTLRHVVSAVAKTPLRTNAAILGALNARCYSSTHEADIVVIGSGPGGYVAAIKAAQMGMKTVSVEKEATLGGTCLNVGCIPSKALLNNSHYYHMAHSGDLEKRGISCGSVSLDLEKLMGQKSNAVKALTGGIAMLFKKNKVTQLTGFGTIVNPNEVEVKKSDGSTETVKTKNILIATGSEVTPFPGIEIDEEVIVSSTGALKLAKVPKHLVVIGAGVIGLELGSVWSRLGAEVTAIEFMDTIGGVGIDNEVSKTFQKVLTKQGLKFKLGTKVTAASRSGDNVTVSVENAKSGEKEEIQCDALLVSVGRRPYTEGLGLEAVGIVKDDRGRIPVNATFQTVVPNIYAIGDCIHGPMLAHKAEDEGLITIEGINGGHVHIDYNCVPSVVYTHPEVAWVGKSEEQLKQEGVAYKVGKFPFLANSRAKTNNDTDGFVKVLADQATDKILGTHIIGPGAGELINEAVLAMEYGAAAEDVARVCHAHPTCSEALREANVAAAFGKPINF

SEQ ID NO: 57784 - DNA, 1464 bp, Brucella suis 1330
  CDS (1)..(1464): transl_table=11
atggccgacatttacgacgttattgttatcggatctggccccggcggctatgtgacggcgatccgcgcagcgcagctcggtctcaagaccgctatcgtcgaacgcgaacatctgggcggcatctgcctcaactggggctgtattccgaccaaggcgctgttgcgttcggcggaaatcctgcatttcggcgaacatgccaaggattacggcctgaaactcgacggcaccatcacgcctgacgtgaaagctgttgtgcagcgttcgcgcggggtttcggcgcggctgaatggcggcgttgccttcctgatgaagaaaaacaagatcgatgtgatctggggcgaggcgaagcttgtgaaggctgcctccggcagcaatccggcggagatttccgtcggcaagacctccaaacagccaatgcagccgcaaaaccccgtgccgaagggcgtgctgggcgagggcagctataaggccaagcatatcatcgtggccacgggtgcgcgcccgcgggcgctgcccggtatcgagccggacggcaaattgatctggacctattttgaagccatggtgccgcaggccctgccgaaatccatgctggtgatggggtctggcgctatcggtatcgaatttgcctccttctatcacgacatgggtgtcgatgtgaccgtggtggaagtgatgtcgcagatcatgccggtggaagatgccgaaatctctgccattgcccgcaagcagcttgaaaagcgcggcctgaagatcatcaccgacgccaaggtggcaaaggtggaaaagggcgccaacagcgtcacggcccatgtcgagaccaaggatggcaaaacccagaccctgacggttgaccgcatgatctcggcggtgggtgtgcagggcaatatcgaaaatctcggtctggaagcacttggcgtgaagacggatcgcggctgcatcgtcatcgacggttatggcaagaccaatgtggcgggcatctatgccattggcgatgttgccgggccgccgatgctggcgcacaaggcagagcatgaaggcgtgatctgcgtggaaaagattgcgggcctgcccaatgtccatccgctggacaagggcaagattcccggctgcacctattgcaacccgcaggtggcctcggtcggcctgactgaagccaaggcgaaagagcagggctatgacattcgtgtcgggcgctattccttctcggccaatggcaaggcgatcgcgcttggtgaggatcaggggctggtcaagaccatcttcgaccggaagaccggacagcttttgggtgcgcatatggtgggtgcggaagtgactgaactcattcagggcttcgtgatcgccatgaaccttgaaaccaccgaagaggaactgatgcattcggtcttcccgcatccgaccctttcggaaacgatgaaggaaagcgttctcgacgcctatggacgggtgctgaacgcttga

SEQ ID NO: 57785 - protein, 487 aa, Brucella suis 1330
MADIYDVIVIGSGPGGYVTAIRAAQLGLKTAIVEREHLGGICLNWGCIPTKALLRSAEILHFGEHAKDYGLKLDGTITPDVKAVVQRSRGVSARLNGGVAFLMKKNKIDVIWGEAKLVKAASGSNPAEISVGKTSKQPMQPQNPVPKGVLGEGSYKAKHIIVATGARPRALPGIEPDGKLIWTYFEAMVPQALPKSMLVMGSGAIGIEFASFYHDMGVDVTVVEVMSQIMPVEDAEISAIARKQLEKRGLKIITDAKVAKVEKGANSVTAHVETKDGKTQTLTVDRMISAVGVQGNIENLGLEALGVKTDRGCIVIDGYGKTNVAGIYAIGDVAGPPMLAHKAEHEGVICVEKIAGLPNVHPLDKGKIPGCTYCNPQVASVGLTEAKAKEQGYDIRVGRYSFSANGKAIALGEDQGLVKTIFDRKTGQLLGAHMVGAEVTELIQGFVIAMNLETTEEELMHSVFPHPTLSETMKESVLDAYGRVLNA

SEQ ID NO: 57786 - DNA, 1428 bp, Shewanella oneidensis MR-1
  CDS (1)..(1428): transl_table=11
atgagtaacgaaatcaaaactcaggtagtggtattaggagcgggtcctgctggatattctgcggccttccgtgcggcggatttaggcttggaaaccgttatcgttgaacgttttagcactttaggtggtgtgtgtctgaacgtgggttgtatcccatctaaagccctgttacacgttgctaaagtgatcgaagaagccaaagccgttgctgcacacggtgtggttttcggcgagccaaccatcgatttagacaagttacgcagcttcaagcaaaaagtaatcagccagttgactggtggcttaggcggcatgtctaaaatgcggaaagttaacgttgttaatggcttcggtaaattctctggccctaacagcctagaagtgactgcagaagacggcactgtgacggttgttaagtttgaccaagcgatcatcgctgcgggttctcgcccaattaaactgccatttattccccatgaagacccacgtatttgggattcgaccgacgcattagaactgaaagaagtccctggcaaattgttggtaatgggcggtggtattatcggtttagaaatgggtacggtttactcttctctgggcagtgaaatcgacgtggttgaaatgttcgaccaagtgatccctgcggctgacaaagacgttgttcgcgtattcactaagcaaatcaagaagaaattcaacctgatcctcgaaactaaagtcacagcggttgaagcccgtgaagacggtatttacgtttctatggaaggtaagagcgcgccagctgagcctgtacgttacgatgcggtattagtcgccatcggccgtacgccaaatggcaagctgatcgacgctgaaaaagcgggcgttaagattgatgagcgtggtttcatcaacgtagacaagcaattacgtactaacgtaccgcacatctacgccatcggtgacatcgttggtcaaccaatgttggctcataaaggtgtgcatgaaggccacgtcgcggccgaagttatcgcgggcatgaagcattacttcgatccaaaagttatcccatcaatcgcttacacagaccctgaagtggcctgggttggtctgacagagaaagaagcgaaagagcaaggtattgcttacgaaactgctactttcccatgggcagctagtggtcgtgctattgcgtcagattgctctgaaggtatgactaagctgattttcgataaagatactcaccgcgttatcggtggtgctatcgtcggtgtaaacggtggcgaactgttaggcgaaatcggtctggcaatcgaaatgggttgtgatgctgaagatttagcattaacgattcacgctcacccaacgctacatgagtctgttggtttagcggctgaaatctacgaaggctcgattactgacttgccaaacccaaaggcaaagaaaaagtaa

SEQ ID NO: 57787 - protein, 475 aa, Shewanella oneidensis MR-1
MSNEIKTQVVVLGAGPAGYSAAFRAADLGLETVIVERFSTLGGVCLNVGCIPSKALLHVAKVIEEAKAVAAHGVVFGEPTIDLDKLRSFKQKVISQLTGGLGGMSKMRKVNVVNGFGKFSGPNSLEVTAEDGTVTVVKFDQAIIAAGSRPIKLPFIPHEDPRIWDSTDALELKEVPGKLLVMGGGIIGLEMGTVYSSLGSEIDVVEMFDQVIPAADKDVVRVFTKQIKKKFNLILETKVTAVEAREDGIYVSMEGKSAPAEPVRYDAVLVAIGRTPNGKLIDAEKAGVKIDERGFINVDKQLRTNVPHIYAIGDIVGQPMLAHKGVHEGHVAAEVIAGMKHYFDPKVIPSIAYTDPEVAWVGLTEKEAKEQGIAYETATFPWAASGRAIASDCSEGMTKLIFDKDTHRVIGGAIVGVNGGELLGEIGLAIEMGCDAEDLALTIHAHPTLHESVGLAAEIYEGSITDLPNPKAKKK

SEQ ID NO: 57788 - DNA, 1812 bp, Xylella fastidiosa Temecula1
  CDS (1)..(1812): transl_table=11
atgacggtgattgaaatcaaagttcccgatatcggcgattacagcaaggtcccagtcatcgaagtgctggttaccgttggcgaccacttggtcaaaaaccaagggatcctcacactagaatcagacaaagccaccttggaagtgccatcgatgaataatggcattgtcaaagaactgaaagtcaacgtcggcgatttgctttcacaaggcgacgtgatcctcctgctggagaccgaagacaccaccgcccccccctcaccaagcaacgcggcgacatccgacaccacctcaccgcccccgccatccccccaaccagccgcttccaagccgacagcacccgatcaacaacactccgacatcaagtgccgcatggtcgtactcggtgccggtcccggcggctacaccgcagcattccgcgccgctgacctcggcttggatacagtgctcgttgaacgctatcccaacctaggtggcgtctgcctcaatgtcggctgcattccttccaaagcattactgcacgcagccgccgtcatcgacgaagctgcacatgccagcacctttggaattgattttggcaaacccaaaatcaccctagacacactgcgcgaatacaaacaaaacgtagtcaacaaactgactgccggcttggccgggatggccaaacaacgcaaggtacgcaccgtcaccggcatcgcgcacttcgtctctcccaacacactggacattaccgctgctgacggcagcacccaacgactccatttccaacaatgcatcattgctaccggctcacacccagtgaagctaccaaacttcccttgggacgacccgcgcatcatggactccactgacgcactggaactggccgaagtgccaaaaaaactgcttgtcgttggtggcggcatcatcggcctagaaatggctaccgtgtacaacgccctgggcagccacgtcaccattgtcgaattcatggaccagatcatccccggcaccgacaaagatctagtgaagccactggcggaccgcatgaaaaaacagggcattgaaatacacctgaacaccaaagcaagccacgtcaaagccgacaaaaaaggcatcaccgtctcattcgaagcacccacccaaggcacacaacccgcattaaaaacatcgacctatgatcgcgtccttgttgccgtcggccgtacaccgacaggcaacaacatcggcgctgaaaaagcaggcgtcaacgtcaccgaacgcggcttcatcccggttgatcgccaaatgcgcagcaacgtaccccatatctttgccattggagacattgttggtaacccaatgctggcgcacaaagccacacatgaaggcaaactggccgccgaagtcgccgctgctgaaacagaatcaggcaaacatcgggaatgggttgcccgcgtgatcccatccgtggcctacaccaacccggaaattgcctggatcggtatcactgaaaccgaagccaaagcgaaaggactcaacatcggcgtcgccaaattcccctgggttgccagcggtcgcgccataggcatcggacgcactgaaggcttcactaaactcatcttcgacgaagacacacaccgcatcattggcggagcgatcgtcggcgtccacgcaggcgacctcttggctgaaatcggactcgccatcgaaatgggtgccgaagccgaagacatcagccacacaatccacgcacaccccacactgagcgaatcgattgccatgagcgccgaagtctacgacggcaccatcaccgacttgtatctccccaaaaaatccgctacttcagcaaagtaa

SEQ ID NO: 57789 - protein, 603 aa, Xylella fastidiosa Temecula1
MTVIEIKVPDIGDYSKVPVIEVLVTVGDHLVKNQGILTLESDKATLEVPSMNNGIVKELKVNVGDLLSQGDVILLLETEDTTAPPSPSNAATSDTTSPPPPSPQPAASKPTAPDQQHSDIKCRMVVLGAGPGGYTAAFRAADLGLDTVLVERYPNLGGVCLNVGCIPSKALLHAAAVIDEAAHASTFGIDFGKPKITLDTLREYKQNVVNKLTAGLAGMAKQRKVRTVTGIAHFVSPNTLDITAADGSTQRLHFQQCIIATGSHPVKLPNFPWDDPRIMDSTDALELAEVPKKLLVVGGGIIGLEMATVYNALGSHVTIVEFMDQIIPGTDKDLVKPLADRMKKQGIEIHLNTKASHVKADKKGITVSFEAPTQGTQPALKTSTYDRVLVAVGRTPTGNNIGAEKAGVNVTERGFIPVDRQMRSNVPHIFAIGDIVGNPMLAHKATHEGKLAAEVAAAETESGKHREWVARVIPSVAYTNPEIAWIGITETEAKAKGLNIGVAKFPWVASGRAIGIGRTEGFTKLIFDEDTHRIIGGAIVGVHAGDLLAEIGLAIEMGAEAEDISHTIHAHPTLSESIAMSAEVYDGTITDLYLPKKSATSAK

SEQ ID NO: 57790 - DNA, 1410 bp, Enterococcus faecalis V583
  CDS (1)..(1410): transl_table=11
atggcggaacaaacagatttactgattttaggtggcggaacaggaggctatgtagcagcaattcgagctgcacaaaaagggctaaacgtcacaattgttgaaaaatacaaattaggtggcacttgtttgcacaaaggctgtatccctacaaaagctttattaagaagcgcagaggtttttgataccttaaaacaagcggcttcttttgggattgaaacagaggcagcgtccattgatttttctaaaatacaacaacggaaagaaggaattattgagcagttacacaaaggtgttgaaggcttatgcaagaaaaataaaatcaaaattttagcaggcgaaggtgcgattttaggtccctccattttttcaccagtctctggcgcagtggcagttacgtttaatgatccaacacgagaagaagaaattatcgttcctaaaaatgtcattattgcgacaggctctagttctaaaacgttacctaatttgccattggatgaagaatttatcttatcttctgatgggatgcttgaattagaagagctaccagaatcaattgcaattattggtggtggcgttattggtgtcgagtgggcttctttattaaatagtttaggtgtcaacgtaactatcattgaatttttggatcgtttacttataaatgagagtgcaacaatttctaaagaattaaagaaacgtttagagcaacgaggaattaacattttattaggaagcaaagtccaagaagcgaaagttactggacaaaaggttcaagtagaagttgcaggacaagaaaccctcaccgttgacaaagtcatggtagcaattggacgtcagcccaatatcaataagttagggttacagaatacctcagtgaaatatactgacaaaggcattgaagtaaatgaattttatcaaaccacagaaggacatatttatgcgattggtgattgtatcgatacactccaactagcacatgtggctatgaaagaaggagagttagctgttcagcatcttttaggcgagacagttgaacctttaaattatacaaacgtacctcgaggtgtttatacaaatcctgaaatagcaagtgtcggctatactagagaaactttaccagcagaaaaagaagtagtaattggcacctttaattttaatggtaatggtaaatcacttgtttatggagaaacagatggctttatagaagtaattcgtgacaagaagaccgatgatttattaggggtttctatgattggcccacatgtcacggatttaattgccgaagcaagtactgccatgtatttagatgccgcgcccattgaaattggtgaagcaatccatgcgcatccaacaatgacagaagtattgcaagaagcagccttagatacttatggcttagcgattcacaaatag

SEQ ID NO: 57791 - protein, 469 aa, Enterococcus faecalis V583
MAEQTDLLILGGGTGGYVAAIRAAQKGLNVTIVEKYKLGGTCLHKGCIPTKALLRSAEVFDTLKQAASFGIETEAASIDFSKIQQRKEGIIEQLHKGVEGLCKKNKIKILAGEGAILGPSIFSPVSGAVAVTFNDPTREEEIIVPKNVIIATGSSSKTLPNLPLDEEFILSSDGMLELEELPESIAIIGGGVIGVEWASLLNSLGVNVTIIEFLDRLLINESATISKELKKRLEQRGINILLGSKVQEAKVTGQKVQVEVAGQETLTVDKVMVAIGRQPNINKLGLQNTSVKYTDKGIEVNEFYQTTEGHIYAIGDCIDTLQLAHVAMKEGELAVQHLLGETVEPLNYTNVPRGVYTNPEIASVGYTRETLPAEKEVVIGTFNFNGNGKSLVYGETDGFIEVIRDKKTDDLLGVSMIGPHVTDLIAEASTAMYLDAAPIEIGEAIHAHPTMTEVLQEAALDTYGLAIHK

SEQ ID NO: 57792 - DNA, 1389 bp, Streptomyces avermitilis MA-4680
  CDS (1)..(1389): transl_table=11
gtggcgaacgacgccagcaccgttttcgacctagtgatcctcggcggtggtagcggtggttacgccgcggccctgcgcggagcgcagctgggcctggacgtcgccctgatcgagaaggacaaggtcggcggtacctgcctgcaccgtgggtgcatccccaccaaggcgctgctgcacgcgggcgagatcgccgaccaggcccgcgagagcgagcagttcggcgtcaaggccaccttcgagggcatcgacgtaccggccgtccacaagtacaaggacggggtcatctcgggcctgtacaagggtctgcaggggctgatcgcctcccgcaaggtgacgtacatcgagggtgagggccgtctgtcctccccgacctccgtcgacgtgaacggccagcgcgtccagggccgccacgtgctcctggcgaccggctccgtgccgaagtcgctgccgggcctggcgatcgacggcaaccgcatcatctcctccgaccacgcgctggtcctggaccgcgtcccggagtccgcgatcgtgctcggcggcggcgtcatcggcgtcgagttcgcctccgcgtggaagtccttcggagccgacgtgacggtgatcgagggcctcaagcacctcgtcccggtcgaggacgagaactcctccaagcttcttgagcgcgcgttccgcaagcgcggcatcaagttcaacctgggcaccttcttctcgaaggccgagtacacccagaacggtgtcaaggtcaccctcgccgacggcaaggagttcgaggccgaggtcctgctcgtcgccgtcggccgcggcccggtctcgcagggcctcggctacgaggagcagggcgtcgccatggaccgcggctacgtcctggtcgacgagtacatgcggacgaacgtcccgaccatctccgccgtcggtgacctggtcccgacgctccagctcgcgcacgtcggcttcgccgagggcatcctggtggcggagcgtctggccggtctgaagaccgtcccgatcgactacgacggcgtgccgcgggtgacgtactgccaccccgaggtcgcctccgtgggcatcaccgaggccaaggccaaggagatctacggcgcggacaaggtcgtcgctctgaagtacaacctggcgggcaacggcaagagcaagatcctcaacaccgcgggcgagatcaagctcgtccaggtgaaggacggtgccgtggtcggcgtccacatggtcggtgaccgtatgggcgagcaggtcggcgaagcccagctgatctacaactgggaggcgctgccggccgaggtcgcccagctcatccacgcccacccgacgcagaacgaagcgatgggcgaggcccacctggccctcgcgggcaagccgctgcactcgcacgactga

SEQ ID NO: 57793 - protein, 462 aa, Streptomyces avermitilis MA-4680
MANDASTVFDLVILGGGSGGYAAALRGAQLGLDVALIEKDKVGGTCLHRGCIPTKALLHAGEIADQARESEQFGVKATFEGIDVPAVHKYKDGVISGLYKGLQGLIASRKVTYIEGEGRLSSPTSVDVNGQRVQGRHVLLATGSVPKSLPGLAIDGNRIISSDHALVLDRVPESAIVLGGGVIGVEFASAWKSFGADVTVIEGLKHLVPVEDENSSKLLERAFRKRGIKFNLGTFFSKAEYTQNGVKVTLADGKEFEAEVLLVAVGRGPVSQGLGYEEQGVAMDRGYVLVDEYMRTNVPTISAVGDLVPTLQLAHVGFAEGILVAERLAGLKTVPIDYDGVPRVTYCHPEVASVGITEAKAKEIYGADKVVALKYNLAGNGKSKILNTAGEIKLVQVKDGAVVGVHMVGDRMGEQVGEAQLIYNWEALPAEVAQLIHAHPTQNEAMGEAHLALAGKPLHSHD

SEQ ID NO: 57794 - DNA, 1413 bp, Bacillus anthracis str. Ames
  CDS (1)..(1413): transl_table=11
atggtagtaggagatttcccaattgaattagatacagtcgttgttggtgcaggtcctggtggatacgttgcggcaattcgtgcagcacaattaggtcaaaaggtagcaattattgaaaaagctaaccttggtggcgtatgcttaaacgttggatgtattccttcaaaagcgttaatcaatgcaggtcatcgttatgagaatgcaatgcattctgatgacatgggtatcactgcagagaacgtaaaagttgactttacaaaagttcaagaatggaaaaacggcgtagttaagaaattaactggcggtgttgaaggccttcttaaaggtaacaaagttgaaatcattcgcggtgaagcttacttcgtagatgctaatacattacgcgttatgactgaagaggcagctcaaacttatacgtttaaaaatgctgttcttgcaactggttctacaccaatcgaaattccaggattcaaatactctaaacgtgttatcaactctacaggcgctttaagcttacctgaaattcctaaaaaacttgttgtaatcggcggcggttacatcggtatggaattaggtactgcatatgctaacttcggtacagaagttactgtagtagaagctggcgacgaaatcttagctggtttcgaaaaagctatgagctctgttgttaaacgtgctctacagaaaaaaggtaacgtaaatatccatacaaaagctatggctaaaggcgttgaagaaacagaaactggcgtaaaagttagctttgaagttaaaggtgaaatccaaactgtagaagcagattacgtattagtaactgtaggtcgtcgtccaaacactcaagaaatcggtcttgagcaagttggagttaaaatgactgaccgcggcatcatcgaaatcgatgagcaatgtcgtacaaacgtaccaaacatctatgcaatcggtgatatcgttcctggaccaccattagctcacaaagcttcttacgaaggtaaagtagctgtagaagcaattagtggccatgcatcagctatcgattacatcggaattcctgcagtatgcttcactgatccagaattagcatctgttggttacactaagaaacaagctgaagaagctggaatgactgtaactgtatctaagttcccattcgctgctaacggtcgtgcattatcattaaacagcactgacggtttcttacaacttgtaacacgtaaagaagatggtcttcttgtaggtgctcaagttgcaggtgcaggcgcttctgatattatttctgagattggtttagctatcgaagctggaatgacagcagaagatatcgctcaaacaatccacgctcacccaacattaggtgaaatcacaatggaagcagctgaagttgctcttggaatgccaattcacattgtaaaataa

SEQ ID NO: 57795 - protein, 470 aa, Bacillus anthracis str. Ames
MVVGDFPIELDTVVVGAGPGGYVAAIRAAQLGQKVAIIEKANLGGVCLNVGCIPSKALINAGHRYENAMHSDDMGITAENVKVDFTKVQEWKNGVVKKLTGGVEGLLKGNKVEIIRGEAYFVDANTLRVMTEEAAQTYTFKNAVLATGSTPIEIPGFKYSKRVINSTGALSLPEIPKKLVVIGGGYIGMELGTAYANFGTEVTVVEAGDEILAGFEKAMSSVVKRALQKKGNVNIHTKAMAKGVEETETGVKVSFEVKGEIQTVEADYVLVTVGRRPNTQEIGLEQVGVKMTDRGIIEIDEQCRTNVPNIYAIGDIVPGPPLAHKASYEGKVAVEAISGHASAIDYIGIPAVCFTDPELASVGYTKKQAEEAGMTVTVSKFPFAANGRALSLNSTDGFLQLVTRKEDGLLVGAQVAGAGASDIISEIGLAIEAGMTAEDIAQTIHAHPTLGEITMEAAEVALGMPIHIVK

SEQ ID NO: 57796 - DNA, 1425 bp, Rhodopirellula baltica SH 1
  CDS (1)..(1425): transl_table=11
atgaaaacggctcgtcacgaactcgtcattttgggcggtggcccagccggatatgtcgccgccattcgcgcagcacagctcggcatcgacgttgcctgcatcgacgacaaccctcgctttggtgggacgtgcgtacgcgtcgggtgcatccccagcaaagctttgttggaatccagccacctgtatgaagaagcccagcataagttcgccgatcacgggctgaatgtcagcaacgtcgaagtcgatctcgacgtgatgatgaaacgcaaagagaagatcgtcgaatcgctgaccggtggaattgacatgctgttcgatcgccggggtgtgaccgcctatcacggtcgaggccgccttcgcgatgtggacagcatcgaaatcacgcccagcgaaggtgcggccgaagatcagccgactttggtcaccgccgaccaaatcatgctgtgccccggcagtgtcccagcacagcttcccttcgtcgaagaagacggcgaccgaatcggaaacagcaccacggcgttgtccttccccgaagtgcccgaagagttggttgtcatcggcggcggatacatcgggttggaactcggcagcgtctggaaccggctgggcagcaacgtgatcgtcctggaagccttcgaccgcatcatgccgggtctcgacaaggaaatggccaccttggctcatcgcagcttcaagaaacaaggcatggacattcgaacgggaacgttcgtggcatccgccaaagtggatccgaagccaggcgacaagaagccgtgcgtcattaaaatcaaaaacggcgaaacgattcgttgtgaccgagtgctattggccaccggccgcgctcccgcaaccaagagcatgggactcgaggaagccggcgtgaagctcgacgaacgaggcttcatccaagtcaatcaccaattcgagacatcggtgaccggaatctacgccatcggcgattgcatcggcggtgccatgctggctcacaaagccatggaagaaggcattgtctgcgtcgaacagatggccggcatcgcctccgaaatgaattatgaagtgatccccgcgatcgtcttcacccaccccgaaatcgcgatggtcggcaaaacggaagaagaactgaaggaagccggcatcgaatacaacaagggtgtctgtcctctgggggccaacggccgagcccgcacattgggcgacatcgatggccgagttaaaattctcgccgacgccgccaccgatcgagtgctcggcgtgcacatcatcggcccgcgtgccggcgacatgattgcggaagccgccgccgcaatggaatttggtgccagcagcgaagacatcgcccgcacctgccacgctcacccaaccctgtccgaagcggtgcacgaagccgctttggccatcgacgatcgagcgatccacacggcgtga

SEQ ID NO: 57797 - protein, 474 aa, Rhodopirellula baltica SH 1
MKTARHELVILGGGPAGYVAAIRAAQLGIDVACIDDNPRFGGTCVRVGCIPSKALLESSHLYEEAQHKFADHGLNVSNVEVDLDVMMKRKEKIVESLTGGIDMLFDRRGVTAYHGRGRLRDVDSIEITPSEGAAEDQPTLVTADQIMLCPGSVPAQLPFVEEDGDRIGNSTTALSFPEVPEELVVIGGGYIGLELGSVWNRLGSNVIVLEAFDRIMPGLDKEMATLAHRSFKKQGMDIRTGTFVASAKVDPKPGDKKPCVIKIKNGETIRCDRVLLATGRAPATKSMGLEEAGVKLDERGFIQVNHQFETSVTGIYAIGDCIGGAMLAHKAMEEGIVCVEQMAGIASEMNYEVIPAIVFTHPEIAMVGKTEEELKEAGIEYNKGVCPLGANGRARTLGDIDGRVKILADAATDRVLGVHIIGPRAGDMIAEAAAAMEFGASSEDIARTCHAHPTLSEAVHEAALAIDDRAIHTA

SEQ ID NO: 57798 - DNA, 1386 bp, Chlamydophila pneumoniae TW-183
  CDS (1)..(1386): transl_table=11
atgacccaagaatttgattgtgttgttattggtgcgggacctagtggctatgttgccgcaatcactgctgcgcaatcaaaattacggaccgctcttattgaagaagaccaggctggggggacctgcttaaaccgcggatgcatcccttcaaaagccctcattgctggagccaatgttgtatctcacattacgcatgcggagcagttcggcatccatgttgatggttatacaatcgattaccctgcgatggcaaaaagaaaaaatacagtcgtccaggggatccgtcaaggattagaaggattgatccgcagcaacaagattactgtcttaaaaggaaccggatctctagtatcttctacagaagttaaagttattggccaagacacgactataatcaaagccaatcatattatcctagctacaggatccgagcctcgtcctttcccaggggttcccttctcctctagaattttgagttccacagggatcttagaacttgaagtcctccctaaaaagctcgctattattggtggcggcgttattggctgtgaatttgcgtctctatttcacactttaggcgttgagattaccgttatagaagctttggatcatattcttgcggttaacaataaagaagtttctcaaaccgtaacgaataaatttacgaaacaaggaattcgaattcttaccaaagcctcgatctctgcaatcgaagaatcccaaaaccaagttcgcattactgtgaacgatcaagtggaagagtttgattatgtcttggtggctattggtcgccaatttaatacagcaagtatagggctagataatgctggagtgatccgggacgatcgtggcgtgattcctgttgacgaaaccatgcgcactaatgttccaaatatctatgcgattggagacatcactggaaagtggctacttgctcatgtggcttcgcaccaaggcgttattgccgcgaaaaatatttcgggacatcacgaagttatggattattctgccataccttctgtgatctttacccacccagaaattgctatggtaggtctatctctacaagaagcagaacaacaaaatcttcctgcaaagctcaccaaatttccttttaaagcgattggaaaagctgttgctttgggagcatctgatggttttgctgctattgtgagtcatgaaattacccagcaaatactcggagcttatgtcataggacctcacgcctcatcattaattggagagatgaccttagcgatccgcaatgagctgaccctaccttgcatatatgaaaccgtgcatgctcatcccacactctctgaagtttgggctgaaggtgctttacttgctacaaatcaccctttacacttccctcctaagtcatga

SEQ ID NO: 57799 - protein, 461 aa, Chlamydophila pneumoniae TW-183
MTQEFDCVVIGAGPSGYVAAITAAQSKLRTALIEEDQAGGTCLNRGCIPSKALIAGANVVSHITHAEQFGIHVDGYTIDYPAMAKRKNTVVQGIRQGLEGLIRSNKITVLKGTGSLVSSTEVKVIGQDTTIIKANHIILATGSEPRPFPGVPFSSRILSSTGILELEVLPKKLAIIGGGVIGCEFASLFHTLGVEITVIEALDHILAVNNKEVSQTVTNKFTKQGIRILTKASISAIEESQNQVRITVNDQVEEFDYVLVAIGRQFNTASIGLDNAGVIRDDRGVIPVDETMRTNVPNIYAIGDITGKWLLAHVASHQGVIAAKNISGHHEVMDYSAIPSVIFTHPEIAMVGLSLQEAEQQNLPAKLTKFPFKAIGKAVALGASDGFAAIVSHEITQQILGAYVIGPHASSLIGEMTLAIRNELTLPCIYETVHAHPTLSEVWAEGALLATNHPLHFPPKS

SEQ ID NO: 57800 - DNA, 1428 bp, Bordetella parapertussis 12822
  CDS (1)..(1428): transl_table=11
atgtccaaacaattcgacgtcgtcatcatcggtgccggccccggcgggtacatcgccgcgatccgcgctgcccaactcggtatgtcggtggcctgcatcgacgcctggcagaacggccagggcggccccgctcccggcggcacctgcaccaacgtgggctgcattccgtccaaggcgctcctgcagtcgtccgagcactacgaacaggccaaccaccacttcgccgagcacggcatcgaagtcaagggcgtcagcctcaagctggacacgctgatcggccgcaagaacacggtggtcaagcagaacaacgacggcatcctgtacctgttcaagaagaacaaggtcacgtatttccacggcaagggcgcgttcgccggccaggtcgacggtggctggtccatcaaggtcaccggcaccaccgacgccgacctggtcgccaagcacgtcatcgtggccaccggctcgtcggcgcgcgaactgcccggcctgccctttgacgaaaagaacatcctgtccaacgacggcgcgctgaacatcggcgccgtgcccaagaagctgggcgtgatcggcgcgggcgtgatcggcctcgaaatgggcagcgtgtggcgccgcctgggcgccgaagtcaccatcctggaagcgatgcccgagttcctcgccgctgccgaccagcaggtggccaaggaagccctcaagtccttcgccaagcagggcctggacatccagaccggcgtgaagatcggcgagatcaaggccgcggccaagtcgatcaccgtgccgtacgtcgacgccaagggcgccgagcagaagctggtggtggacaagctgatcgtctccatcggccgcgtgccgtacaccggcggcctcaatgccgaagccgtgggcctgaagctggacgaacgcggcttcgtcgccgtcgacgaagactgcaagaccaacctgcccaacgtgtgggcggtgggcgacgtggtgcgcggcccgatgctggcgcacaaggccgaggaagagggcgtcgcggtggccgagcgcattgccggccagcacggccacgtcaacttcgccaccgtgccgtgggtgatctacacctcgccggaaatcgcctgggtgggcaagaccgagcagcagctcaaggccgaaggccgcgagtacaaggccggctcgttcccgttcatggccaacggccgcgcgcgcgcgctgggcgacaccaccggtttcgccaaggtgatcgccgatgccaagaccgacgaagtcctgggtgtgcacatcatcggcccgatggcgtcggagttgatctccgaagccgtgaccatcatggagttccgcggcgccgccgaggacatcgcccgcatctgccacgctcacccgaccctgtcggaagcggtgaaggaagccgcgctggctgtcgacaagcgtaccctgaacttctga

SEQ ID NO: 57801 - protein, 475 aa, Bordetella parapertussis 12822
MSKQFDVVIIGAGPGGYIAAIRAAQLGMSVACIDAWQNGQGGPAPGGTCTNVGCIPSKALLQSSEHYEQANHHFAEHGIEVKGVSLKLDTLIGRKNTVVKQNNDGILYLFKKNKVTYFHGKGAFAGQVDGGWSIKVTGTTDADLVAKHVIVATGSSARELPGLPFDEKNILSNDGALNIGAVPKKLGVIGAGVIGLEMGSVWRRLGAEVTILEAMPEFLAAADQQVAKEALKSFAKQGLDIQTGVKIGEIKAAAKSITVPYVDAKGAEQKLVVDKLIVSIGRVPYTGGLNAEAVGLKLDERGFVAVDEDCKTNLPNVWAVGDVVRGPMLAHKAEEEGVAVAERIAGQHGHVNFATVPWVIYTSPEIAWVGKTEQQLKAEGREYKAGSFPFMANGRARALGDTTGFAKVIADAKTDEVLGVHIIGPMASELISEAVTIMEFRGAAEDIARICHAHPTLSEAVKEAALAVDKRTLNF

SEQ ID NO: 57802 - DNA, 1470 bp, Prochlorococcus marinus str. MIT 9313
  CDS (1)..(1470): transl_table=11
gtgagcgaagccagtttcgacttcgatgtgatcgtgatcggtgcgggttacggcggttttgatgccgccaagcatgccgctgatgatggcctcaaggtggcgattgtggaatcaggtgagatgggcggcacttgcgtgaatcgaggctgtgtgccctctaaggcattgcttgctgctagtggaagggtgcgtgagctggctgatgctgaacacctatctggtttcgggatccatgctgcaccggtgcgttttgaacgccagaagattgctgaccatgccaaccagttggtggccacgattcgtagcaacctcaccaaaacgctgcagcgggctggtgtcacgatcctgcgtggccatggacgattggagggaagccagcgaattggcttgagagagaaaagtggagtggatcggctgctcactgccagggatgtgatccttgccacaggctctgatccatttgtgccccctgggattgaaaccgatggacgcacggtttttaccagtgatgaagccgtgaatttggaatggctgccgcgttggattgcaattatcggcagtggttatatcggccttgaatttgccgatgtttatacggctctcggctgtgaagtcacgatgattgaggcgttggatcgggtcatgccaacctttgaccccgacatcaccaagatggcagctcggcatttgattgaaggacgtgacatcgatgcacgtgctggtgtgctggctagcaaggtgatccctggctgcccggtaaggatcgaactggcggagatgaaaagccgtgagctggtggatagcttggaggtggatgcggtgctcgtcgctactggtcgggtgccaagtagcaaggggctcaatcttgagtcggttggtgtggagaccaatcgtggctttgtgccgattgacgacagcatgcgggtattggtcaacggaaagccgctgcctcatctttgggccgtcggtgatgtcactggcaagctgatgttggcccatacagccgcagcacagggcacgctggctgttgacaacattcagggacactcccgcacgattgattaccgcagtattccagccgcaaccttcactcatccggagatcagttcagtggggttgagtgaagctgatgccaaagatcttgccgccaaggatgggtttgagttggggagtgtgcgcagctatttcaaggccaattccaaagcactagcagagctggagagtgatggattgatgaagttgttgttccgcaaagacaatggtgaagttcttggtgctcatatctatggattgcacgccgccgatttgatccaggaggtagccaatgcggtggcacgacgtcagagcgttgctcaattggccactgaagtgcatacccatcccaccctgagtgaagtggtggaagtggcctataaacaggcggccaaacagctggctaaggcggttgttgcatcggccagtgcttcctag

SEQ ID NO: 57803 - protein, 489 aa, Prochlorococcus marinus str. MIT 9313
MSEASFDFDVIVIGAGYGGFDAAKHAADDGLKVAIVESGEMGGTCVNRGCVPSKALLAASGRVRELADAEHLSGFGIHAAPVRFERQKIADHANQLVATIRSNLTKTLQRAGVTILRGHGRLEGSQRIGLREKSGVDRLLTARDVILATGSDPFVPPGIETDGRTVFTSDEAVNLEWLPRWIAIIGSGYIGLEFADVYTALGCEVTMIEALDRVMPTFDPDITKMAARHLIEGRDIDARAGVLASKVIPGCPVRIELAEMKSRELVDSLEVDAVLVATGRVPSSKGLNLESVGVETNRGFVPIDDSMRVLVNGKPLPHLWAVGDVTGKLMLAHTAAAQGTLAVDNIQGHSRTIDYRSIPAATFTHPEISSVGLSEADAKDLAAKDGFELGSVRSYFKANSKALAELESDGLMKLLFRKDNGEVLGAHIYGLHAADLIQEVANAVARRQSVAQLATEVHTHPTLSEVVEVAYKQAAKQLAKAVVASASAS

SEQ ID NO: 57804 - DNA, 1443 bp, Synechococcus sp. WH 8102
  CDS (1)..(1443): transl_table=11
gtgagcgacgccagcttcgacttcgacgtcatcgtcatcggcgccggttacggcggcttcgatgccgccaaacatgccgcagaacacggccttaaaaccgccatcattgaatcgcgggacatgggaggcacctgtgtcaatcgcggctgtgtgccgtccaaggcgctgctggcagccagtggcaaggtgcgggaactggccgatgatcagcacctggccagtttcgggatccacgcggcacctgtgcggttcgaacggcagaagatcgctgatcacgccaaccagttggtgcagactattcgcaccaacttgaccaagactctcgagagagcgggcgtcacaatcctgcgggggcatggccgtcttgagggatcccagcgggttggattgcgcgaacccagtggtgtcgaccgggtcctcagcgcaagagatgtgatcgtggcgaccggctccgatccatttgtgccgcctgggatcgaaaccgatggccgcacggtgttcaccagtgacgaagccatcaacctcgagtggctgccgcgctggatcgccattgtcggcagcggctacatcggtctcgagttcgctgacgtctacaccgcccttggttgcgaggtgacgatgatcgaggcgcttgatcgggtgatgcccacctttgaccccgacattgccaagatcgctggacgtcacctgatcgatggccgggatattgacgcccgttcaggtgttctggctagcaaggtgacccctggctgccctgtgcggatcgatctggcggacttcaacagccgtgaactggtggagacgcttgaagtggatgccgtgctggtggccaccggccgtgtgcccagcagcaaaggcttgaacctggagtcgctcaacatcgagaccaaccgcggctttgtgcccatcgacgacagcatgcgggttctggtcaacggtcagccggtgccgcatctctgggccgttggcgacgtcaccggaaagctgatgctggcccacacggctgcggctcagggcaccgttgcggtggacaacatccttggccagaaccgcaccatcgattaccgcagcatccctgctgccaccttcacccatccggagatcagttcggtgggactcacggaggcggaggccaagcagctcgctgaaaccgatggttttcagttggggtctgttcgcagctatttcaaggccaattccaaggcactggcggagcttgaaagcgacggcctgatgaagctgctgttcaacaagagcagtggtgaagtgctgggcgctcatatttatgggctgcatgccgctgatctgattcaggaggtcgccaatgccgtggcccgtcgtcagagcgtgcggcagttgtccacggaggtgcacacccatcccactctcagtgaagtggtggaagtggcctacaagcaggctgcctcccagctcaccgcctga

SEQ ID NO: 57805 - protein, 480 aa, Synechococcus sp. WH 8102
MSDASFDFDVIVIGAGYGGFDAAKHAAEHGLKTAIIESRDMGGTCVNRGCVPSKALLAASGKVRELADDQHLASFGIHAAPVRFERQKIADHANQLVQTIRTNLTKTLERAGVTILRGHGRLEGSQRVGLREPSGVDRVLSARDVIVATGSDPFVPPGIETDGRTVFTSDEAINLEWLPRWIAIVGSGYIGLEFADVYTALGCEVTMIEALDRVMPTFDPDIAKIAGRHLIDGRDIDARSGVLASKVTPGCPVRIDLADFNSRELVETLEVDAVLVATGRVPSSKGLNLESLNIETNRGFVPIDDSMRVLVNGQPVPHLWAVGDVTGKLMLAHTAAAQGTVAVDNILGQNRTIDYRSIPAATFTHPEISSVGLTEAEAKQLAETDGFQLGSVRSYFKANSKALAELESDGLMKLLFNKSSGEVLGAHIYGLHAADLIQEVANAVARRQSVRQLSTEVHTHPTLSEVVEVAYKQAASQLTA

SEQ ID NO: 57806 - DNA, 1434 bp, Chromobacterium violaceum ATCC 12472
  CDS (1)..(1434): transl_table=11
atgagccaacagtttgatgttgtagtgatcggcggtggtcccggcggctatgtggccgccatccgcgcggcccagctgggcttcagcgccgcctgcgtcgacgcgttcaaaaatccggaaggcaagccgtcgctgggcggcacctgcctgaacgtcggctgcatcccgtccaaggcgctgctgcagtcgtcggaaaacttccacgcggtgcagcacgacttcgccaagcacggcatcagcgtctccggcgccaagatggacgtcggccagatgctgtcgcgcaagaccgacatcatcaacaagaacgccgccggcatcggcttcctgttcaagaagaacaaggtcgccaacatccatggcctggccgcgttcaagggccgccagggcgagaagtgggtgatcgaagtcaccgacggcggcaaggtggtggacaccctggaagccgtgcacgtgatcgtcgccaccggctccagcccgcgcgcgctgccgggcttggccaccgacaaccagctggtgctggacaacgagggcgcgctggcgctgaccgcggtgccgaagcgcctgggcgtgatcggcgccggcgtgatcggcctggaaatgggctcggtatggaagcgcctgggcgcggaagtgaccatcctggaggccgcgccgaccttcctggccgccgccgaccagcagatcgccaaggaagcgttcaagacgctgaccaaggacaccggcctggacatcaagctgggcgtcaagatcggcgaagtgaaggccggcaagaagagcgtctccgtcagctacgagctgaatggcgaggcggtgaaggccgagttcgacaagctgatcgtctccatcggccgcgtgccgaacacccagggcctgggcgcggaaaccgtcggcctggcgctggacgagcgcggcttcgtcgccgtcgacgaccactgccacaccaatctgcccaatgtctgggcgatcggcgacgtggtgcgcggcccgatgctggcgcacaaggcgtcggaagagggcgtggccgtggccgagcgcatcgccggccagaagccgcacgtcgatttcggcgtgatcccgtgggtgatctacacttcgccggagatcgcctgggtcggcaagaccgaagagcaactgaaggccgagggcgtcgagtacaagaagggcacctccggtttcggcgccaacggccgcgcgctgggcctgggccaggcgcagggcacggtgaagattctggccgacgccaagaccgaccgcatcctgggcctgcacatgatcggcccgatggtgtccgagctggtcagcgaaggcgtggtgtcgatggagttcaaggccgccagcgaagacctggcgcgcatcgtccacgcccacccgtcgttgtcggaagtgatacacgaagccgccctcgccgccgacaagcgcgcgttgcacggttga

SEQ ID NO: 57807 - protein, 477 aa, Chromobacterium violaceum ATCC 12472
MSQQFDVVVIGGGPGGYVAAIRAAQLGFSAACVDAFKNPEGKPSLGGTCLNVGCIPSKALLQSSENFHAVQHDFAKHGISVSGAKMDVGQMLSRKTDIINKNAAGIGFLFKKNKVANIHGLAAFKGRQGEKWVIEVTDGGKVVDTLEAVHVIVATGSSPRALPGLATDNQLVLDNEGALALTAVPKRLGVIGAGVIGLEMGSVWKRLGAEVTILEAAPTFLAAADQQIAKEAFKTLTKDTGLDIKLGVKIGEVKAGKKSVSVSYELNGEAVKAEFDKLIVSIGRVPNTQGLGAETVGLALDERGFVAVDDHCHTNLPNVWAIGDVVRGPMLAHKASEEGVAVAERIAGQKPHVDFGVIPWVIYTSPEIAWVGKTEEQLKAEGVEYKKGTSGFGANGRALGLGQAQGTVKILADAKTDRILGLHMIGPMVSELVSEGVVSMEFKAASEDLARIVHAHPSLSEVIHEAALAADKRALHG

SEQ ID NO: 57808 - DNA, 1380 bp, Gloeobacter violaceus PCC 7421
  CDS (1)..(1380): transl_table=11
gtggcattcgactacgacttgctgatcatcggctgtggcgtcggcgggcacggggcggccctgcacgcggtggcccacaagctcaaagtggctgtggtcgaggcccgcgacctcgggggcacctgcatcaaccgcggctgcatcccttcaaaagcgttgctcgccgccgccggccggctccgggtgctgcgcgagagcgaacacctgggaatcagcgtcggcgaaatcagcttcgaccgtgccaagattgcccaccacgccgcgagcgtcgtcgataaaatccgcgcggatctgaccaagagccttcagaaactgggggtaaccatcctgcacggccatgcccgcctcaaaggttcccagacggtcgaaatcgacccgggcgaaggcggaggcgaagtccaggtgctcaccgcccgcgacgtactcatcgcgagcggctcacagccttttgtgccgccggggattgtcaccgacggcaagaccgtttacaccagcgacgagggcgtgcgcctcgaacacctccccgagcacatctgcatcatcggctcaggctacatcggcctcgaattttcggacgtctacacagccctggggaccaaagtgacgatgatcgaagcgctcgatcggcttatgccgggtttcgatccggatatcgcccgccttgccgcccgcctgctcgtcaaatcccgcgacatcgacaccaaagtcggcgtcttcgccaaaaaagtcacccccggccaaccggcgacggtggaactctcgaccggcgagcaactccagttcgacgcggtgctggtggcctgcggccggactcccgataccaagaacctgggtctggagtccgtgggtctcgagacggccaggggctttatcccggtggacggacgcatggccacctccgccgagcacctctgggcaatcggagacgcaaccggcaagatgatgctcgcccacgccgcctccgcccaggggatcgtcgcggtcgacaacatgctgggtcacgagcgcacgatcgactaccgctcgatcccggccgcctgcttcacccacccggaaatcggctttgtgggactcaccgaaccccaggccaaagagcagggttataaagttggggtggtacggacgtactttggcgggaattctaaggccatcgcccagggggacaccgaggggatggccaaaatcgtctacgaccagaccaccggcgaactgctcggttgccacatcatcggccccgaggcgtcgctgttggtggcggaggcggcccaggccatcgccggtcgcgaccgcatcgagcggctcgcgcacctggtgcacacccaccccaccctcagcgagattctcgacgaagggtacaaacgggcagccgccgtcctgtag

SEQ ID NO: 57809 - protein, 459 aa, Gloeobacter violaceus PCC 7421
MAFDYDLLIIGCGVGGHGAALHAVAHKLKVAVVEARDLGGTCINRGCIPSKALLAAAGRLRVLRESEHLGISVGEISFDRAKIAHHAASVVDKIRADLTKSLQKLGVTILHGHARLKGSQTVEIDPGEGGGEVQVLTARDVLIASGSQPFVPPGIVTDGKTVYTSDEGVRLEHLPEHICIIGSGYIGLEFSDVYTALGTKVTMIEALDRLMPGFDPDIARLAARLLVKSRDIDTKVGVFAKKVTPGQPATVELSTGEQLQFDAVLVACGRTPDTKNLGLESVGLETARGFIPVDGRMATSAEHLWAIGDATGKMMLAHAASAQGIVAVDNMLGHERTIDYRSIPAACFTHPEIGFVGLTEPQAKEQGYKVGVVRTYFGGNSKAIAQGDTEGMAKIVYDQTTGELLGCHIIGPEASLLVAEAAQAIAGRDRIERLAHLVHTHPTLSEILDEGYKRAAAVL

SEQ ID NO: 57810 - DNA, 1410 bp, Corynebacterium diphtheriae NCTC 13129
  CDS (1)..(1410): transl_table=11
gtgactgaacattatgacgtagtagtactcggtgcaggccctggtggctatgtcgccgccatccgcgcagcccagcttggcaagaaggttgcagtcgttgaaaagcagtactggggaggtgtctgtctcaacgtcggttgtatcccttccaaggcgcttctgaaaaacgctgaggtagcgcacatctttaaccatgaggcaaagaccttcggcattagtggcgacgtgtcctttgacttcggtgctgctcataagcgctcccgccaggtatcttccggaatcgtcaagggtgtccactacttgatgaagaagaacaagatcaccgaaatcgacggcctcggctcctttaaagacgccaagaccatcgagatcaccgagggtaacgacgccggcaaggtagttactttcgatgactgcattatcgccaccggttccgtcgtgcgttccctgcctggtgtgaccatcggcggtaacatcgtttccttcgaagagcagatcctcaaggaagaagcaccaaagtccatggtgatcgtgggcgccggcgctatcggtatggagtttgcttacgttctcgttaactacggcgtagacatcaccatcgtggaattcatggaccgcgtactgcctaacgaggatgcagacgtatccaaggagatcgcaaagcagtacaagaagctcggcgtgaaactgctgaccggttacaagaccaccgccatcaccgataacggcgacaacgtcaccgtcgaggtggagtccaaggacggctccaagaaagacagcctcaccgttgagcgctgcatggtgtccatcggattcgcaccacgtgttgaaggctacggcctcgaaaacaccggtgtgaagctcaccgagcgcggcgctatcgaaatcgacgacttcatgcgcaccaacgtcgaccacatttacgcaattggcgacgtcaccgcgaaactgcagctggcacacgttgcagaagcacagggtgttgttgccgccgaggttatcgccggtgctgaaacccaagaactgggcgactacatgatgatgccacgcgctaccttctgtaacccacaggttgcctccttcggctacaccgaagagcaggcgaaggcaaagttcgaaggccgtgagatcaagaccgccaccttcccattctctgccaacggcaaggcagccggcctcgctgaaactgcaggctttgtcaagatcgttgcagacgcagaatttggcgagatcgtcggtgcacacatggttggcgcaaacgtctccgaactgctgccagaactcaccttggcacagcgtttcgacctcacctgtgaagaaatcggacgcaacgttcatacgcacccaaccctgtctgaggcaatgaaggaagccgcagaaggaatcatgggtcacatgatcaacctctaa

SEQ ID NO: 57811 - protein, 469 aa, Corynebacterium diphtheriae NCTC 13129
MTEHYDVVVLGAGPGGYVAAIRAAQLGKKVAVVEKQYWGGVCLNVGCIPSKALLKNAEVAHIFNHEAKTFGISGDVSFDFGAAHKRSRQVSSGIVKGVHYLMKKNKITEIDGLGSFKDAKTIEITEGNDAGKVVTFDDCIIATGSVVRSLPGVTIGGNIVSFEEQILKEEAPKSMVIVGAGAIGMEFAYVLVNYGVDITIVEFMDRVLPNEDADVSKEIAKQYKKLGVKLLTGYKTTAITDNGDNVTVEVESKDGSKKDSLTVERCMVSIGFAPRVEGYGLENTGVKLTERGAIEIDDFMRTNVDHIYAIGDVTAKLQLAHVAEAQGVVAAEVIAGAETQELGDYMMMPRATFCNPQVASFGYTEEQAKAKFEGREIKTATFPFSANGKAAGLAETAGFVKIVADAEFGEIVGAHMVGANVSELLPELTLAQRFDLTCEEIGRNVHTHPTLSEAMKEAAEGIMGHMINL

SEQ ID NO: 57812 - DNA, 1410 bp, Bdellovibrio bacteriovorus HD100
  CDS (1)..(1410): transl_table=11
atggcagacactcaatttgacctaattattattggttccggtcccggcggttacgtaggggccattcgtgcagctcaactgggtcttaaaacggccgtgattgaaaaagataaaacttacggaggcacgtgcctgaatgtgggttgcatcccttccaaggccctgcttgaaagttctgagcactatcaagcggctcagcacgacttggctgctcacggtgtgaaggtttccaaagtggatttggatcttccaaccatgcaggctcgcaaggacaaggttgtaaaaacaaataccgaaggcatcgccttcttgttcaaaaagaacaagatcactccattcaacggcatgggtaaaatcgtcgccgctggcaaagtggaagtgaaaggtgctgacggcaacactcaaatcctgacggccaagaacatcgtaatcgcaaccggctctgttcctgtggaactgccgttcttgaagtacgatgaaaaacgtatcgtttccaacaccggcgcactggcattggatcaggttccaaagtccatgatcgttgtgggtggtggcgtgatcggtcttgagctgggttctgtatggcagcgtctgggtgccaaagtcactgtgatcgaatatgccaaccgtctgggcggcacgatggatcaggactgcatgaacgtgcttaaaaaatccatggaaaaagaaggcatgagcttccttctttccacgaaagtgactggttctaaagttggcaacgacggcgttgaagtgacttatgaatctttgactgacggcaaagcgtcctccatgaaagcggatgttgtgcttgtttccacgggtcgcaaagcattctctgcgggcgttggctgcgaagaaatgggcatccaaaaagaccctcaaggtcgcatcatcgtggataaacactatcaaaccaacgtgccgggcatctatgccatcggtgacgttattgccggcccgatgcttgcgcacaaagcggaagaagaaggcgtggcattggcagaaatcctggctggtggtgcgggtcacgtgaactacgacacggttccaggtgtgatctatactcacccggaaattgcttctgttggtatcacggaagaattcgccaaagaaaaaggcctggaaatcaacgtgggtaaattcccgttcatggccaacggccgtgcccgcgcgaaagggtacaccgaaggtttcgtaaagatcatcgcggacaagaaaacagacaaaatcctgggcgctcacatggtgggtccaagcgtgtctgagctgatccacgaagtgatcgtgtgcatggagttcggcggcagcagcgaagatctggcaagatccttccacgcccaccctactttgtctgaagttgtgcgtgaagccgctttggccgttgaaaaacgtcaacgccagatgtag

SEQ ID NO: 57813 - protein, 469 aa, Bdellovibrio bacteriovorus HD100
MADTQFDLIIIGSGPGGYVGAIRAAQLGLKTAVIEKDKTYGGTCLNVGCIPSKALLESSEHYQAAQHDLAAHGVKVSKVDLDLPTMQARKDKVVKTNTEGIAFLFKKNKITPFNGMGKIVAAGKVEVKGADGNTQILTAKNIVIATGSVPVELPFLKYDEKRIVSNTGALALDQVPKSMIVVGGGVIGLELGSVWQRLGAKVTVIEYANRLGGTMDQDCMNVLKKSMEKEGMSFLLSTKVTGSKVGNDGVEVTYESLTDGKASSMKADVVLVSTGRKAFSAGVGCEEMGIQKDPQGRIIVDKHYQTNVPGIYAIGDVIAGPMLAHKAEEEGVALAEILAGGAGHVNYDTVPGVIYTHPEIASVGITEEFAKEKGLEINVGKFPFMANGRARAKGYTEGFVKIIADKKTDKILGAHMVGPSVSELIHEVIVCMEFGGSSEDLARSFHAHPTLSEVVREAALAVEKRQRQM

SEQ ID NO: 57814 - DNA, 1590 bp, Anopheles gambiae str. PEST
  CDS (1)..(1590)
atggcgacggccgtgcttgcgagacccgcgcggagccttataaatgttgtacagtgcgtgcggctgatacgtacccaggccaccgtcatgtttgcaaaggaaaactatgagtacgatctggtggtgatcggtggcggttcgggcggtctcgcctgcgccaagcaggcggtccagctcggcgcgaaggtggcggtgctggactttgtgaagccgtcgccgcgcggcaccaagtggggcctgggcggtacctgcgtgaacgtgggctgcatcccgaagaagctgatgcaccaggcgtccctgctcggcgaggcgatacacgactcgcagccgtacggctggcagctgcccgacccggccgcgatccggcacgactgggcgacgctgaccgagtcggtgcagaaccacatcaagtcggtcaactgggtgacgcgggtcgacctgcgcgaccagaaggtggagtacgtgaacgggctcggctacttcaaggacgaccacacggtggtggcggtgatgaagaaccagacggagcgcgagctgcgcgccaagcacgtggtgattgcggtcggcggccggccccgctacccggacattcccggcgcggccgagtacggcatcacgagcgacgacatcttcagcctgccgcaggcgcccggccgcacgctcctggtcggcgccggctacatcgggctcgagtgtgccggcttcctcaaggggctcgggtacgacgtgagcgtgatggtgcggtcgattctgctgcgtggcttcgaccagcagatggccaccatggtgggcgattcgatggtggagaagggcatccggttccatcaccggtcgcgcccgctcgcggtcgagaagcagccggacggccggctgctggtgcggtacgagacggtggacgaggccggcaccgccaccaacggtgaggacgtgttcgacacggtgctgttcgcgatcgggcgccaggccgagacgggcacgctcaagctggcgaacgcgggcgtcgtcacggccgagggcggcaagtcggacaagctcgaggtggacgagacggaccaccggacgaacgtgccgcacatctacgcggtcggcgacgtgctgtaccggaagccggagctgacgccggtcgcgatccatgccgggcgcattatcgcccgccgcctgttcggcggctcggaggagcgcatggactacgcggacgtggcgaccaccgtcttcacgccgctcgagtacgggtgcgtcgggctgagcgaggaggcggccgaggccgcccacggcaaggacggcatcgaggtgtaccacgcctactacaagccgaccgagttcttcgtgccgcagcgctcggtgcgctactgctacctgaaggcggtggcgctgcgcgagggcaaccagcgcgtgctcgggctgcacttcctcgggccggcggccggcgaggtcatccagggctttgccgccgcgctcaagtgcggcctgaccatgcaggtgctgcgcaacacggtcggcatccatccgacggtcgcggaggagttcacccggctcgccatcaccaagaggtcggggctggacccgacgccggcgacctgctgcagctag

SEQ ID NO: 57815 - protein, 529 aa, Anopheles gambiae str. PEST
MATAVLARPARSLINVVQCVRLIRTQATVMFAKENYEYDLVVIGGGSGGLACAKQAVQLGAKVAVLDFVKPSPRGTKWGLGGTCVNVGCIPKKLMHQASLLGEAIHDSQPYGWQLPDPAAIRHDWATLTESVQNHIKSVNWVTRVDLRDQKVEYVNGLGYFKDDHTVVAVMKNQTERELRAKHVVIAVGGRPRYPDIPGAAEYGITSDDIFSLPQAPGRTLLVGAGYIGLECAGFLKGLGYDVSVMVRSILLRGFDQQMATMVGDSMVEKGIRFHHRSRPLAVEKQPDGRLLVRYETVDEAGTATNGEDVFDTVLFAIGRQAETGTLKLANAGVVTAEGGKSDKLEVDETDHRTNVPHIYAVGDVLYRKPELTPVAIHAGRIIARRLFGGSEERMDYADVATTVFTPLEYGCVGLSEEAAEAAHGKDGIEVYHAYYKPTEFFVPQRSVRYCYLKAVALREGNQRVLGLHFLGPAAGEVIQGFAAALKCGLTMQVLRNTVGIHPTVAEEFTRLAITKRSGLDPTPATCCS

SEQ ID NO: 57816 - DNA, 1581 bp, Nasonia vitripennis
  CDS (1)..(1581)
atgagatattccaaaacacaaacagagaagcctgaagatattaagatcatcgtgaggaaacagatcctctcagttgctttagtggggatggttgtcaagagtagtccgctaccgttttcacgaaggcagtttacagagctgatgcagagacggtatgccagttctttggatgccgacattgttgttatcggctctggccctggtggctatgtagctgcaatcaaggctgcgcaactgggaatgaagacagtttgtatagagaaggacccaacgcttggaggaacttgcttgaacgtaggatgcatcccatcaaagtcactgctcaacaactctcactattatcacatggctcacagtggagatttggataacagaggagtcaaggtctctggcgtgtcacttgatttacccaaattgatggaacaaaagtcatctgtagtcaaggccttgactggaggaatagcaggactattcaagaagaacaaaatagaactggtcaaaggacatggaaaaataactggcaaaaaccaagtaactgctcttggatcagatggttctactgtagccactgtcaacgcaaagaacattcttattgctacaggcagtgaagtcgcacctttcgcaggagttgaagttgacgagaaaaaaattgtttcgtctactggtgcactctctttggattctgttcctaaacgattgatcgttattggtgctggtgttattggattagaattgggatcagtgtggcaaaggttgggatctgatgtaacagctgttgagttcatgacgtccattggtggtgtaggcattgatggagaagtcagtaaaactatgcagaaaataatgagcaaacagggactcaaatttaaactaggaacgaaagttactgcagctgctaaatccaacggagagatccaagttgttcttgaagacgcgaaagacccgagcaagaaagagaccgtggcgtgtgatgttctcttggtgtgcattggaaggaggccatacacatcaaatcttggtcttgaagagattggaatcgaacgggatgagaagggaaggatacccgttaacagcaggttccaaactgtaattcctaacatttatgctattggtgactgtatccatggacctatgctggcacacaaagctgaagacgaaggcatcatcactgttgaaggcattgctggaggtgccgtacacatcgattacaactgtgtgccaagcgtcatctacacgcatcctgaagtagcctgggtcggtaaatcggaggaagatcttaagaaggaaggtatcgactacaaggtcggcaaattcccgttcatggctaactcgagagcgaaaacaaacctcgagattgatggattcgccaaagttctggccgacaaggccaccgataaaatcctgggtgtccacatgattgggccagctgccggtgaacttatcaacgaagctgttctcgctatggagtatggagcgagtgctgaggatgtcgctagggtctgccatgctcacccgacctgtgcggaagctctcagagaagcgcacttggcagcgtactgtggcaaaccaatcaacttctag

SEQ ID NO: 57817 - protein, 526 aa, Nasonia vitripennis
MRYSKTQTEKPEDIKIIVRKQILSVALVGMVVKSSPLPFSRRQFTELMQRRYASSLDADIVVIGSGPGGYVAAIKAAQLGMKTVCIEKDPTLGGTCLNVGCIPSKSLLNNSHYYHMAHSGDLDNRGVKVSGVSLDLPKLMEQKSSVVKALTGGIAGLFKKNKIELVKGHGKITGKNQVTALGSDGSTVATVNAKNILIATGSEVAPFAGVEVDEKKIVSSTGALSLDSVPKRLIVIGAGVIGLELGSVWQRLGSDVTAVEFMTSIGGVGIDGEVSKTMQKIMSKQGLKFKLGTKVTAAAKSNGEIQVVLEDAKDPSKKETVACDVLLVCIGRRPYTSNLGLEEIGIERDEKGRIPVNSRFQTVIPNIYAIGDCIHGPMLAHKAEDEGIITVEGIAGGAVHIDYNCVPSVIYTHPEVAWVGKSEEDLKKEGIDYKVGKFPFMANSRAKTNLEIDGFAKVLADKATDKILGVHMIGPAAGELINEAVLAMEYGASAEDVARVCHAHPTCAEALREAHLAAYCGKPINF

SEQ ID NO: 57818 - DNA, 1518 bp, Anopheles gambiae str. PEST
  CDS (1)..(1518)
atggcggcggcaacggcagcggagcaggaaaactatgagtacgatctggtggtgatcggtggcggttcgggcggtctcgcctgcgccaagcaggcggtccagctcggcgcgaaggtggcggtgctggactttgtgaagccgtcgccgcgcggcaccaagtggggcctgggcggtacctgcgtgaacgtgggctgcatcccgaagaagctgatgcaccaggcgtccctgctcggcgaggcgatacacgactcgcagccgtacggctggcagctgcccgacccggccgcgatccggcacgactgggcgacgctgaccgagtcggtgcagaaccacatcaagtcggtcaactgggtgacgcgggtcgacctgcgcgaccagaaggtggagtacgtgaacgggctcggctacttcaaggacgaccacacggtggtggcggtgatgaagaaccagacggagcgcgagctgcgcgccaagcacgtggtgattgcggtcggcggccggccccgctacccggacattcccggcgcggccgagtacggcatcacgagcgacgacatcttcagcctgccgcaggcgcccggccgcacgctcctggtcggcgccggctacatcgggctcgagtgtgccggcttcctcaaggggctcgggtacgacgtgagcgtgatggtgcggtcgattctgctgcgtggcttcgaccagcagatggccaccatggtgggcgattcgatggtggagaagggcatccggttccatcaccggtcgcgcccgctcgcggtcgagaagcagccggacggccggctgctggtgcggtacgagacggtggacgaggccggcaccgccaccaacggtgaggacgtgttcgacacggtgctgttcgcgatcgggcgccaggccgagacgggcacgctcaagctggcgaacgcgggcgtcgtcacggccgagggcggcaagtcggacaagctcgaggtggacgagacggaccaccggacgaacgtgccgcacatctacgcggtcggcgacgtgctgtaccggaagccggagctgacgccggtcgcgatccatgccgggcgcattatcgcccgccgcctgttcggcggctcggaggagcgcatggactacgcggacgtggcgaccaccgtcttcacgccgctcgagtacgggtgcgtcgggctgagcgaggaggcggccgaggccgcccacggcaaggacggcatcgaggtgtaccacgcctactacaagccgaccgagttcttcgtgccgcagcgctcggtgcgctactgctacctgaaggcggtggcgctgcgcgagggcaaccagcgcgtgctcgggctgcacttcctcgggccggcggccggcgaggtcatccagggctttgccgccgcgctcaagtgcggcctgaccatgcaggtgctgcgcaacacggtcggcatccatccgacggtcgcggaggagttcacccggctcgccatcaccaagaggtcggggctggacccgacgccggcgacctgctgcagctag

SEQ ID NO: 57819 - protein, 505 aa, Anopheles gambiae str. PEST
MAAATAAEQENYEYDLVVIGGGSGGLACAKQAVQLGAKVAVLDFVKPSPRGTKWGLGGTCVNVGCIPKKLMHQASLLGEAIHDSQPYGWQLPDPAAIRHDWATLTESVQNHIKSVNWVTRVDLRDQKVEYVNGLGYFKDDHTVVAVMKNQTERELRAKHVVIAVGGRPRYPDIPGAAEYGITSDDIFSLPQAPGRTLLVGAGYIGLECAGFLKGLGYDVSVMVRSILLRGFDQQMATMVGDSMVEKGIRFHHRSRPLAVEKQPDGRLLVRYETVDEAGTATNGEDVFDTVLFAIGRQAETGTLKLANAGVVTAEGGKSDKLEVDETDHRTNVPHIYAVGDVLYRKPELTPVAIHAGRIIARRLFGGSEERMDYADVATTVFTPLEYGCVGLSEEAAEAAHGKDGIEVYHAYYKPTEFFVPQRSVRYCYLKAVALREGNQRVLGLHFLGPAAGEVIQGFAAALKCGLTMQVLRNTVGIHPTVAEEFTRLAITKRSGLDPTPATCCS

SEQ ID NO: 57820 - DNA, 1521 bp, Anopheles gambiae str. PEST
  CDS (1)..(1521)
atgcagtgcaacattcgatatttggttaatgttgccgtcaagggcaacgcaagccttcgaaaccatggcgcggtgctcggtgccctgtacggccggtactactcgacgacacacgatgccgacctggtggtcatcggttccggacccggtggatacgtcgcctccatcaaagctgcccagctcggcatgaagaccgtgtgcattgaaaagaacgacacgctcggcggcacctgcctgaacgtgggctgcatcccgtcgaaagcgctgctgaacaactcgcactactaccatatggcccactcgggcgacctggcggcccgcggcatccacgtggagaacgtgcggctcgacctggacgtgctgatgggccagaagacgaaggcggtcaaatcgctgaccggcggcatcgcgcagctgttcaaaaagaacaagatcacgcacatcaacggcttcggcacgatcaccggcccgaacacggtcgtcgccaagaaggcggacggtagcgaggagacggtcaacacgaagaacatcctgatcgcgaccggctcggaggtgacgcccttcccgggcatcgaggtggacgaggagacgatcgtttcgtcgaccggcgccctgaagctgaaggcagtgccgcgccggctcggtctgatcggtgccggcgtgatcgggctggagctcggctcggtgtggggccgtctcggtgcggatgttaccgcgatcgagttcctcagcacgatcggtggcgtcggcatcgatcaggaggtgtcgaagaacttccagaagattctcaccaagcagggcatgaagtttatgctcggcacgaaggtgatgagcgcggccaagaccggcagcggcgtgtcggtgacggtcgagagcgtgaaggacggctcgcagcagaacctggagtttgacgtgctgctggtttgcgttggccgccggccgtacaccgagggtctcgggctggagaacgttggcatcgtgaaggacgaccggggccgtgtgccggtgaacagccagttccagacgatcgtaccgagcgtgtacgcgatcggcgactgcatccacggcccgatgctggcgcacaaggccgaggacgagggtatcgtgtgcgtggagggcatgctcggtgggcacgtgcacatcgactacaactgcgtgccgagcgtggtgtacacccacccggaggtggcctgggtcggcaagaacgaggaggagctgaaggcggaaggtgtcgcgtacaacgtcggcaagttcccgttcgcggccaactcgcgcgccaagacgaacaacgacacggacggcttcgtgaaggtgctggccgacaagcagacggatcgcgtgcttggcgtgcatatcattggaccggccgctggtgagctgatcaacgagtctgtccttgccatggagtacggtgcgtccgccgaggacgttgcccgcgtctgccacgctcacccgacctgcgccgaagccctgcgagaggcacacacagcggccagtttcggcaagccgatcaacttctaa

SEQ ID NO: 57821 - protein, 506 aa, Anopheles gambiae str. PEST
MQCNIRYLVNVAVKGNASLRNHGAVLGALYGRYYSTTHDADLVVIGSGPGGYVASIKAAQLGMKTVCIEKNDTLGGTCLNVGCIPSKALLNNSHYYHMAHSGDLAARGIHVENVRLDLDVLMGQKTKAVKSLTGGIAQLFKKNKITHINGFGTITGPNTVVAKKADGSEETVNTKNILIATGSEVTPFPGIEVDEETIVSSTGALKLKAVPRRLGLIGAGVIGLELGSVWGRLGADVTAIEFLSTIGGVGIDQEVSKNFQKILTKQGMKFMLGTKVMSAAKTGSGVSVTVESVKDGSQQNLEFDVLLVCVGRRPYTEGLGLENVGIVKDDRGRVPVNSQFQTIVPSVYAIGDCIHGPMLAHKAEDEGIVCVEGMLGGHVHIDYNCVPSVVYTHPEVAWVGKNEEELKAEGVAYNVGKFPFAANSRAKTNNDTDGFVKVLADKQTDRVLGVHIIGPAAGELINESVLAMEYGASAEDVARVCHAHPTCAEALREAHTAASFGKPINF

SEQ ID NO: 57822 - DNA, 1476 bp, Gibberella zeae PH-1
  CDS (1)..(1476)
ttgcgacggttgatctggagaactgctttacatcaagcccgatcccgttggatccagccaaattttgttgcagaggagaaggatctcgttgttatcggtggtggcgttgctggctacgtcgccgctatcaaggctggacaagagggcatgaaggttacctgtattgagaagcgtggctccctcggtggaacctgcttgaacgtcggttgcattccctcaaagtctcttctcaacaactcgcatctctaccaccagattctccacgacaccaaacaccgcggtatcgaggtcagcgatgtcaagctcaacctggccaacttcatgaaggccaaggaaacctccgtctctggtcttaccaagggtatcgagtacctcttcaagaagaacggagttgagtacatcaagggtgctggctctttcgtcaacgagcacgaggtcaaggttgacctcaacgagggcggtgagaccagcgttcgtggtaagaacattctgatcgctactggatccgaggctactcctttccccggccttgagatcgacgagaagcgcgtcattaccagcaccggtgctattgcccttgagaaggtccctgagaccatgaccgtcattggtggtggtattatcggtcttgagatggcttccgtctggtcgcgacttggatctaaagtcactatcgttgagttcctcggccaaattggtggtcctggcatggactctgagatcgccaagaacacccagaagatccttaagaagcagggtcttgagttcaagctcaacaccaaggtcgttagtggtgacaagtcgggcgacaaggttaagcttgaggttgactctgccaagggtggcaaggtcgagtctatcgagtccgatgttgtcctagttgccattggacgacgaccctacaccgctggcctcggccttgagaacattggccttgaggctgatgaccgtggccgtgtcgtgatcgactccgagtaccgaaccaagatcccccacatccgatgtgttggtgactgcaccttcggacctatgcttgcccacaaggctgaggaggaggccgttgctgttgttgagtacatcaagaagggatacggccacgtcaactatggcgccatcccctcagttatgtacacccaccccgaggttgcctgggttggccagagtgagcaggacctcaagagccagaacatcccttaccgagtcggaagcttcccttttgccgccaactctcgagccaagaccaacatcgacaccgagggtatggttaagatgcttgctgatcccgagaccgatcgcattcttggagtccacatcatcggccctaacgctggtgagatgattgctgagggtactctggccctcgagtacggtgcttccagcgaggacattgcccgaacctgtcacgcccaccccacactcgctgaggctttcaaggaggccgccatggccactcatgccaaggccatccactactaa

SEQ ID NO: 57823 - protein, 491 aa, Gibberella zeae PH-1
MRRLIWRTALHQARSRWIQPNFVAEEKDLVVIGGGVAGYVAAIKAGQEGMKVTCIEKRGSLGGTCLNVGCIPSKSLLNNSHLYHQILHDTKHRGIEVSDVKLNLANFMKAKETSVSGLTKGIEYLFKKNGVEYIKGAGSFVNEHEVKVDLNEGGETSVRGKNILIATGSEATPFPGLEIDEKRVITSTGAIALEKVPETMTVIGGGIIGLEMASVWSRLGSKVTIVEFLGQIGGPGMDSEIAKNTQKILKKQGLEFKLNTKVVSGDKSGDKVKLEVDSAKGGKVESIESDVVLVAIGRRPYTAGLGLENIGLEADDRGRVVIDSEYRTKIPHIRCVGDCTFGPMLAHKAEEEAVAVVEYIKKGYGHVNYGAIPSVMYTHPEVAWVGQSEQDLKSQNIPYRVGSFPFAANSRAKTNIDTEGMVKMLADPETDRILGVHIIGPNAGEMIAEGTLALEYGASSEDIARTCHAHPTLAEAFKEAAMATHAKAIHY

SEQ ID NO: 57824 - DNA, 1524 bp, Apis mellifera
  CDS (1)..(1524)
atgatgcaagcttgcttttggagtttgatgactatttctgggaaaccatcacgagacaaacgtgttgtacctggcttgatagctatacaattaaatagatataccactttagatgccgatcttgtagtaataggtggtgggcctggaggttatgtggcatcgattaaagcatcacaattgggaatgaaaacaatttgcatagaaaaagaagataacttaggtggaacttgtctcaataccggatgcattccatcaaaatttttgctacacaattcaaactattataatatggcatccaataaaaattatcaaagtagtggaattacagttgaaaatgttaaagttaatgtcgataaatgcatgcagcaaaagcagaatgtaataagatctttggcaaacggtattgttcttttatacaaaaagaataaaataaattgggtgaagggtcatgggaaaattactaatccaaatcaagttactgcgcttaatccagatggttcgatacaaagcgtaattaattctaaaagaattatgattgccaccggcagcgaatatacaccgttaacgggcacaagtatcgacgaaaaagatattatttcatctaccggtgctttgtcgttaagctcgacgcctacaaaattcgtgacaggtggcgctggtttcgttggattggaaatgggttctgtctggcagagatttggctcggacgtaacgacaattgattcttcatccactattggtggaccaaatatcgataaggaagttagtcaaatattaagaaatattttaactaaacaaggcataaaatttaaaatggaaacgaaagtcacttccgcgaacaaatcaggaaacagtatcaatgtttccgttgaaaacataaacgattccagcaagaaagagaatatttcttgcaacacgtttttaatttgtgttggcagaagaccatacacgcacaatttaggattagaaagtgtaggaattaaaaaagataatttaggccgaattcctgtaaatagcaaattccaaacagaagtaccaacgatttatgctattggagattgtattcgcggacctatgttggctcataaagccgaagacgaggctgttattgcagttgaaaacattacaggaggtactaataacatggattacaatagtatacctcacataatatatacgtatccagaggttgcttgggttggtaaaacggaggaaactttgaagcaggagagaatcgattacaaagttggaaaattcccaaacacgtcaaattctagagcaagaacgaatctcgagacggatggtttcgttaaagtattggcggataaacgtacggataaaatattgggagtgcatatgattagttcgttcgctggtgaattgattaacgaggctgctcttgccgtgcaatgtaaggtaaaggcagaagatgttgcaaggacgtgtcatgcgcatccaacatattcggaagccataaaggaagcatgtttaactgcatattttggaaaacctattaacctataa

SEQ ID NO: 57825 - protein, 507 aa, Apis mellifera
MMQACFWSLMTISGKPSRDKRVVPGLIAIQLNRYTTLDADLVVIGGGPGGYVASIKASQLGMKTICIEKEDNLGGTCLNTGCIPSKFLLHNSNYYNMASNKNYQSSGITVENVKVNVDKCMQQKQNVIRSLANGIVLLYKKNKINWVKGHGKITNPNQVTALNPDGSIQSVINSKRIMIATGSEYTPLTGTSIDEKDIISSTGALSLSSTPTKFVTGGAGFVGLEMGSVWQRFGSDVTTIDSSSTIGGPNIDKEVSQILRNILTKQGIKFKMETKVTSANKSGNSINVSVENINDSSKKENISCNTFLICVGRRPYTHNLGLESVGIKKDNLGRIPVNSKFQTEVPTIYAIGDCIRGPMLAHKAEDEAVIAVENITGGTNNMDYNSIPHIIYTYPEVAWVGKTEETLKQERIDYKVGKFPNTSNSRARTNLETDGFVKVLADKRTDKILGVHMISSFAGELINEAALAVQCKVKAEDVARTCHAHPTYSEAIKEACLTAYFGKPINL

SEQ ID NO: 57826 - DNA, 1482 bp, Candida glabrata CBS 138
  CDS (1)..(1482)
atgtttagagctgtgtcgagacgtgggttttcctcctccagctatttagctgctatcaagaagcagcacgatctggtaatcatcggtggtggtccaggtggttatgtggccgctatcaaggctgcgcagctagggttggacactgcgtgtatcgagaagagaggcagtctgggtggtacctgtttgaatgttggttgtatcccatccaaggctctgttgaacaactcccatttgtaccaccagatcaagtctgacacaaagaaccgtggtattgatgttaagggtgacgttgagatcaatgttgagcaattccaaaaggcaaaggacactgtggttaagcaattgactggcggtgttgagatgctgttcaagaagtataaggtcaactactacaagggtgtgggtagctttgagagtgaaaatagcgtgaaagttactccagtcgaaggcataaagggcactgtcgaggacgaaaccattatcgaggcaaagaatattattatcgccactggttctgaggtgactccattcccaggtatcaagattgatgaagagagaattgtttcttcgactggtgcattgtctctaaaggaagttccaaagagattggccgttatcggtggtggtatcatcgggttggaaatgggttctgtctacagccgtttaggttctaaagtcactgttttagaattccaaccaaagatcggtgcctcaatggacggtgaagttgccgctacttctcaaaaattcttgaagaagcaaggctttaactttaaactatccactaaggtcgtctctgccgaaagaaacggtgatgttgtcgacattgtagtggaggacactaagtctggtaagactgaaaatatccaggccgatgtactactagtggctgtcggtagaagaccatacattgaaggtttgggcgccgagaagcttggtctagaagtcgacaagagaggacgtctagtcattgatgaacaattcagcacaaagcacccacacatcaaggttattggtgatgttacattcggtcctatgcttgcacacaaggctgaagaagaaggtattgctgcagtagaatatatcaagaaaggccacggccatgtcaactatggtaacatcccatctgtcatgtacacacacccagaagttgcctgggtaggtaagactgaggaacaattgaccgaagagggtatcaagtacaaggttggtaagttcccattcattgccaactctagagctaagaccaacatggaaactgaaggtttcgttaagatcttgatcgatgctgaaactgaacgtatgcttggtgctcacattattggtccaaatgctggtgaaatgattgctgaagctggtttagctctagaatacggtgcctcagctgaagatgtcgcaagagtatgccatgctcacccaactttatctgaagcattcaaggaagctaacttggccgctttcgacaagccaatcaacttctga

SEQ ID NO: 57827 - protein, 493 aa, Candida glabrata CBS 138
MFRAVSRRGFSSSSYLAAIKKQHDLVIIGGGPGGYVAAIKAAQLGLDTACIEKRGSLGGTCLNVGCIPSKALLNNSHLYHQIKSDTKNRGIDVKGDVEINVEQFQKAKDTVVKQLTGGVEMLFKKYKVNYYKGVGSFESENSVKVTPVEGIKGTVEDETIIEAKNIIIATGSEVTPFPGIKIDEERIVSSTGALSLKEVPKRLAVIGGGIIGLEMGSVYSRLGSKVTVLEFQPKIGASMDGEVAATSQKFLKKQGFNFKLSTKVVSAERNGDVVDIVVEDTKSGKTENIQADVLLVAVGRRPYIEGLGAEKLGLEVDKRGRLVIDEQFSTKHPHIKVIGDVTFGPMLAHKAEEEGIAAVEYIKKGHGHVNYGNIPSVMYTHPEVAWVGKTEEQLTEEGIKYKVGKFPFIANSRAKTNMETEGFVKILIDAETERMLGAHIIGPNAGEMIAEAGLALEYGASAEDVARVCHAHPTLSEAFKEANLAAFDKPINF

SEQ ID NO: 57828 - DNA, 1482 bp, Kluyveromyces lactis NRRL Y-1140
  CDS (1)..(1482)
atgttgagattcaattctacccgttcctttagctcttctgctcttttgaaaaccgttactaagaagcacgacttggtcgttattggtggtggtccaggtggttacgttgctgctatcaaggctgctcaactcggttacgatgttgcttgtgttgagaaaagaggtagactaggtggtacttgtttaaacgttggttgtatcccatccaaggctttgttgaacaattctcacctataccatcaaatgaagacggatgctaagcaaagaggtattgatatcaacggtgaaatcaacattaacgttgctcaatttcaaaaggctaaggacactgtcgtcaagcaattgactggtggtattgaaatgttgttcaagaagaatggtgtcacttactacaaaggtttaggtgcctttgaaactgacaaatccgttaaggttcttcctgtggaaggtctggaaggttccgttactgaagatcacctcttggaaagtgacaggattattgttgccactggttctgaagtgactccattcccaggtatcaccattgatgaggaaagaatcgtttcttctactggtgctctttccttgaaagaaatcccaaagaaattggctatcatcggtggtggtatcatcggtttagaaatgggttcagtttactccagattgggttctaaggtcactgtgatcgaattccaacctcaaattggtgctaccatggatggtgaagtcgctcaaactactcaaaagattttgaagaaacaaggtctcgactttaagttgagcaccaaggtcttgtctgcctccagaaacggtgacgtcgttgacatcgaagtcgaaggtgccaagaatggtaagaaggaatctctccaagctgatgtcttgttggtcgctgtcggcagaagaccatacgtcgctggtttgaacgctgaaaagatcggtttggaagtcgacaagcgtggtagattggtcattgatgaacaattatccaccaaattcccacacgtcaaggttatcggtgatgttaccttcggtccaatgttggctcacaaggctgaagaagaaggtatcgctgctgccgaatacttcaaggtcggccacggtcatgtcaactacggtaacatcccggctgtcatgtactcccacccagaagtcgcttgggtcggtaagaccgaagaacaattaaaggaagctggtattcaatacaagattggaaagttcccattcatcgctaactctagagctaaaaccaacatggacaccgaaggtttcgttaagattttgatcgacgcagaatctgaacgtttactaggtgctcacatcattggtcctaacgctggtgaaatgatcgctgaagccggtttagcattggaatacggtgcttctgctgaagacatcgctagagtttgtcacgctcatccaactctatccgaagctttcaaggaagctaacttagctgcttacgccaagccaatcaacttctaa

SEQ ID NO: 57829 - protein, 493 aa, Kluyveromyces lactis NRRL Y-1140
MLRFNSTRSFSSSALLKTVTKKHDLVVIGGGPGGYVAAIKAAQLGYDVACVEKRGRLGGTCLNVGCIPSKALLNNSHLYHQMKTDAKQRGIDINGEININVAQFQKAKDTVVKQLTGGIEMLFKKNGVTYYKGLGAFETDKSVKVLPVEGLEGSVTEDHLLESDRIIVATGSEVTPFPGITIDEERIVSSTGALSLKEIPKKLAIIGGGIIGLEMGSVYSRLGSKVTVIEFQPQIGATMDGEVAQTTQKILKKQGLDFKLSTKVLSASRNGDVVDIEVEGAKNGKKESLQADVLLVAVGRRPYVAGLNAEKIGLEVDKRGRLVIDEQLSTKFPHVKVIGDVTFGPMLAHKAEEEGIAAAEYFKVGHGHVNYGNIPAVMYSHPEVAWVGKTEEQLKEAGIQYKIGKFPFIANSRAKTNMDTEGFVKILIDAESERLLGAHIIGPNAGEMIAEAGLALEYGASAEDIARVCHAHPTLSEAFKEANLAAYAKPINF

SEQ ID NO: 57830 - DNA, 1488 bp, Debaryomyces hansenii CBS767
  CDS (1)..(1488)
atgttaagaagttccagtagtttcagaggtctcaacaacaaggcgattaaaattgcccaatttgttagacatgcttccacgcaagaattcgatgtcgtcgtaattggtggtggtccaggtggttacgtttcggctatcaagagtgcccaattaaacttgaagaccgcatgtatagaaaaaagaggttctttaggtggtacttgtttgaatgttggttgtattccatccaagtctttattgaacaactcccaattattccatcaaattcaacatgactctaagcacagaggtattgaaatttcaggggatgtttccatcaacatcgacaccttgcaagctgctaaggacaaggctgtcaagggtttaaccggtggtgttgaaatgttacttaagaagaacggtgttacttacttcaagggtgagggttcatttattgatgaaaacaatgtcaacgtgaagccaatcgacggttctgaagacattcaaatcagtgctaagaacattgttgtagccactggttctgagccaactccattcccaggtatcgaaattgacgaagaaagaattgtttcttccactggtgccttggccttgaaggaagtcccaaagaagatgtctatcatcggtggtggtatcattggtttagaaatggcttctgtgtggtccagattaggttctgaagtcaccgtcatcgaattccaaaacgccattggtgctggtatggatggtgaagtcgccaaacaaattcaaaagttattgggcaagcaaggattgaaattcaagttaggcacaaaggtcactaagggtgttagagatggtgaaaccgtcaagatcgaagttgaagatgtcaagtccggaaagaaggaagacttagatgctgatgtcttattagtcgctattggtagaagaccatttaccaacggattaaacttcgacaagattggcttagaagctgatgacaagggaagattggtcattgacaaccaattcagaaccaagcatgaacatatcagagttattggtgatgttacctacggtcctatgttagcccacaaggctgaagaagaaggtatcgctgctgccgaatacatcaagaacggccacggtcacgtcaactacgccaacattccttctgttatgtattctcacccagaagttgcttgggttggtgccaacgaagaacaattgaaggaacaaggaatcaaatacaagatcggtaagttcccattcattgccaactctagagctaagaccaacttggacaccgatggtttcgtcaagttcattgctgatgccgaaacccaacgtgtcttgggtgtccacatcatcggtagtaacgccggtgaaatgatcgctgaagccggtttagccttagaatacggtgcttctaccgaagacatcgccagaacctgtcatgctcacccaaccttatccgaagcattcaaggaagctgctttagctacttttgacaagccaattaacttctaa

SEQ ID NO: 57831 - protein, 495 aa, Debaryomyces hansenii CBS767
MLRSSSSFRGLNNKAIKIAQFVRHASTQEFDVVVIGGGPGGYVSAIKSAQLNLKTACIEKRGSLGGTCLNVGCIPSKSLLNNSQLFHQIQHDSKHRGIEISGDVSINIDTLQAAKDKAVKGLTGGVEMLLKKNGVTYFKGEGSFIDENNVNVKPIDGSEDIQISAKNIVVATGSEPTPFPGIEIDEERIVSSTGALALKEVPKKMSIIGGGIIGLEMASVWSRLGSEVTVIEFQNAIGAGMDGEVAKQIQKLLGKQGLKFKLGTKVTKGVRDGETVKIEVEDVKSGKKEDLDADVLLVAIGRRPFTNGLNFDKIGLEADDKGRLVIDNQFRTKHEHIRVIGDVTYGPMLAHKAEEEGIAAAEYIKNGHGHVNYANIPSVMYSHPEVAWVGANEEQLKEQGIKYKIGKFPFIANSRAKTNLDTDGFVKFIADAETQRVLGVHIIGSNAGEMIAEAGLALEYGASTEDIARTCHAHPTLSEAFKEAALATFDKPINF

SEQ ID NO: 57832 - DNA, 1500 bp, Yarrowia lipolytica CLIB122
  CDS (1)..(1500)
atgttgcgaaccactcgaattcttccctccaagttcggcgttgctgcccgaacccgagctgtgacccagttccagcgatgctacagctccgcaaacgaggagcttgatgtccttgttatcggaggtggccccggtggatacgtcgccgccatcaaggccgcccaggccggcctcaagaccggctgtatcgagaagcgaggctccctcggaggaacctgtctcaacgtcggatgtatcccctctaagtctctgctcaacaactcccagatgtaccacgccatcaaaaccgactccgccaaccgaggaatcgaggtctctgacgtcaagatgaacatcgccaagctgcaggaggccaaggagacctccgtcaagggtctcaccggcggtatcgagatgctgttcaagaagaacaaggtcaactactacaagggcgccggttcttttgtgtccgactccgaggtcaaggtcgaccccattgatggcggcgaggccgtcaccctcaaggccaagaacatcatcattgccaccggctctgagcccacccccttccccggcatcaccattgacgagaagaagattgtttcctccactggtgcccttgccctcgaggccgtccccaagaagatggtcatcatcggaggaggtatcattggtctcgagatgggctccgtctggtcccgactcggctccgaggtgactgttgtcgagttccagaacgccattggcgctggtatggacgacgagatcgccaaggccgcccagaagatgctcaccaagcagggtatcaagttcaagcttggcaccaaggtgctttccggtgccattgagggcgacggcgtcaaggtcgaggtcgagaacgtcaagaagggcgacaaggagacccttgatgccgacgttctgctcgttgccattggccgacgaccctactccgagggcttgaacctcgaggctgccggtgtcgagaaggacgacaagggccgaatcatcatcgaccaggagtaccgaaccaacaagtccaacatccgatgcattggtgacgtcactttcggccccatgctggcccacaaggccgaggaggagggagttgctaccgctgagtacattgccaccggtcacggccacgttaactacgccgccatcccctctgtcatgtacacccaccctgaggttgcttgggttggacagactgagcagcaggtcaaggaggccggcatcaagtacaacgtcggcaagttcccctttgccgccaactctcgagccaagaccaacctcgacaccgagggtaccgtcaagttcattgctgacaaggagactgaccgaattctcggtatccacatcattggccccaacgccggtgagatgatcgccgagggtgttcttgcccttgagtacggtgcttcttgcgaggacattgctcgaacctgccacgcccaccccactctctccgaggctttcaaggaggccgccatggccacttacgacaaggccatccacttttaa

SEQ ID NO: 57833 - protein, 499 aa, Yarrowia lipolytica CLIB122
MLRTTRILPSKFGVAARTRAVTQFQRCYSSANEELDVLVIGGGPGGYVAAIKAAQAGLKTGCIEKRGSLGGTCLNVGCIPSKSLLNNSQMYHAIKTDSANRGIEVSDVKMNIAKLQEAKETSVKGLTGGIEMLFKKNKVNYYKGAGSFVSDSEVKVDPIDGGEAVTLKAKNIIIATGSEPTPFPGITIDEKKIVSSTGALALEAVPKKMVIIGGGIIGLEMGSVWSRLGSEVTVVEFQNAIGAGMDDEIAKAAQKMLTKQGIKFKLGTKVLSGAIEGDGVKVEVENVKKGDKETLDADVLLVAIGRRPYSEGLNLEAAGVEKDDKGRIIIDQEYRTNKSNIRCIGDVTFGPMLAHKAEEEGVATAEYIATGHGHVNYAAIPSVMYTHPEVAWVGQTEQQVKEAGIKYNVGKFPFAANSRAKTNLDTEGTVKFIADKETDRILGIHIIGPNAGEMIAEGVLALEYGASCEDIARTCHAHPTLSEAFKEAAMATYDKAIHF

SEQ ID NO: 57834 - DNA, 1524 bp, Apis mellifera
  CDS (1)..(1524)
atgatgcaagctactttttggagtttagtgactacttctgggaaaccatcatgtgtcaaacgtattgtacctgggttgatagctgcacaacaacgtagatatactagtactttagaagctgatcttgtagtaataggtggtgggcctggtggatatgttgcatcaattaaagcagcacaattgggaatgaaaacagtttgtatagaaaaagatgaaactttaggtggaacttgtcttaatgttggatgcattccatcaaaatctttattaaataattcacattattatcatatgacacatggagatttacaaaatcgtggcattatagttgaaaatgttaaacttaatcttgataaagtgatggaacaaaaacggaatgtaataaaagctttaacaggtggtattgctggattatttaaaaagaataaaatagagtgggtaaaaggtcatggaaaaattactggtccaaatcaagtggttgcacttagtccagatggttcagtagtaagcacaattaatactaaaaatattataattgccactggcagtgaagttacaccatttccgggtatagaattcgatgaaaaacaaattctttcatctaccggagctttatcattagatacaatacctaaaaaatttatagtaattggtgctggtgtcattggattggaattaggctcagtttggcagaggtttggttcacaagtaacagcaattgaatattcaccatttattggtggggtagctatcgatagtgaagttagtcaaacattacaaaaaattttaagtaaacaaggcttaaactttaaattgggaacaaaagtcactggtgcaaaaaaaacaggcaatgaaattattgtttctgttgaagatgcaaaagatcctagcaagaaagaggatatttcttgcaatgtacttttaatttgtattggcagaaggccatatacatggaatttaggattagaagatataggaattgaaagagacaaattaggtcgagttcctgtaaataacagattccaaacagtaataccttcgatttatgctattggagattgtatccatggaccgatgttggctcataaagcagaagaagaaggtattattacagttgaaggcattgttggaggtgccgttcatatcgattacaattgtgtacctaatgtaatatatacacatccagaagttggttgggttggcaaaacagaggaagatttaaaaaaagaaggtgtcgagtacaaagttgggaaattcccacacttagcaaattccagagcaaaaacgaatctcgaaacggatggttttgttaaagtattagcagataaaaatacagatagattattgggggtacatatgattggttcagttgctggtgaattgattaatgaagcagttcttgcaatagaatatggagcaagtgcagaagatgttgcaaggacatgtcatgcacatccaacatgttcggaagcctttaaagaagcctgtttagctgcatattttggaaaacctatcaatttttaa

SEQ ID NO: 57835 - protein, 507 aa, Apis mellifera
MMQATFWSLVTTSGKPSCVKRIVPGLIAAQQRRYTSTLEADLVVIGGGPGGYVASIKAAQLGMKTVCIEKDETLGGTCLNVGCIPSKSLLNNSHYYHMTHGDLQNRGIIVENVKLNLDKVMEQKRNVIKALTGGIAGLFKKNKIEWVKGHGKITGPNQVVALSPDGSVVSTINTKNIIIATGSEVTPFPGIEFDEKQILSSTGALSLDTIPKKFIVIGAGVIGLELGSVWQRFGSQVTAIEYSPFIGGVAIDSEVSQTLQKILSKQGLNFKLGTKVTGAKKTGNEIIVSVEDAKDPSKKEDISCNVLLICIGRRPYTWNLGLEDIGIERDKLGRVPVNNRFQTVIPSIYAIGDCIHGPMLAHKAEEEGIITVEGIVGGAVHIDYNCVPNVIYTHPEVGWVGKTEEDLKKEGVEYKVGKFPHLANSRAKTNLETDGFVKVLADKNTDRLLGVHMIGSVAGELINEAVLAIEYGASAEDVARTCHAHPTCSEAFKEACLAAYFGKPINF

SEQ ID NO: 57836 - DNA, 1476 bp, Candida albicans SC5314
  CDS (1)..(1476): transl_table=12
atgttaagatcattcaaatctattccagccaatggaaaattggcccagtttgttagatatgcatcaaccaagaaatacgacgttgttgtcattggtggtggaccaggtgggtacgttgctgccatcaaggccgctcaattaggattaaacactgcctgtattgaaaaaagaggtgcattaggtggtacttgtttgaatgttggttgtatcccatccaaatctttattgaacaactcccatttattacaccaaatccaacacgaagccaaagaaagaggtatttctatccaaggtgaagttggcgttgattttccaaaattgatggctgccaaggaaaaagccgtcaaacaattgaccggtggtattgaaatgttgttcaaaaagaacaaggttgactacttgaaaggagccggttcttttgttaacgaaaaaaccgtcaaagtcactccaattgacggcagcgaagcacaagaagttgaagccgaccacatcatcgttgctactgggtctgaaccaactccatttccaggtattgaaatagatgaagaaagaattgtcacttctactggtattttatcattgaaagaagtaccagaaagattagccatcattggtggaggtatcattggtttggaaatggcttccgtttacgcaagattgggctctaaagtcactgttatcgaattccagaacgctattggtgccggtatggatgctgaagttgctaaacaatctcaaaaattattggccaaacaaggtttggacttcaaattaggtacaaaggttgttaaaggtgaaagagatggtgaagtggtcaagatcgaagttgaagatgtcaaatccggtaaaaaatctgaccttgaagccgatgtcttgttggttgccattggtagaagaccatttactgaaggtttgaactttgaagccattggtttagagaaagataacaagggaagattgattattgacgaccaattcaagactaaacatgaccacatcagagttattggggatgtcacattcggtcctatgttggcccacaaagctgaagaagaaggtatcgctgctgctgaatacatcaagaaaggtcacggtcatgtaaactatgctaacatcccttctgttatgtatactcacccagaagttgcctgggttggtttaaacgaagaacaattgaaagaacaaggcatcaaatacaaagtaggtaaattcccattcattgccaactccagagctaaaaccaacatggacactgatggtttcgtgaaattcattgctgatgccgaaacccaaagagtgttgggtgtccacattattggtccaaatgcaggtgaaatgattgctgaagctggtttggccttagaatatggtgcttccaccgaagacatttcaagaacatgtcatgctcatccaactttatctgaagctttcaaggaagctgctttggccacctttgataagccaatcaacttttaa

SEQ ID NO: 57837 - protein, 491 aa, Candida albicans SC5314
MLRSFKSIPANGKLAQFVRYASTKKYDVVVIGGGPGGYVAAIKAAQLGLNTACIEKRGALGGTCLNVGCIPSKSLLNNSHLLHQIQHEAKERGISIQGEVGVDFPKLMAAKEKAVKQLTGGIEMLFKKNKVDYLKGAGSFVNEKTVKVTPIDGSEAQEVEADHIIVATGSEPTPFPGIEIDEERIVTSTGILSLKEVPERLAIIGGGIIGLEMASVYARLGSKVTVIEFQNAIGAGMDAEVAKQSQKLLAKQGLDFKLGTKVVKGERDGEVVKIEVEDVKSGKKSDLEADVLLVAIGRRPFTEGLNFEAIGLEKDNKGRLIIDDQFKTKHDHIRVIGDVTFGPMLAHKAEEEGIAAAEYIKKGHGHVNYANIPSVMYTHPEVAWVGLNEEQLKEQGIKYKVGKFPFIANSRAKTNMDTDGFVKFIADAETQRVLGVHIIGPNAGEMIAEAGLALEYGASTEDISRTCHAHPTLSEAFKEAALATFDKPINF

SEQ ID NO: 57838 - DNA, 1527 bp, Ustilago maydis 521
  CDS (1)..(1527)
atgatctctggtcttttgtcacgatcatcggtcggcccggctagggctttccaggcctcgacgcttcctcgcgttgtttcgacgctcccgcgtgttcacagccgcggtctcgccaccggcgccgacccatacgatgttgtcgttatcggaggtggccccggtggctacgtagccgccatcaaggcggctcagctcggtctcaagaccgcctgtgttgagaagcgtggcgctctcggaggcacctgtctcaacgttggctgcattccttccaaggctatgctcaacaactcacacctctaccaccaggctcagcacgacttcaagagccgcggcattgatgtcggcagtatctcgctcaacctcgagaccatgctcaaggccaagtcgagcgccgtcactggcctcaccaagggtattgagggtctgttcaagaagaacaaggtcgactacctcaaaggtgccggtagcttcagcagccccaccaccatcaaggtcgctctcaacgatggcggtgagaccgagattgaggccaagaacatcatcatcgctaccggttccgaggtcacccccttccccggtatcgagatcgacgagaagcagatcgtctcgtccaccggcgcgctcgagctgcaaaaggtgcccgagaagatgattgtcatcggtgccggtgtcatcggtctcgaaatgggcagtgtatggagccgactcggtgccaaggttgaggtagtcgagttcctctcgaccgtcggcggtgccggtatcgacggcgagattgccaagaacttcaagaagacgcttgagaagcagggtctcaagttccgattgggcaccaaagtcattgacgctgagaagaaggacggcaaggtctacctcaacgtcgaggatgccaagagtggtgacaagacgcagctcgacgccgatgtggttctggttgccattggccgacgccccgtgaccagcggcctcaatctggaagctgttggaatcgagaaggacgagcgtggacgcattattgtcgacgaccagtacaacaccacctgcaagggggtcaaatgtatcggcgacgccaccttcggacccatgcttgcgcacaaggccgaggaggagggtatcgcggccgtcgagataatcaagtcgggccacggccatgtcaactacgccgccattcctgcggtcgtctacacgcaccccgaggtagcttgggttggtaagaacgaggaggagcttaaaaaggagggcgtcgagtacaaggtgggcaaattccccttccttgccaactcgcgtgccaaaaccaacgccgactcggacggaacggtcaagttcctcgtcgagaaggagactgacaaagtgctaggtgtgcacatcattggccccaatgccggtgagatgatcgcctcggcggtacttgccatcgagtaccaggcatcggcagaggacattgctcgaacttgccacgctcaccctacgctttcggaagccttcaaggaggctgccatggcctcatactccaaggccatccacttctga

SEQ ID NO: 57839 - protein, 508 aa, Ustilago maydis 521
MISGLLSRSSVGPARAFQASTLPRVVSTLPRVHSRGLATGADPYDVVVIGGGPGGYVAAIKAAQLGLKTACVEKRGALGGTCLNVGCIPSKAMLNNSHLYHQAQHDFKSRGIDVGSISLNLETMLKAKSSAVTGLTKGIEGLFKKNKVDYLKGAGSFSSPTTIKVALNDGGETEIEAKNIIIATGSEVTPFPGIEIDEKQIVSSTGALELQKVPEKMIVIGAGVIGLEMGSVWSRLGAKVEVVEFLSTVGGAGIDGEIAKNFKKTLEKQGLKFRLGTKVIDAEKKDGKVYLNVEDAKSGDKTQLDADVVLVAIGRRPVTSGLNLEAVGIEKDERGRIIVDDQYNTTCKGVKCIGDATFGPMLAHKAEEEGIAAVEIIKSGHGHVNYAAIPAVVYTHPEVAWVGKNEEELKKEGVEYKVGKFPFLANSRAKTNADSDGTVKFLVEKETDKVLGVHIIGPNAGEMIASAVLAIEYQASAEDIARTCHAHPTLSEAFKEAAMASYSKAIHF

SEQ ID NO: 57840 - DNA, 1542 bp, Strongylocentrotus purpuratus
  CDS (1)..(1542)
atgtcgctcttacctgtcgcaaaccgagctggacgctgtctttccactgtcaaccatgttcacaagctgtccagatgtagcacatcagcgctgtggaggggtcagaggcggcacatggcttccgtagaggaacaggacttggtggtcattgggtctggaccagggggctatgtagctgctatcaaagctgcacagctgggattaaagaccacatgtgtagaaaagaatgataccttaggaggtacctgcctcaacgtgggttgcatcccatccaaggctcttcttaataactcccatctctaccacatggctgcatcaaaggacttcaagagcagaggcattgatgttggtgacattaaactaaatttgccaaagatgatgggccagaaatcagatgcagtgaagggactgacaaatggcgttgcgcacctcttcaaacagaactcagtgaccaggattcaaggacatggtaaggtcatgggacctaacgaggtagctgtcctacatcctgatggtaagatcaaagaagtggtcaagactaagaacatcctcatagcaacaggttcagaggtcacgccattccctggtattgaggttgatgagaagactgtagtgtcatctacaggagccttgtctttagagagagtccctgatcacatggtgcttattggaggaggtgtcattggcttagagttgggttctgtatggcagcgtcttggagccaaggtcacagccgttgagttcctcggtcacataggtggtgtgggcatcgatatggagatggccaagaacttccagaggattctcaccaagcaaggcatcaagttcaagctgaacaccaaggtgaccggagctacgaggacaggagatgacatcagcgtgtctgtagaatcagttaaagatcccaacaagaaagaagatcttcagtgtgacacgctactggtgtgcgtcggacgcaggccatacacaaataatctaggcttagaggagcttggaatttccctggatgagagggggaggatacctgtagacaaccgctttgcaacatccgtacctagtgtgtttgccattggagattgcatccaggggcctatgcttgctcacaaggccgaggatgagggaatcatcgctgtggagggaatggccggtgggccagttcacattgactataactgcgttccctctgtgatctacacccatcctgaggtggcctgggtaggcaagactgaggaacaactgaaggaagaaggaatcaagtacaaagtgggaaagttcccctttgcagccaacagcagagctaagaccaatggcgatactgatgggttagtgaagatgctgagtgatgcagctaccgatagaattcttggagctcacatcatcgggtcaggggctggcgagatgatcaatgaagcagcattagctatggagtatggtgcttcatgtgaagatgtagctcgagtttgccatgcacatccgactgtatctgaggcattcagagaagccaacatggcagcgtacagtgggaaagccatcaacttttaa

SEQ ID NO: 57841 - protein, 513 aa, Strongylocentrotus purpuratus
MSLLPVANRAGRCLSTVNHVHKLSRCSTSALWRGQRRHMASVEEQDLVVIGSGPGGYVAAIKAAQLGLKTTCVEKNDTLGGTCLNVGCIPSKALLNNSHLYHMAASKDFKSRGIDVGDIKLNLPKMMGQKSDAVKGLTNGVAHLFKQNSVTRIQGHGKVMGPNEVAVLHPDGKIKEVVKTKNILIATGSEVTPFPGIEVDEKTVVSSTGALSLERVPDHMVLIGGGVIGLELGSVWQRLGAKVTAVEFLGHIGGVGIDMEMAKNFQRILTKQGIKFKLNTKVTGATRTGDDISVSVESVKDPNKKEDLQCDTLLVCVGRRPYTNNLGLEELGISLDERGRIPVDNRFATSVPSVFAIGDCIQGPMLAHKAEDEGIIAVEGMAGGPVHIDYNCVPSVIYTHPEVAWVGKTEEQLKEEGIKYKVGKFPFAANSRAKTNGDTDGLVKMLSDAATDRILGAHIIGSGAGEMINEAALAMEYGASCEDVARVCHAHPTVSEAFREANMAAYSGKAINF

SEQ ID NO: 57842 - DNA, 1440 bp, Prochlorococcus marinus str. AS9601
  CDS (1)..(1440): transl_table=11
gtgactgattcaagttttgattttgatttaattgtaataggagcaggatatggaggttttgatgccgctaaacatgctgctggtaaggggctgaaagtcgcaatagtagaatcttctgatatgggaggcacttgtgttaacaagggttgtgttccctctaaagctcttttggctgcaagtggaaaagttagagaaatagctgattatgaacatttagctaaatttggtatacatgcttcaccagtaaggttcgagagatcaaaaattgcagatcatgcaaataatttagttttaaatgttagagaaaatttaacaaaaactcttaaaaggagtggagttgaaattattttgggcattggaagaattgaaggaaatcaaaaagtaggtgtaagagataaaaacggaattgataaaatttttacatgtaagaatattgttatagcaacaggctcttctccttttgtgccccgtggaataactttggataataggaccgtatttactagcgatgatgcggttaaacttgagtggcttccaagatggatagcaattattggaagtggatatataggtctagaatttgctgatgtttataccgcgcttggttgtgaagttaccatgattgaggctttggagaatattatgccaacatttgatccagacatcactaaaattgccaagaagaaccttattcaagcaagagatatagacacaaaatcaaatgtctttgcgacaaaaataacacctggatgccctgtaaaaatagaactgactgatgcaaaatctaaggaagttgtagaaactttagaagttgacgctgtactagtagcaactggcagaagtcctaatagtaataacttaaatcttgagtcggttggtatcgaaacagtaaaaggttttattcctgtagatgatcaaatgagagttaagaatggtgatgaaataatacctaacatttgggctgttggagatgtaacaggcaaattaatgctagcccatacagctgcagcgcagggtactattgctgttgataatatttgcggtggtaatgtcgaaattaactataaaagtatccccgcagcaacctttactcacccagagataagttcagttggtctctctgaagttgaagctaaagagatatctacaaaagaaaattttactttgggagttgtcaaaagtttctttaaggctaattcaaaagcattggctgaattagagagtgatggattgctaaagttgattttcaacaaagataatgggaaagtattaggggctcatatttttgggttacatgcagctgatttaattcaagaaatttcgaacgctatttcaaggaaccaagatgtacttgaactatctaaagaagttcatactcatcctactcttagtgaagtagtggaggtcgcatataaacaggcggcttctcaaataaaataa

SEQ ID NO: 57843 - protein, 479 aa, Prochlorococcus marinus str. AS9601
MTDSSFDFDLIVIGAGYGGFDAAKHAAGKGLKVAIVESSDMGGTCVNKGCVPSKALLAASGKVREIADYEHLAKFGIHASPVRFERSKIADHANNLVLNVRENLTKTLKRSGVEIILGIGRIEGNQKVGVRDKNGIDKIFTCKNIVIATGSSPFVPRGITLDNRTVFTSDDAVKLEWLPRWIAIIGSGYIGLEFADVYTALGCEVTMIEALENIMPTFDPDITKIAKKNLIQARDIDTKSNVFATKITPGCPVKIELTDAKSKEVVETLEVDAVLVATGRSPNSNNLNLESVGIETVKGFIPVDDQMRVKNGDEIIPNIWAVGDVTGKLMLAHTAAAQGTIAVDNICGGNVEINYKSIPAATFTHPEISSVGLSEVEAKEISTKENFTLGVVKSFFKANSKALAELESDGLLKLIFNKDNGKVLGAHIFGLHAADLIQEISNAISRNQDVLELSKEVHTHPTLSEVVEVAYKQAASQIK

SEQ ID NO: 57844 - DNA, 1443 bp, Prochlorococcus marinus str. NATL1A
  CDS (1)..(1443): transl_table=11
gtgagtgaaatttcttttgactttgacttgattgttgtcggagctggatatggaggttttgatgcggctaaacatgcggcagaggctggcttgaaagtggcgattgtcgaatcaagagatatgggtgggacctgtgttaacagaggctgtgtcccctctaaagcattactagctgccagtggtaaagttcgtgagcttgcagatgttcctcatcttgctgaatttgggatacattcggctccggttagatttgaacgtaaaaaaatagccgaacatgcaaaaaatttagtcgagacgattcgaaaaaatctaactaaaacattggaaagatctggagttgagatacttaggggagaaggacgtttagaaggcaatcaaaaggtcggtttaagagaaactaatggagtcgatagaattttttctgctagagatattatcttagctacaggctcagacccttttgtaccgcctggaattgaaattgatggacgaactgtttttacaagtgatgaggctattaatttagaatggttgccaagatggattgcaataattggtagtggctatataggtttggaattcgcagatatttatacagctttaggttgtgaggtaaccatgattgaagctcttgataaagtaatgcctacttttgatccagatatcacgaaaattgcttcaagaaacctaattgataaaagagatattgaaactcgagctggtgtgttcgctactaaagttaagccaggttgtcctgtcgaggtcgagcttacagatgcaaagagtcgagaagtaattgaggagttgcaagttgacgctgttctcgtcgcaacaggccgagtaccgtcgactgaaaatctaaatctacaatccgttggagttgaaacaacgagaggttttattccaattgatgatcagatgagagtattggtaaatgaaaaaccagtttctaatctatgggcagtcggagatgttacgggtaagttgatgttggcccataccgctgcagcgcaagggagtattgctgtagaaaatattttaggaaaagcaatagaaattgactacagaagtattcctgcagcgacttttactcaccctgagataagttccgttggactctcggaagaagaagcaaaagatctagcgaaaaacgaaggctttgaactaggaattgttagaagttattttaaagcgaactctaaggccttggccgaattagaaagtgatggaattatgaagttgatttttaataaagagacgggagaggtccttggggctcatatttatggattacatgcggctgatctcatacaagaggtttctaatgcaatttctagaagacaacgagttattgacttagcaaaagaagttcatactcatccaacattaagcgaagttgtagaggttgcttataagcaggcatctttacaaataaagaagtag

SEQ ID NO: 57845 - protein, 480 aa, Prochlorococcus marinus str. NATL1A
MSEISFDFDLIVVGAGYGGFDAAKHAAEAGLKVAIVESRDMGGTCVNRGCVPSKALLAASGKVRELADVPHLAEFGIHSAPVRFERKKIAEHAKNLVETIRKNLTKTLERSGVEILRGEGRLEGNQKVGLRETNGVDRIFSARDIILATGSDPFVPPGIEIDGRTVFTSDEAINLEWLPRWIAIIGSGYIGLEFADIYTALGCEVTMIEALDKVMPTFDPDITKIASRNLIDKRDIETRAGVFATKVKPGCPVEVELTDAKSREVIEELQVDAVLVATGRVPSTENLNLQSVGVETTRGFIPIDDQMRVLVNEKPVSNLWAVGDVTGKLMLAHTAAAQGSIAVENILGKAIEIDYRSIPAATFTHPEISSVGLSEEEAKDLAKNEGFELGIVRSYFKANSKALAELESDGIMKLIFNKETGEVLGAHIYGLHAADLIQEVSNAISRRQRVIDLAKEVHTHPTLSEVVEVAYKQASLQIKK

SEQ ID NO: 57846 - DNA, 1470 bp, Prochlorococcus marinus str. MIT 9303
  CDS (1)..(1470): transl_table=11
gtgagcgaagccagtttcgacttcgatgtgatcgtgatcggtgcgggttacggcggttttgatgccgccaagcatgccgctgatgatggcctcaaggtggcgattgtggaatcaggtgatatgggcggcacttgcgtgaatcgaggatgtgtgccctctaaggcattgcttgctgccagtggaaaggtgcgtgagctggctgatgctgaacatctatctggtttcggcatccatgctgcaccggtgcgttttgaacgccagaagattgctgaccatgccaacaagttggtggccacgattcgtagcaacctcaccaaaacgctgcagcgggctggtgtcacgatcctgcgtggccatggacgattggagggaagccagcgaattggcgtaagagagaaaagtggagtggatcggctgctcactgcgagggatgtgatccttgccacaggctctgatccattcgtgccccctgggattgaaaccgatggacgcacggtttttaccagtgatgaagccgtgaacttggaatggctgccgcgttggattgcaattatcggcagtggttatatcggccttgaatttgccgatgtttatacggctctcggctgtgaagtcacgatgattgaggcgttggatcgggtcatgccaacctttgatcccgacatcaccaagatggcagctcggcatttgattgaaggacgtgacatcgatgcacgtgctggtgtgctggctagcaaggtgatccctggctgcccggtaaggatcgaactggcggagatgaaaagccgtgagctggtggacagcttggaggtggatgcggtgctcgtcgctactggtcgggtgccaagtagcaaggggctcaatcttgagtcggttggtgtggagaccaatcgcggctttgtgccgattgacgacagcatgagggtattggtcaacggaaacccgctgcctcatctttgggccgtcggtgatgtcactggcaagctgatgttggcccatacagccgcagcacagggcacgctggctgttgacaacatccagggacactcccgcacgattgattaccgcagcattccagccgcgaccttcactcatccggagatcagctcagtggggttgagtgaagctgatgccaaagagcttgccgccaaggatgggtttgagttggggagtgtgcgcagctatttcaaggccaattccaaagcactagcagagctggagagtgatggattgatgaagttgttgttccgcaaggacagcggtgaagttcttggtgctcatatctatggattgcacgccgccgatttgatccaggaggtagccaatgcggtggcacgacgtcagagcgttgctcaattggccaatgaagtgcatacccatcccaccctgagtgaagtggtggaagtggcctataaacaggcggcgaaacagctggctaaggcggttgttgcatcggccagtgcttcctag

SEQ ID NO: 57847 - protein, 489 aa, Prochlorococcus marinus str. MIT 9303
MSEASFDFDVIVIGAGYGGFDAAKHAADDGLKVAIVESGDMGGTCVNRGCVPSKALLAASGKVRELADAEHLSGFGIHAAPVRFERQKIADHANKLVATIRSNLTKTLQRAGVTILRGHGRLEGSQRIGVREKSGVDRLLTARDVILATGSDPFVPPGIETDGRTVFTSDEAVNLEWLPRWIAIIGSGYIGLEFADVYTALGCEVTMIEALDRVMPTFDPDITKMAARHLIEGRDIDARAGVLASKVIPGCPVRIELAEMKSRELVDSLEVDAVLVATGRVPSSKGLNLESVGVETNRGFVPIDDSMRVLVNGNPLPHLWAVGDVTGKLMLAHTAAAQGTLAVDNIQGHSRTIDYRSIPAATFTHPEISSVGLSEADAKELAAKDGFELGSVRSYFKANSKALAELESDGLMKLLFRKDSGEVLGAHIYGLHAADLIQEVANAVARRQSVAQLANEVHTHPTLSEVVEVAYKQAAKQLAKAVVASASAS

SEQ ID NO: 57848 - DNA, 1404 bp, Leptospira interrogans serovar Copenhageni str. Fiocruz L1-130
  CDS (1)..(1404): transl_table=11
atgtcagcagaatttgacgtagtcgtgatcggcgcgggaccggggggctacgtttgtgccatccgctgcgcgcaacttggttttaaaaccgcaatcatcgaaaaaagaaaaaccctcggaggcacttgtctaaacgtgggttgtattccttctaaagcgcttttagattcttctgaagaatatcataaaactttgcataagctggaagttcacgggatcagtgttggaaaagtggatttggatctaaacaagcttatgaaccgtaaggatcagattgtaaaggaagtcacggatggagtagactttcttatgaacaaaaataagatcaaacgttacgaaggttttggaaaggtattgtctgctggaaaagtagaagtcgcattcaatgacggaaaaaaggaaactctctccgccaaacacatcgtagtcgctactggctcggttccgattgatattccaggtttaaccgtggacggaaaaaatatcatcacttccgatcacgcgattgatgttcgtaaacttcccaaaaaaatgatcatcatcggagccggagtgatcggacttgaactaggatctgtttggggaagactcggaacctctgtgaccgtggttgaatttttgcccggactcatttccaatgtagatcgtcagatgggttcgttactagaacgttctcttacttctcaaggaatggaatttttatttgaacataaggtaaaaggtgcgactactacaaagaacggagtgaaggttcagatcgaagattctaaaggagagtctaaggatctagaggcggatgtggttctggtcgcagttggacgtagaccttttctggaaggagtgggactggaggaagtgggtgtagcgtttacacaacgcaaacggattcaagtggatgcacattttaaaacgtccgttcccggaatttatgcaatcggagatgcgattgatggacctatgctcgcacacaaagcggaagaagaaggggtcgctcttgcagaacttcttgccggtcaatccggtcatgtcaattacaacgcagttccttacgtcatatatacttggccggaaatggcttgggtaggaaagggcgaagaagaattgaaggctgcaggaattgaatataaagtaggaaagtcgctctttcggcccaatgctcgttccaaagcgatgaacgaagcagaaggacaagtcaaaatattagcggataaaaaaacggataaacttttaggagcttttgtatttggcccaagggcttcggatatggtggcggaattagcggtggctatggagttcggagcttctgcagaagatatagcgagaagtttccatgcacatccgaccttgtcggaagtgattaaagaagcggcaatggcggtggataagtgggcgattcacgcgtga

SEQ ID NO: 57849 - protein, 467 aa, Leptospira interrogans serovar Copenhageni str. Fiocruz L1-130
MSAEFDVVVIGAGPGGYVCAIRCAQLGFKTAIIEKRKTLGGTCLNVGCIPSKALLDSSEEYHKTLHKLEVHGISVGKVDLDLNKLMNRKDQIVKEVTDGVDFLMNKNKIKRYEGFGKVLSAGKVEVAFNDGKKETLSAKHIVVATGSVPIDIPGLTVDGKNIITSDHAIDVRKLPKKMIIIGAGVIGLELGSVWGRLGTSVTVVEFLPGLISNVDRQMGSLLERSLTSQGMEFLFEHKVKGATTTKNGVKVQIEDSKGESKDLEADVVLVAVGRRPFLEGVGLEEVGVAFTQRKRIQVDAHFKTSVPGIYAIGDAIDGPMLAHKAEEEGVALAELLAGQSGHVNYNAVPYVIYTWPEMAWVGKGEEELKAAGIEYKVGKSLFRPNARSKAMNEAEGQVKILADKKTDKLLGAFVFGPRASDMVAELAVAMEFGASAEDIARSFHAHPTLSEVIKEAAMAVDKWAIHA

SEQ ID NO: 57850 - DNA, 1386 bp, Thermus thermophilus HB27
  CDS (1)..(1386): transl_table=11
atgaagacctacgacctcatcgtgatcggcaccggcccggggggctaccacgccgccatccgggccgcccagctcggcctcaaggtgctggcggtggaggcgagcgaggtggggggggtctgcctcaacgtgggctgcatccccaccaaggccctcctccacgccgccgagaccctccaccacctgaaggtggccgaggggttcggcctgaaggccaagccggagctggacctgaggaagctcggcggctggcgggaccaggtggtgaaaaagctcaccgggggcgtgggcaccctcctcaaggggaacggggtggagctcctcaggggcttcgcccgcttggtgggccccaaggaggtggaggtagggggcgagcgttacggggcaaaaagcctgatcctcgccacggggagcgaacccctggagctcaagggcttccccttcggcgaggacgtctgggactccacccgggcccttaaggtagaggagggcctccccaagcgcctcctggtcatcggcgggggggcggtgggcctcgagctcggccaggtctaccgccgcctgggcgcggaggtcaccctcattgagtacatgccggagatcctcccccagggcgaccccgagaccgccgccctcctaaggcgcgccctggaaaaggaggggataagggttcgcaccaagaccaaggccgtgggctacgagaagaagaaggacggcctccacgtgcgcctcgagcccgccgagggcggcgagggggaggaggtggtggtggacaaggtcctggtggccgtgggccggaagccccgcacggagggcctgggcctggagaaggccggggtcaaggtggacgagcggggcttcatccgggtgaacgcccggatggagacctccgtccccggggtctacgccatcggcgacgcggcccgcccccccctcctcgcccacaaggccatgcgggaggggctcatcgccgccgagaacgccgccggcaaggacagcgcctttgactaccaggtcccgagcgtggtctacacctcccccgagtgggccggggtgggcctcaccgaggaggaagcgaagcgggcgggctacagggtgaaggtggggaagttccccctcgccgccagtggccgggccctcaccctgggcggggccgaggggatggtcaaggtggtgggggacgaggagacggacctcctcctcggggtcttcatcgtggggccccaggcgggggagctcatcgccgaggccgccttggccctggagatgggggccacgctcaccgacctcgccctcaccatccatccccaccccaccctctcggaaagcctcatggaggcggcggaggccttccacaagcaggccatccacatcctgaaccgctag

SEQ ID NO: 57851 - protein, 461 aa, Thermus thermophilus HB27
MKTYDLIVIGTGPGGYHAAIRAAQLGLKVLAVEASEVGGVCLNVGCIPTKALLHAAETLHHLKVAEGFGLKAKPELDLRKLGGWRDQVVKKLTGGVGTLLKGNGVELLRGFARLVGPKEVEVGGERYGAKSLILATGSEPLELKGFPFGEDVWDSTRALKVEEGLPKRLLVIGGGAVGLELGQVYRRLGAEVTLIEYMPEILPQGDPETAALLRRALEKEGIRVRTKTKAVGYEKKKDGLHVRLEPAEGGEGEEVVVDKVLVAVGRKPRTEGLGLEKAGVKVDERGFIRVNARMETSVPGVYAIGDAARPPLLAHKAMREGLIAAENAAGKDSAFDYQVPSVVYTSPEWAGVGLTEEEAKRAGYRVKVGKFPLAASGRALTLGGAEGMVKVVGDEETDLLLGVFIVGPQAGELIAEAALALEMGATLTDLALTIHPHPTLSESLMEAAEAFHKQAIHILNR

SEQ ID NO: 57852 - DNA, 1407 bp, Bartonella quintana str. Toulouse
  CDS (1)..(1407): transl_table=11
atgtcttatgatgtggttgtaatcggggcaggtccaggtggttatgtagcggcaatcaaagcagcgcaattgggctttaaaacagcgattattgaaaagcgcatgacattaggtggtacgtgtcttaatgttggctgtattccttctaaagcgttattgcacacttcagaagtgtttgctgaaacgcaacatggttttgaaaagcttggtatttctatttcaaaacctaagcttaatcttgagcaaatgatggcgcataagaaagctgttgtaacagcaaatacaagtggcatttcttttttgatgaaaaagaataaaattgacactttttttggtacagccaaaattttaagcgcaggtcagattgaagttgttgcaagagatggtaacaaacaaacgatcgcgacaaaaaatattgttattgctactggttcagagagttccggcattccaggtgtgaatgttaaaattgatgaaaagattattgtgtcttctacaggagcccttgcgcttgaaaaagtaccaatgcgtatgattgtggttggcgctggtgtcattggttcagagcttggttcagtttggagccgcttaggttctaaggttaccattattgaatatcttaataaagttttaggatcaatggatggtgaagtttcacggcaatttcagaaattaatggaaaaacagggaattgaatataagactggtacaaaggtaacagctattatgcaatctggttcaaccgctcaggtaacctttgaaaccatcaaaggtggtgcatcagaaactttagaggctgatgttgtgctcattgctactggacgcttcccgtatacggaggggcttggcttagtagaggctggtgttaagttggatgaacgtggctttattgcaatcgatgcaaattggcagacgaatattccaggaatttatgcgatcggtgatgtcgttaaaggaccaatgttagcgcataaggcagaggaagaaggcgttgctgtggcagaaattttggcgggtcaaaaaggacatgttaattttgatgtcattcctagtgttgtttatacacagccagaaattgctagtgtaggcaagacagaagaagaactgaaagctgctggaattgattataatgttggaaagtttcttttcacagccaatggtcgtgcacgcgcgatgcaaaaaagtgatgggtttgttaaaatccttgctgataaaaagacagatcgggttttgggcggacacattcttgggtttggtgctagtgaaatgatccatgaaattgcagttttgatggaatttggtggttcatcagaagatctagggcgttgttgccatgcgcaccctactttatcagaagcagtgcgagaagcagctttggcgacatttgctaaaccgcttcatatttag

SEQ ID NO: 57853 - protein, 468 aa, Bartonella quintana str. Toulouse
MSYDVVVIGAGPGGYVAAIKAAQLGFKTAIIEKRMTLGGTCLNVGCIPSKALLHTSEVFAETQHGFEKLGISISKPKLNLEQMMAHKKAVVTANTSGISFLMKKNKIDTFFGTAKILSAGQIEVVARDGNKQTIATKNIVIATGSESSGIPGVNVKIDEKIIVSSTGALALEKVPMRMIVVGAGVIGSELGSVWSRLGSKVTIIEYLNKVLGSMDGEVSRQFQKLMEKQGIEYKTGTKVTAIMQSGSTAQVTFETIKGGASETLEADVVLIATGRFPYTEGLGLVEAGVKLDERGFIAIDANWQTNIPGIYAIGDVVKGPMLAHKAEEEGVAVAEILAGQKGHVNFDVIPSVVYTQPEIASVGKTEEELKAAGIDYNVGKFLFTANGRARAMQKSDGFVKILADKKTDRVLGGHILGFGASEMIHEIAVLMEFGGSSEDLGRCCHAHPTLSEAVREAALATFAKPLHI

SEQ ID NO: 57854 - DNA, 1434 bp, Acinetobacter sp. ADP1
  CDS (1)..(1434): transl_table=11
atgtctcaacaatttgatcttgttgtaattggcggtggaccaggcggttatgaagcggcgattcgtgctgctcagcttggttttaaagttgcttgtattgagaaacgtgttcataaaggtaaaccatctttaggtggtacgtgcttaaacgttggatgtattccttctaaagcactccttgattcgtctcatcattatgaagatacgattcatcatcttggtgatcatggtattacaacaggcgaagttaatattgacatcgcaaaaatgttggcacgcaaagataaagttgtagagaatttgactggtggtgttgcccaattattaaaaggcaatggcattgagtggttgcaaggtacgggtaagttacttgcgggtaagaaagttgagtttgttcctttcgaaggtgaaactcaggttttagaacctaaatatgtgatcctcgcttctggttctgttccagtcaatatcccagttgcccctgttgatcaagacttgattgttgactcaactggtgcactcgagtttgctgaagtacctaagcgtttgggtgtgattggtgcaggtgtgattggtctggaacttggttctgtatggcgccgtttgggttctgaagtggttgtatttgaagcattggatgcattcttgccaatggcagataaagcactttcaaaagaattccaaaaaattctgaccaagcaaggccttgatattcgcattggtgctaaagtttctggtactgaggtgaatggtcgtgaagtgacggttaaatacaatcaggctggcgaagacaaagaacaagtgtttgacaagttgatcgtatgcgtaggtcgtaagccttatgcagaaggtttgttggcagaagatgctggcattaaactgactgatcgtggctttatcgaagtaaacgaccattgtgcaacttctcttgaaggtgtgtatgcgattggtgaccttgtccgtggtcctatgcttgcgcataaagccatggaagaaggtgtgatggcagttgagcgtattcacggtcatgcagcacaagtgaactacgatacaattatcagcgttatttacacgcaccctgaagcagcttgggttggcttaactgaagagcaagctgttgcaaatggtcatgaagtaaaaacaggtcaattcccatttgccgtgaatggtcgtgctcttgctgctggtgaagctgctggttttgtaaaattcgttgctgatgctaaaactgatcgcttgttaggaatgcatgtgattggtcctggtgcttcagatattgtacatcaagggatgattgcacttgagtttgtatcttctgtagaagatttacaattaatgacatttggccatccgacttattctgaggtggttcatgaggctgctttagctgttgatggtcgtgcaattcatgcgatccagcgtaaacgtaaataa

SEQ ID NO: 57855 - protein, 477 aa, Acinetobacter sp. ADP1
MSQQFDLVVIGGGPGGYEAAIRAAQLGFKVACIEKRVHKGKPSLGGTCLNVGCIPSKALLDSSHHYEDTIHHLGDHGITTGEVNIDIAKMLARKDKVVENLTGGVAQLLKGNGIEWLQGTGKLLAGKKVEFVPFEGETQVLEPKYVILASGSVPVNIPVAPVDQDLIVDSTGALEFAEVPKRLGVIGAGVIGLELGSVWRRLGSEVVVFEALDAFLPMADKALSKEFQKILTKQGLDIRIGAKVSGTEVNGREVTVKYNQAGEDKEQVFDKLIVCVGRKPYAEGLLAEDAGIKLTDRGFIEVNDHCATSLEGVYAIGDLVRGPMLAHKAMEEGVMAVERIHGHAAQVNYDTIISVIYTHPEAAWVGLTEEQAVANGHEVKTGQFPFAVNGRALAAGEAAGFVKFVADAKTDRLLGMHVIGPGASDIVHQGMIALEFVSSVEDLQLMTFGHPTYSEVVHEAALAVDGRAIHAIQRKRK

SEQ ID NO: 57856 - DNA, 1875 bp, Streptococcus pyogenes MGAS10394
  CDS (1)..(1875): transl_table=11
ttgtttcggaaagtcctagtcgtcctgacgtgggtgcgtcaacgaaatcaaagatttctgacttaccgcaaaaattcaatcgctttctccttgctcttggtatcttacattatggctgttgaaattattatgccaaaactcggtgttgacatgcaagaaggtgaaatcatcgagtggaaaaaacaagaaggtgatactgtcaatgaaggcgatattcttcttgaaatcatgtcagataaaaccaatatggaacttgaagcagaagactcaggtgttcttcttaaaattacacgtcaagcaggtgaaacagtacctgtaacagaagttatcggctatatcggtgctgaaggtgaatctgttgaggtttctagcccagctgcttcagatgtgaatgttgctcgtacaacagaagatttagaagctgccggacttgaagtgccaaaagcaccagctcaagctgcttcagctgcaccaaaagctgcacttgctgatgatgagtatgacatcatcgttgttggtggtggccctgctggttattatgcagctattcgtggtgctcaacttggtggtaaaattgccatcgttgagaaatctgaatttggtggaacttgcttgaacgtagggtgtatcccaaccaaaacttaccttaaaaatgctgaaatccttgatggtattaagattgcagcaggacgtgggattaaccttgcctcaactaactataccattgacatggacaaaacagttgactttaaaaacaccgttgttaaaaccttaacaggtggtgttcaaggtcttctaaaagctaataaagtcactatctttaatgggcttggtcaagtcaaccctgacaagactgtaaacattgggtcacaaaccattaagggtcgcaacgttatccttgctacaggttctaaagtatcacgtatcaatatcccaggtattgactctaaacttgtcttaacgtcagatgatatccttgaccttcgtgaaatgccaaaatcactagcagttatgggcggtggtgttgttggtatcgagcttggacttgtttgggcatcttacggtgtggatgttaccgttattgaaatggctgaccgtattatcccagctatggataaagaagtctctcttgaacttcaaaaaattctttctaagaaaggcatgaagatcaaaacatctgttggtgtctctgaaattgttgaagcaaataaccaattgaccttgaaacttaacaatggtgaagaagttgtcgctgaaaaagctcttctttctatcggtcgtgtaccacaaatgaacggtctggaaaatcttaaccttgaaatggatcgtaaccgtatcaaagttaatgactaccaagagacatcaattccaggtatctatgcgccaggtgacgttaacggaacgaaaatgcttgctcacgctgcttaccgtatgggtgaagtggctgcagaaaatgcgatacatggcaacacaactcgtaaagctaaccttaaatacactccagcagccgtttacacacaccctgaagtggcaatggttggtttaactgaagaacaagcccgtgaacaatatggtgacgtgcttattggtaaaaacagctttactggtaatggacgcgcgattgcttcaaatgaagcacatggttttgttaaagttattgctgatgccaaataccacgaaatcttaggtgttcatattattggtccagctgcagctgagatgattaatgaagcagctactattatggaatctgaattaaccgttgatgaattgttattatcaattcatggacacccaactttctctgaagtgatgtacgaagcctttgcagatgtgcttggcgaagctatccataacccaccaaaacgtaagtaa

SEQ ID NO: 57857 - protein, 624 aa, Streptococcus pyogenes MGAS10394
MFRKVLVVLTWVRQRNQRFLTYRKNSIAFSLLLVSYIMAVEIIMPKLGVDMQEGEIIEWKKQEGDTVNEGDILLEIMSDKTNMELEAEDSGVLLKITRQAGETVPVTEVIGYIGAEGESVEVSSPAASDVNVARTTEDLEAAGLEVPKAPAQAASAAPKAALADDEYDIIVVGGGPAGYYAAIRGAQLGGKIAIVEKSEFGGTCLNVGCIPTKTYLKNAEILDGIKIAAGRGINLASTNYTIDMDKTVDFKNTVVKTLTGGVQGLLKANKVTIFNGLGQVNPDKTVNIGSQTIKGRNVILATGSKVSRINIPGIDSKLVLTSDDILDLREMPKSLAVMGGGVVGIELGLVWASYGVDVTVIEMADRIIPAMDKEVSLELQKILSKKGMKIKTSVGVSEIVEANNQLTLKLNNGEEVVAEKALLSIGRVPQMNGLENLNLEMDRNRIKVNDYQETSIPGIYAPGDVNGTKMLAHAAYRMGEVAAENAIHGNTTRKANLKYTPAAVYTHPEVAMVGLTEEQAREQYGDVLIGKNSFTGNGRAIASNEAHGFVKVIADAKYHEILGVHIIGPAAAEMINEAATIMESELTVDELLLSIHGHPTFSEVMYEAFADVLGEAIHNPPKRK

SEQ ID NO: 57858 - DNA, 1374 bp, Leifsonia xyli subsp. xyli str. CTCB07
  CDS (1)..(1374): transl_table=11
atgtctgagcagaactttgacattgtggtgctcggcggtgggagtggaggctacgcagcggcgctgcgtgcggtcgaactcggtttcaccgtcggcatgatcgagaaggacaaggtcggcggcacctgcctgcaccgcggctgcgttccgacgaaagcgctgctccacgcagccgaggtcgccgactactcccgggagtcgggcaaatacggcatcgtcacgcagatgcagggcgtcgacatcaacggcgtcaccgaataccgccagggcatcgtcacgaagaagtacaagggcttgcagggactggtgaaggcccgcggcatcacggtcatcgagggcgaaggccgcctggtctccccgaccaccgtgcaggtcggcgaggacacgatcgtcggcaagaacatcatcctggccaccgggtccttctcgcgcagcctccccggcctcgagatcggcggccgtgtgatcaccagcgagcaggccctcgaattggacttcgtcccccagaaggtcgccgtcctcggcggcggcgtcatcggcgtcgagttcgcgagcgtctggaagtccttcggcgccgatgtcaccgtgatcgaggccctcccccacctggtccccaacgaggacgagtcgatcagcaagtcactggaacgcgcgttccgccgccgcgggatcgactaccgcctgggcgtccgcttcgcgggcgtcagccagcacgagaacggcgtcgtcgtctcgctcgaggacggcagcaccgtcgaggaggaactgctgctcgtcgccgtcggccgcggcccgctcacacagggcctcggcttcgaggaagccggcatcaccctcgaccgcggcttcgtcatcaccgatgagcgcctgcggaccagcgtcccgggcgtctacgccgtcggagacatcgtccccggcctccagctcgcgcaccgcggcttccagcagggcatcttcgtggccgaggagatcgcgggcctgaaccccgtcgtcatcccggatgtcaacatcccgaaggtcacctactgcgaccccgaagtcgcctccatcggcctcaccgagatcaaagcggtcgaacagtacggcgcagaccgcgtcaccagctacgactacagcctcgccggcaacgcgaagagcgagatcatcggaacgaacggcagcgtcaaggtcgtccgcgtgaacgacggccccgtggtcggcgtccacatgatcggcgcccgtgtcggcgaactcatcggcgaagcccagctcgcggtcaactgggaggcctaccctgaggacatcgccccgctgatccacgcacaccccactcagaatgagtcgctcggcgaggcgttcctgtacctctcgggcaagccgctccacaccctctaa

SEQ ID NO: 57859 - protein, 457 aa, Leifsonia xyli subsp. xyli str. CTCB07
MSEQNFDIVVLGGGSGGYAAALRAVELGFTVGMIEKDKVGGTCLHRGCVPTKALLHAAEVADYSRESGKYGIVTQMQGVDINGVTEYRQGIVTKKYKGLQGLVKARGITVIEGEGRLVSPTTVQVGEDTIVGKNIILATGSFSRSLPGLEIGGRVITSEQALELDFVPQKVAVLGGGVIGVEFASVWKSFGADVTVIEALPHLVPNEDESISKSLERAFRRRGIDYRLGVRFAGVSQHENGVVVSLEDGSTVEEELLLVAVGRGPLTQGLGFEEAGITLDRGFVITDERLRTSVPGVYAVGDIVPGLQLAHRGFQQGIFVAEEIAGLNPVVIPDVNIPKVTYCDPEVASIGLTEIKAVEQYGADRVTSYDYSLAGNAKSEIIGTNGSVKVVRVNDGPVVGVHMIGARVGELIGEAQLAVNWEAYPEDIAPLIHAHPTQNESLGEAFLYLSGKPLHTL

SEQ ID NO: 57860 - DNA, 1428 bp, Yersinia pseudotuberculosis IP 32953
  CDS (1)..(1428): transl_table=11
atgatgagtactgaaattaaaactcaggtcgtggtacttggggcaggtccagcagggtactctgctgcttttcgttgtgcggatttagggttagaaaccattctggttgaacgttactccactctgggtggggtttgcctgaatgtgggttgtatcccttccaaggcactgttacacgttgccaaagtgatcgaagaagccaaagcgctggctgaacatggtatcgtttttggcgagcctaaaactgatattgataaagtccgtgtctggaaagataaagttatcaatcagttgaccggtggtttggcaggtatggctaaaggccgtaaagtcaaagtagtgactggttttggtaaatttaccggtgcgaacaccttagtggttgatggtgagaatggtccaacaaccattaacttcgataacgctattatcgcggcgggttctcgcccaattcaactgccattcattcctcatgaagactcacgtatttgggattcaactgacgcactggcattgagaacggttcctgagcgcttgttggtgatgggcggtggtatcattggtctggaaatggggaccgtttaccacgcactgggttctaagattgacgtggtcgaaatgcttgatcaggtgatccccgcagcagataaagacgtggtgaaagtctttaccaagcggatcagcaagcagttcaatctgatgctggaaaccaaagtgacagcggtagaagccaaagaagacggtatctatgtcacgatggaaggcaaaaaagcgccagcagagccacaacgctatgatgcggtgttggttgcgattggccgcgtgcctaacggtaagttgctggatgcgggtcaggcgggtgttgaagttgatgatcgtggctttatccacgttgataagcaactgcgcaccaatgtgccacacatttttgctatcggtgacatcgtgggtcagccaatgctggcgcataaaggtgtccacgaaggccatgttgccgctgaagttatcgcaggcatgaagcactatttcgatccgaaagttattccatcgattgcgtacactgaaccagaagtcgcatgggttggtttgaccgaaaaagaagcaaaagagaaaggcatcagctacgaaacctccaccttcccgtgggcggcatcgggccgtgctatcgcttctgattgcgcagatggtatgactaaactgattttcgacaaagaaactcaccgtatcattggtggtgcgattgtcggtactaacggtggcgaactgttaggtgaaatcggtctggccattgagatgggttgtgatgcagaagatatcgcattgaccattcatgctcacccaacattgcatgaatcagtgggcctggcggcggaaatctacgaaggtagcattactgacctgcctaacccgaaagcgaaaaagaaataa

SEQ ID NO: 57861 - protein, 475 aa, Yersinia pseudotuberculosis IP 32953
MMSTEIKTQVVVLGAGPAGYSAAFRCADLGLETILVERYSTLGGVCLNVGCIPSKALLHVAKVIEEAKALAEHGIVFGEPKTDIDKVRVWKDKVINQLTGGLAGMAKGRKVKVVTGFGKFTGANTLVVDGENGPTTINFDNAIIAAGSRPIQLPFIPHEDSRIWDSTDALALRTVPERLLVMGGGIIGLEMGTVYHALGSKIDVVEMLDQVIPAADKDVVKVFTKRISKQFNLMLETKVTAVEAKEDGIYVTMEGKKAPAEPQRYDAVLVAIGRVPNGKLLDAGQAGVEVDDRGFIHVDKQLRTNVPHIFAIGDIVGQPMLAHKGVHEGHVAAEVIAGMKHYFDPKVIPSIAYTEPEVAWVGLTEKEAKEKGISYETSTFPWAASGRAIASDCADGMTKLIFDKETHRIIGGAIVGTNGGELLGEIGLAIEMGCDAEDIALTIHAHPTLHESVGLAAEIYEGSITDLPNPKAKKK

SEQ ID NO: 57862 - DNA, 1413 bp, Bacillus licheniformis ATCC 14580
  CDS (1)..(1413): transl_table=11
atggtagtaggagatttccctattgaaacagatactcttgtcattggtgcgggacctggcggctatgtagctgccatccgcgctgctcagcttggacaaaaagtaacaatcgtcgaaaaaggcaatcttggaggcgtatgtctgaatgtcggatgtatcccttcaaaagcgcttatcaatgcaggccaccgctatgagaatgcgaagcattctgaagagatggggatcactgctgaaaacgtaaaagttgactttacaaaggttcaagaatggaaagcctctgtcgttaataagcttaccggcggtgttgaaggccttctgaaaggaaacaaagtcgacatcgtaaaaggcgaagcatactttgtagacagcaattctgtacgcgtgatggatgagaactcagctcagacttacacgttcaaaaatgcgatcattgcaacaggttctcgccctatcgaattgccaaacttcaaatatagcgaccgcgtactgaattcaacaggcgcacttgcactgaaagaaattcctaagaagctcgttgtcatcggcggcggctacatcggaacagagctcggtactgcatatgcaaacttcggtactgaagttgtcattcttgaaggcggagaagaaatccttccaggatttgagaagcaaatgagctctcttgtgaaacgcaacctgaagaaaaaaggcaacgttgaaatccatacaaaagcaatggctaaaggcgtagaagaaaaagctgacggcgtaaccgttacgttcgaagtgaaaggcgaagagcaaacgatcgatgcggactacgtacttgtcactgtcggccgcgttgcaaacacggacgagctcggacttgaacaagtcggcgtcgaaatgacggaccgcggcatcatcaaaacggacaaacaatgccgtacaaacattccgaacatctatgcgatcggtgacatcatcgaaggtcctccgcttgcgcataaagcttcttatgaaggtaaaattgctgctgaagcgattgccggagaagctgcggaaatcgactatcttggaattcctgcggtcgtattctctgagcctgaacttgcatctgtaggctacactgaagcacaggctaaagaagaaggtctttcagtgactgcagccaaattcccgtttgcagcaaacggacgtgcgctgtcattaaacgaaactgacggtttccttaaacttgtaacacgcaaagaagacggcttagtcatcggtgcacaaatcgccggagcaagcgcttctgacatgatttctgagctgagcttggcaatcgaagcaggaatgactgctgaagatatcgcaatgacaatccacgctcaccctacattgggagaaatcacaatggaagctgcagaagttgccatcggcatgccgatccacgttgtaaaataa

SEQ ID NO: 57863 - protein, 470 aa, Bacillus licheniformis ATCC 14580
MVVGDFPIETDTLVIGAGPGGYVAAIRAAQLGQKVTIVEKGNLGGVCLNVGCIPSKALINAGHRYENAKHSEEMGITAENVKVDFTKVQEWKASVVNKLTGGVEGLLKGNKVDIVKGEAYFVDSNSVRVMDENSAQTYTFKNAIIATGSRPIELPNFKYSDRVLNSTGALALKEIPKKLVVIGGGYIGTELGTAYANFGTEVVILEGGEEILPGFEKQMSSLVKRNLKKKGNVEIHTKAMAKGVEEKADGVTVTFEVKGEEQTIDADYVLVTVGRVANTDELGLEQVGVEMTDRGIIKTDKQCRTNIPNIYAIGDIIEGPPLAHKASYEGKIAAEAIAGEAAEIDYLGIPAVVFSEPELASVGYTEAQAKEEGLSVTAAKFPFAANGRALSLNETDGFLKLVTRKEDGLVIGAQIAGASASDMISELSLAIEAGMTAEDIAMTIHAHPTLGEITMEAAEVAIGMPIHVVK

SEQ ID NO: 57864 - DNA, 1440 bp, Legionella pneumophila subsp. pneumophila str. Philadelphia 1
  CDS (1)..(1440): transl_table=11
ttgatgaggcttcttatggctaataaaattaagacagatgtagtggtattaggtagtggaccaggcggatacacagccgctttcagggctgccgacttggataaaaaggtggttttggtcgagcgttttgactcactaggtggcgtttgtttaaatgttggttgcattccctcaaaagcattattgcatattgctaaagtagtagatgaagcccatgaaatgtcagagcaaggtgtagcatttggtaaacctaaattcgacaataaaaaattggttgcctggaaaaactctgtcgttgcaaagttgaccgggggactaaaagctcttgccaaacaaagaaaagtagaagtaattactgggacaggtaagttttcaggtacccatcaaattcttgttgaaacgaaagaagggactgtagaaattgaatttgataatgccattattgcagtaggctcagaatccattaaattaccatttataccagaagataaacgaatatttagctctacaggggcattagaactcgctgatatcaaaggtgacttacttgtattgggtggtggtattattggcttggaaatggcaactgtctactcctcgctgggagttaatgtaacagttgttgaatttatggaccaattaattccgaatgctgatgccgacttggtcaatatactgcaaaaacgaatgactaaaaagggtgtcaaatttctattaaaaacgaaagtaactgcagttgaagccaaaaaagatggtatttatgtttcaatggaaggagaacatgcaactgataagcctctttgctttcagcaagtacttgtttcagtaggcaggaaacctaacggtggagcaatcaacgctgaaaaagcagggatcaaagtagatgaacgtggctttattccagttgataatcaattaagaacgaatgttcctcatatttttgctattggcgatgtcaatgggcaaccaatgctcgcacataaagcaatccctgaagggaaagttgcagcagaagtcattgcagggaaaaaacattattttgagccaaaatgtatacctagtgttgcttatacagatccagaattagcttgggctggtctaacagaaaaagaagcaaaagagaaaggaataaactatgagaaagcctcctttccatgggctgctagcggtcgtgcactcagcatggggcgagaagagggaatgaccaaattactattctgcccagaaactaaccgtatcctgggagcaggtattgttggggttaatgccggcgatttaattgcagaaactgccttagccattgaaatgtgttgtgatgttgaagacatcgctcttactattcatcctcacccgactctatcagaaaccatagctcagtcagcagaagcatttgaaggcactataacggatctgtatttgcctaaaaagaagaaaaaataa

SEQ ID NO: 57865 - protein, 479 aa, Legionella pneumophila subsp. pneumophila str. Philadelphia 1
MMRLLMANKIKTDVVVLGSGPGGYTAAFRAADLDKKVVLVERFDSLGGVCLNVGCIPSKALLHIAKVVDEAHEMSEQGVAFGKPKFDNKKLVAWKNSVVAKLTGGLKALAKQRKVEVITGTGKFSGTHQILVETKEGTVEIEFDNAIIAVGSESIKLPFIPEDKRIFSSTGALELADIKGDLLVLGGGIIGLEMATVYSSLGVNVTVVEFMDQLIPNADADLVNILQKRMTKKGVKFLLKTKVTAVEAKKDGIYVSMEGEHATDKPLCFQQVLVSVGRKPNGGAINAEKAGIKVDERGFIPVDNQLRTNVPHIFAIGDVNGQPMLAHKAIPEGKVAAEVIAGKKHYFEPKCIPSVAYTDPELAWAGLTEKEAKEKGINYEKASFPWAASGRALSMGREEGMTKLLFCPETNRILGAGIVGVNAGDLIAETALAIEMCCDVEDIALTIHPHPTLSETIAQSAEAFEGTITDLYLPKKKKK

SEQ ID NO: 57866 - DNA, 1416 bp, Anaplasma marginale str. St. Maries
  CDS (1)..(1416): transl_table=11
atgggtgtatgtgattacgacgttgctgttattggtgccgggccaggtgggtacaaatgcgcgctcaaggccgcgaagctcggcctcaaggttgcaagtatagacaacaactcgctgcttgggggtacctgcctcagagttggatgtattccatcaaaggccttgctggactattcctacaaatatcacgcggccaaggatattttcaaggactttggggttacggccagcaatgtaaagtttgacctgcgcaaaatgtttgaagtgcgagacagggaaataaacgcgcttggctccggtataggcagcctgttctcttctgctggggtggaaaggctatgtggggccgcaactgtgactcgcgccatgggtgatggttttgagattgttgtaaggcgtgaaggagcgcctacggatgatgagctatctgccaagaatgttgtgcttgccacgggttcccttccagcctctttacctggcatcgacattgatgaagtcaggattttatcctctgatggggcgttgggcatggacgttccgggcaaactgcttgtcatagggggtggggccataggacttgaaatgtcttcggtgtggagcagactgggagcggaagttactgttgttgaatatgcagattgcatcgccccgggttttgattccgaagttagcaaagcgctgttgagccacttgaaaaaacagggcatcaattttatgctgtcacacaaagtggtttccgtatctgagaagaaagggggcaagctggttgtgagctgtgaagccctctctagtggcgcagtatcagctgtagaggttgacaaagttcttgtggcggtaggccgcaggccaaacgtcggcaagacagttgccgtggatggattggtgctggacgacaggggttttgtttcggtagatagcaggtacgagaccagcataaaggggattttcgctataggtgacgtgattggtggggcaatgttggctcacaaggccgaaatggaggggcatgcagttgctgagctagttgcagggcatgattcaaacgtggattacggcgtcattccggcggtggtctacacacaccccgcggttgcatctgtcgggcgaagtgaggattacgtgaagagcgtggggtatgactacaaggtaggtaagagcaactttgctgcaaacggacgggctagggttactggtgaaggtgaggggtttgttaaagttgttgcatgcaagcgtactgataccatccttggggtgcacatcgtaggtacttacgctgataccatgattaacgaggctgttgtcgctctcggctaccgggcctcttccaaggatatttgccacatatgccactcccatccggatgtaaacgaggtctttagagatgcgtgtgaagttgcttgctctagaaaaggttag

SEQ ID NO: 57867 - protein, 471 aa, Anaplasma marginale str. St. Maries
MGVCDYDVAVIGAGPGGYKCALKAAKLGLKVASIDNNSLLGGTCLRVGCIPSKALLDYSYKYHAAKDIFKDFGVTASNVKFDLRKMFEVRDREINALGSGIGSLFSSAGVERLCGAATVTRAMGDGFEIVVRREGAPTDDELSAKNVVLATGSLPASLPGIDIDEVRILSSDGALGMDVPGKLLVIGGGAIGLEMSSVWSRLGAEVTVVEYADCIAPGFDSEVSKALLSHLKKQGINFMLSHKVVSVSEKKGGKLVVSCEALSSGAVSAVEVDKVLVAVGRRPNVGKTVAVDGLVLDDRGFVSVDSRYETSIKGIFAIGDVIGGAMLAHKAEMEGHAVAELVAGHDSNVDYGVIPAVVYTHPAVASVGRSEDYVKSVGYDYKVGKSNFAANGRARVTGEGEGFVKVVACKRTDTILGVHIVGTYADTMINEAVVALGYRASSKDICHICHSHPDVNEVFRDACEVACSRKG

SEQ ID NO: 57868 - DNA, 1389 bp, Silicibacter pomeroyi DSS-3
  CDS (1)..(1389): transl_table=11
atggcaacctatgacgtcatcatcatcggcgcaggccccggcggctatgtctgcgccatccgctgcgcccagctgggtttgaaaaccgccgtggtcgagggccgcgaaaccctgggcggcacctgcctgaacgtgggctgcatcccgtccaaggcgctgctgcacgcctcgcattcgctgcacgaggcgcaacacaactttgccaagatgggactcaagggcaaaagcccttcggtcgactggaagcagatgctcgcctacaaggacgaggtgatcgagggcaataccaagggcatcgaattcctgttcaagaagaacaagatcgactggatcaagggctgggcctcgatccctgccgcgggcaaggtgcaggtgggcgacgacacccacgaggcgaagaacatcatcatcgcctccggctccgaaccggcctcgttgccgggtgtcgaggtggacgagaagaccgtcgtgacctcgaccggcgcgctggaactgggcaagatcccgaaatccctggtggtgatcggcgccggtgtcatcgggctggaactgggctcggtctatgcccgcctgggtgccgaggtgacggtggtcgagttcctcgacgtgatcacccccggcatggacggcgaagtgcaaaagaccttccagcgcatcctgaaaaagcagggcctgaccttcgtcatgggtgccgcggtgcaaaagaccgaaatcgccaggggcaaggccaaggtcacctacaagctgctgaaaaaggacaccgagcacgagatcgaggcagataccgtgctggttgccaccgggcgcaaaccctatactgcgggtctgggcctcgacaagctggggatcgagatgacccagcgcggccagatcaaggtgggcaaggactggcagaccaacgtgcccggcatctacgccatcggcgacgtgatcgaaggcccgatgctcgcccacaaggccgaggacgaggggatggccgccgccgaacaggtcgcgggcaagcatggtcatgtcaactatggcgtcattcccggcgtgatctacacaacgcccgaggtcgccaatgtcggcgccaccgaggaaagcctcaaggccgagggccgcgcctacaaggtcggcaagttcatgttcatgggcaatggccgcgccaaggccaatttcgctagtgacggcttcgtcaagatcctcgccgacaaggagacagaccgcatccttggcgcccatatcatcggcccggcagcgggcgaactgatccacgaggtctgcgtcgccatggaattcggcgcctcggccgaggatctggcgctgacctgccacgcacacccgacctattccgaggctgtgcgcgaggcggcgctggcctgcggcgacggcccgatccactcgtaa

SEQ ID NO: 57869 - protein, 462 aa, Silicibacter pomeroyi DSS-3
MATYDVIIIGAGPGGYVCAIRCAQLGLKTAVVEGRETLGGTCLNVGCIPSKALLHASHSLHEAQHNFAKMGLKGKSPSVDWKQMLAYKDEVIEGNTKGIEFLFKKNKIDWIKGWASIPAAGKVQVGDDTHEAKNIIIASGSEPASLPGVEVDEKTVVTSTGALELGKIPKSLVVIGAGVIGLELGSVYARLGAEVTVVEFLDVITPGMDGEVQKTFQRILKKQGLTFVMGAAVQKTEIARGKAKVTYKLLKKDTEHEIEADTVLVATGRKPYTAGLGLDKLGIEMTQRGQIKVGKDWQTNVPGIYAIGDVIEGPMLAHKAEDEGMAAAEQVAGKHGHVNYGVIPGVIYTTPEVANVGATEESLKAEGRAYKVGKFMFMGNGRAKANFASDGFVKILADKETDRILGAHIIGPAAGELIHEVCVAMEFGASAEDLALTCHAHPTYSEAVREAALACGDGPIHS

SEQ ID NO: 57870 - DNA, 1440 bp, Synechococcus elongatus PCC 6301
  CDS (1)..(1440): transl_table=11
gtgagcagcgagtttgactacgacgtcattgtcattggggccggctatggcggttttgatgcggccaaacacgcctgcgaaaaaggtctgaagacggcgatcgtggaagcccgtgaccttggcggcacctgcgtgaatcgcggttgcgtgccttccaaagcactactggcagcctcaggtcgcgtgcgggaaattaccgataccgaccacctgcagaacttcgggattcaagtccaaggcgtcagcttcgatcgccaagcgatcgccgatcacgccgccaacttggtcgataccgtccgcaccaacttgggcaataccctcgagcggctcggggctgagattttgatggggcgcggtcgtttggccggtagccagcgcgtcaccgtcaccgctgccgatgggactgaaaagacctacagcgctcgcgatgtgattctggcgacgggttccgacccctttgtaccgcccggcattgaaatcgatggcaaaaccgtctttaccagcgacgacgccctcaagctggaaacgctaccccagtggatcgccatcattggcagtggctacatcggtcttgagttctccgatgtctacacagcgttgggctgcgaagtgacgatgatcgaagccctcgatcgcctcttgcccacctttgaccctgatgtggcgaaagttgcccagcgatcgctgctggatggtcgcgacatcgaaacccgcacgggtgttttggcgcgcaaaattacgccgggctcgccggttgtgatcgaactggccgacttcgaaaccaaagaactggtggaagtgctggaagtcgatgcttgcctagtcgccaccgggcggattcccagcaccaaaaatctgggcttggaaaccgttgctgtcgaagtcgatcgccgtggcttcattcccgtggacgatggcatgcgcgtcctccgcgatagcaaacctgtgccccacctcttcgctgttggcgatgccaccggcaagctgatgttggctcacgctgcagcagctcagggtgtggtcgcgatcgaaaacatcaccggccacccacgcagcgtcgattaccgcagcattccggcggccaccttcacccaccccgaaatcagctcggtcggcctcagtgaagcggatgcaaaagccttgggtggtcaagaagggttcgaagtgggcagcgtccgcagctacttcaaagccaactccaaagccttggctgaggcggatgccgatgggtttgccaaggtgctgttccgcaaagatacgggcgaagtgctcggggctcatatctttgggctgcatgcggcagatttgatccaagaagtcgctaacgcgatcgcccgtcgccagtcggtcaaagagctcgcctttgaggttcacacccacccgaccctgagtgaggtgatcgagtccgcttacaaacaagctgctaccgcgatcgcctaa

SEQ ID NO: 57871 - protein, 479 aa, Synechococcus elongatus PCC 6301
MSSEFDYDVIVIGAGYGGFDAAKHACEKGLKTAIVEARDLGGTCVNRGCVPSKALLAASGRVREITDTDHLQNFGIQVQGVSFDRQAIADHAANLVDTVRTNLGNTLERLGAEILMGRGRLAGSQRVTVTAADGTEKTYSARDVILATGSDPFVPPGIEIDGKTVFTSDDALKLETLPQWIAIIGSGYIGLEFSDVYTALGCEVTMIEALDRLLPTFDPDVAKVAQRSLLDGRDIETRTGVLARKITPGSPVVIELADFETKELVEVLEVDACLVATGRIPSTKNLGLETVAVEVDRRGFIPVDDGMRVLRDSKPVPHLFAVGDATGKLMLAHAAAAQGVVAIENITGHPRSVDYRSIPAATFTHPEISSVGLSEADAKALGGQEGFEVGSVRSYFKANSKALAEADADGFAKVLFRKDTGEVLGAHIFGLHAADLIQEVANAIARRQSVKELAFEVHTHPTLSEVIESAYKQAATAIA

SEQ ID NO: 57872 - DNA, 1407 bp, Staphylococcus epidermidis RP62A
  CDS (1)..(1407): transl_table=11
atggtagttggagatttcccaattgaaacagatactattgtaataggagcaggtccaggtggatatgtcgcagccattcgcgcggctcaattaggacaaaaggtaacaatcgttgagaaaggtaatttaggtggtgtatgcttaaacgttggttgtataccttcaaaagcattactacatgcttctcatcgctttgttgaagcgcaaaattcagaaaacttaggggtaattgctgaaagcgtttcgttaaactatcaaaaagttcaagaattcaagacttctgtagttaataaattaactggcggtgttgaaggacttttaaaaggtaacaaagtagagattgttagaggtgaagcttatttcgttgataacaatagtttacgtgtcatggacgaaaagagtgctcaaacttacaatttcaaacatgcgattatagctacaggttcaagaccaattgaaattccaaattttgaatttggtaaacgtgttatcgattcaacaggagctttaaatctacaagaagtacctaacaaactagttgtagttggtggcggatatatcggttctgaattaggtactgcttttgcaaactttggctctgaagttactatccttgaaggtgcaaaagatattttaggcggatttgaaaagcaaatgacacaacctgttaaaaaaggtatgaaagaaaaaggtatcgaaatcgttactgaagcaatggcaaaatctgcagaagaaactgaaaatggtgtcaaagtaacttatgaggcaaaaggtgaggaacaaactatcgaagctgattatgtattagttacagttggccgtcgccctaatactgatgaattaggattagaagaacttggtctgaaatttgctgatcgtggattactagaagtggacaaacaaagtcgtacttctattgaaaatatctttgcgattggagatattgtacctggattaccattagctcacaaagctagttatgaaggtaaagttgctgctgaagcgatagatggtcaagccgcagaggtagactatattggtatgccagcagtttgctttacagaaccagaattagcacaagttggttatactgaagctcaagcaaaagaagaaggtttatcaattaaagcttctaaattcccttatgcagctaatggacgagctttatcattagatgatacaaatggttttgttaagttaattacacttaaagaagatgatacgcttattggagcacaagttgtaggtactggcgcatctgatattatctctgaattaggtttagctattgagtcaggtatgaatgctgaagatatcgcattaactgtacatgcacacccaactttaggtgaaatgacaatggaagctgctgaaaaagcaattggttatccaattcatactatgtaa

SEQ ID NO: 57873 - protein, 468 aa, Staphylococcus epidermidis RP62A
MVVGDFPIETDTIVIGAGPGGYVAAIRAAQLGQKVTIVEKGNLGGVCLNVGCIPSKALLHASHRFVEAQNSENLGVIAESVSLNYQKVQEFKTSVVNKLTGGVEGLLKGNKVEIVRGEAYFVDNNSLRVMDEKSAQTYNFKHAIIATGSRPIEIPNFEFGKRVIDSTGALNLQEVPNKLVVVGGGYIGSELGTAFANFGSEVTILEGAKDILGGFEKQMTQPVKKGMKEKGIEIVTEAMAKSAEETENGVKVTYEAKGEEQTIEADYVLVTVGRRPNTDELGLEELGLKFADRGLLEVDKQSRTSIENIFAIGDIVPGLPLAHKASYEGKVAAEAIDGQAAEVDYIGMPAVCFTEPELAQVGYTEAQAKEEGLSIKASKFPYAANGRALSLDDTNGFVKLITLKEDDTLIGAQVVGTGASDIISELGLAIESGMNAEDIALTVHAHPTLGEMTMEAAEKAIGYPIHTM

SEQ ID NO: 57874 - DNA, 1455 bp, Pseudomonas fluorescens Pf-5
  CDS (1)..(1455): transl_table=11
atgagtgaaagttacgatgtgatcgttattggtgcgggtcccggcggctatgtcgccgccatccgggccgcgcaactggggctcaagacagtctgcatcgagcgctacaagggcaaggatggcaagaccgccctgggcgggacgtgcctgaacgttggctgcattccctccaaggcactgctggacagttcccaccactactacgaagcgcgcaacggattcgaagtgcacggcatcgccatcagcaatccgcagatggatgtgccggccatgctggcgcgcaaggacaacgtggtgcgcaatttcaacggcggcattgcctcgctgttcaaggccaatggcgtggcgctgctggaaggtcacggcaagctgctggccaacaaggaagtggaagtcaccgccgccgatggcagcacgcaacgcatcagcgccggcaatatcatcctggctccgggctcgcggccgatcgacattcccgcggcgcccctggccggcgaggtgatagtggactccaccggcgccctggaattcacccaggtgcccaagcgcctcggggtgatcggtgccggcgtcatcggcctggaactggggtcggtctgggcacgcctgggggctcaagtcacagtgctggaagccctcgacagcttcctcccggcggtggatgcgcagatcgccaaggaggcgcagaagatcctcggcaagcagggcctggatatccgcctgggcgcccgggtgacggcctgcgaagtgcagggcgacagcgtcaaggtcagcctcagtgaggccggcgaggacaagcagcaggtgttcgaccggctgatcgtcgccgtcggtcgccgcccgctgaccaccgatctgctggccgccgacagcggcgtgcacttggacgaacgcggttttatccacgtcgatggccagtgctgcaccagcgtccccggggtgttcgccattggcgacgtggtacgcggcccgatgctggcgcacaaggcttctgaagagggggtgatggtggccgaggggattgccgggcatcggcacccgttgaactacgacctgatcccctcggtaatctacacccacccggaaatcgcctgggtcggccagaccgagcaggccctcaaggccgagggcgtcgagttgaacatcggcaccttcccgttcgctgccagcagccgggccatggcggccaacgacaccgccgggctggtcaaggtgattgccgatgcaggcaccgaccgcgtgctgggcgtgcatgtgatcgggccgggcgcggcggagctggttcaggaaggggccatcggcatggagttcggcaccagtgccgaggacctggggatgatggtgttctcccatccgaccctgtccgaagccctgcatgaagccgcgctggccgtgaatggccaggcgatccatatcggcaatcgcaagaagaaagcccccgccggcgtcaaataa

SEQ ID NO: 57875 - protein, 484 aa, Pseudomonas fluorescens Pf-5
MSESYDVIVIGAGPGGYVAAIRAAQLGLKTVCIERYKGKDGKTALGGTCLNVGCIPSKALLDSSHHYYEARNGFEVHGIAISNPQMDVPAMLARKDNVVRNFNGGIASLFKANGVALLEGHGKLLANKEVEVTAADGSTQRISAGNIILAPGSRPIDIPAAPLAGEVIVDSTGALEFTQVPKRLGVIGAGVIGLELGSVWARLGAQVTVLEALDSFLPAVDAQIAKEAQKILGKQGLDIRLGARVTACEVQGDSVKVSLSEAGEDKQQVFDRLIVAVGRRPLTTDLLAADSGVHLDERGFIHVDGQCCTSVPGVFAIGDVVRGPMLAHKASEEGVMVAEGIAGHRHPLNYDLIPSVIYTHPEIAWVGQTEQALKAEGVELNIGTFPFAASSRAMAANDTAGLVKVIADAGTDRVLGVHVIGPGAAELVQEGAIGMEFGTSAEDLGMMVFSHPTLSEALHEAALAVNGQAIHIGNRKKKAPAGVK

SEQ ID NO: 57876 - DNA, 1380 bp, Thermobifida fusca YX
  CDS (1)..(1380): transl_table=11
gtgagtgaaagcggcggcacattcgatctcgtcatcctgggcggcggtagcggtggctactcggccgccatccgcgcctccgaactcggcatgcgtgtcgccctgattgagaaagacaagctcggcggcacctgcctgcactacggctgtattccgaccaaggccctgctgcacgcgggtgaggtcgccgacacggtgcgggccagcgagaagttcggtgtccgggcctcgttcgacacaatcgacatggcccgtgtccacgagtacaaggacaaggtcgtcagtggtctgcaccgcggcctgaccggtctgatcaaggcccgcggcatcaccctggtcgagggtgagggcaagctgaccggtgtcgacgaggtcacggtcaacggggtggcctacaagggtcggcacatcatcctggccaccgggtcccaggcgcgttcgctccctggtctggagatcgacggggagcggatcatcaccagctacgaggcgctccgcttggaccgggtccccaagtccgcgatcatcctgggcggcggtgtcatcggcgtcgagttcgccagcgtgtggcgttcgttcggcgccgaggtgacgattgtcgaggcgctgccgcacctggtcccggcggaggaggagtccagctccaagctgctggagcgggcgttccgcaagcgcgggatcaagttcgagctgggcagcccgtttgagagcgtgaagctcaccgagaccggggtgagcatgacgctggcgagcggcaagaccgtggaaggcgagctgctgctggtggcggtgggccgcggtccggtctcccaggggctgggctacgaggaggtcggcatccgcctggagcgcggcttcgtccaggtcgatgagaacctgcacaccggagtcggcaacatctacgcggtgggcgacttgatccccacgccgcagttggcgcacgtcggctttgccgagggtattttcgtcgccgagcacattgccgggctgaacccggtgaacatcgactacgacggtattccgcgggtcacctactccgacccggaggtggcgtccgtggggatcacctccaagaccgcggccgaacgcgggatcgagaccaccgagttcgtctacaacttggcgggcaacgggaagagccagatcctgcagacccagggcgcggtcaaggtcatcgcggccaaggacggcccggtgctgggtgtgcacatggtgggcagccgcgtcggcgagctgatcaccgagggccagctgatctacaactgggaggcgctgccgtctgaggtggcgcagctcatccacgcgcatccgacccagtccgaggcgttgggcgaggcccacttggcgctagcgggcaagccgttgcacgtccacgactga

SEQ ID NO: 57877 - protein, 459 aa, Thermobifida fusca YX
MSESGGTFDLVILGGGSGGYSAAIRASELGMRVALIEKDKLGGTCLHYGCIPTKALLHAGEVADTVRASEKFGVRASFDTIDMARVHEYKDKVVSGLHRGLTGLIKARGITLVEGEGKLTGVDEVTVNGVAYKGRHIILATGSQARSLPGLEIDGERIITSYEALRLDRVPKSAIILGGGVIGVEFASVWRSFGAEVTIVEALPHLVPAEEESSSKLLERAFRKRGIKFELGSPFESVKLTETGVSMTLASGKTVEGELLLVAVGRGPVSQGLGYEEVGIRLERGFVQVDENLHTGVGNIYAVGDLIPTPQLAHVGFAEGIFVAEHIAGLNPVNIDYDGIPRVTYSDPEVASVGITSKTAAERGIETTEFVYNLAGNGKSQILQTQGAVKVIAAKDGPVLGVHMVGSRVGELITEGQLIYNWEALPSEVAQLIHAHPTQSEALGEAHLALAGKPLHVHD

SEQ ID NO: 57878 - DNA, 1443 bp, Prochlorococcus marinus str. NATL2A
  CDS (1)..(1443): transl_table=11
gtgagtgaaatttcttttgactttgacttgattgttgtcggagctggatatggaggttttgatgcggctaaacatgcggcagaggctggcttgaaagtggcgattgtcgaatcaagagatatgggtgggacctgtgttaacagaggctgtgtcccctctaaagcattactagctgccagtggtaaagttcgtgagcttgcagatgttcctcatctttctgaatttgggatacattcggctccggttagatttgaacgtaaaaaaatagccgaacatgcaaaaaatttagtcgagacaattcgaaaaaatctaactaaaacattggaaagatctggagttgagatacttagaggagaaggacgtttagaaggcaatcaaaaggtcggtttaagagaaactaatggagttgatagaattttttctgctagagatattatcttagctacaggctcagacccttttgtaccgcctggaattgaaattgatggacgaactgtttttacaagtgatgaggctattaatttagaatggttgccaagatggattgcaataattggtagtggctatataggtttggaattcgctgatatttatacagctttaggttgtgaggtaaccatgattgaagcccttgataaagtaatgcctacttttgatccagatatcacgaaaattgcttcaagaaacctaattgataaaagagatattgaaactcgagctggtgtgtttgctactaaagttaagccaggttgtcctgtcgaggtcgagcttacagatgcaaagagtcgagaagtaattgaggagttgcaagttgacgctgttctggtcgcaacaggtcgagtaccgtcgactgaaaatctaaatctacaatccgttggagttgaaacaacgagaggttttattccaattgatgatcagatgagagtattggtaaatgaaaaaccggtttctaatctatgggcagtcggagatgttacgggtaagttgatgttggcccataccgctgcagcgcaagggagtattgctgtagaaaatattttaggaaaagcaatagaaattgactacagaagtattcctgcagcgacgtttactcaccctgagataagttccgttggactctcggaagaagaagcaaaagatctagcgaaaaacgaaggctttgaacttggaattgttagaagttattttaaagcgaactctaaggccttggctgaattagaaagtgatggaattatgaagttgatttttaataaagagacgggagaggtccttggggctcatatttatggattacatgcggctgatctcatacaagaggtttctaatgcaatttctagaagacaacgagttaatgacttagcaaaagaagttcatactcatccaacattaagcgaagttgtagaggttgcttataagcaggcatctttacaaataaagaagtag

SEQ ID NO: 57879 - protein, 480 aa, Prochlorococcus marinus str. NATL2A
MSEISFDFDLIVVGAGYGGFDAAKHAAEAGLKVAIVESRDMGGTCVNRGCVPSKALLAASGKVRELADVPHLSEFGIHSAPVRFERKKIAEHAKNLVETIRKNLTKTLERSGVEILRGEGRLEGNQKVGLRETNGVDRIFSARDIILATGSDPFVPPGIEIDGRTVFTSDEAINLEWLPRWIAIIGSGYIGLEFADIYTALGCEVTMIEALDKVMPTFDPDITKIASRNLIDKRDIETRAGVFATKVKPGCPVEVELTDAKSREVIEELQVDAVLVATGRVPSTENLNLQSVGVETTRGFIPIDDQMRVLVNEKPVSNLWAVGDVTGKLMLAHTAAAQGSIAVENILGKAIEIDYRSIPAATFTHPEISSVGLSEEEAKDLAKNEGFELGIVRSYFKANSKALAELESDGIMKLIFNKETGEVLGAHIYGLHAADLIQEVSNAISRRQRVNDLAKEVHTHPTLSEVVEVAYKQASLQIKK

SEQ ID NO: 57880 - DNA, 1425 bp, Ralstonia eutropha JMP134
  CDS (1)..(1425): transl_table=11
atgagcaaacaattcgacgtgctggtgatcggcgccggccccggcggctatatcgccgctatccgtgccggccagctcggcctgaacgtggcgtgctgcgaaggcaacgcctacgacgatcccaagaacgaaccgcgcctgggcggcacctgcctgaacgtgggttgcattccctcgaaggcgctgctggcttcttcggaagaattcgagaacgcccagcaccatctggccgaccacggcattaccgtgggcgacgtcaaggtcgacgtgtccaagatgctcaagcgcaaggacgacatcgtcggcaagatgaccaagggcatcgagttcctgttccgcaagaacaaggtgacgctgctcaagggctacggcaagttcgtcggcaagaccgccgagggcttccaggtcgaggtcgccggtgaagtcgtgaccgcaaagcaagtcatcatcgctactggttcgaaggctcgccatcttccgggtatcacggtcgacaacgacctggtcagcgataacgaaggcgcgctcaagttcccagcagtgccgaagaagctgggcgtgatcggcgccggcgtgatcggcctggagctgggctcggtgtggcgccgtctcggtgctgaagtgaccgtgctggaagcgctgcccgcattcctgggtgccgctgacgaaggcgtggccaaggaagcgcagaagcagctgaccaagcagggcctgaagttcagcctcggcgtgaaggttgacgaagtgacgaccggcaagagcggcgtgaccgtcaagtacaccgacaaggatggcgctgcccagacgctggaagtcgatcgcctgatcgtgtcggtcggccgcgtcccgaacaccgacaacctgggcctggaagctgtcggcctggccgctgatcagcgcggcttcatcgaagtcgacgatcactgcgccaccaaggtgccgggcctgtgggccatcggcgacgtggtgcgtggcccgatgctcgcccacaaggccgaggacgaaggcgtggctgtggccgagcgcatcgccggccagaagccgcacatcgactacaactgcattccgtgggtgatctacaccttcccggaaatcgcatgggtgggcaagaccgaagcacagctcaaggccgaaggccgcgagttcaaggctggccagttcccgttcatggccaatggccgtgcactcggcatgggtcatccggaaggcttcgtcaagatgctggccgatgccaagaccgacgagatcctgggcgtgcacatcgtcgccgccaacgcgtcggacctgatcgccgaggccgttgtggcgatggagttcaaggcggcgagcgaagatatcggccgcgtctgccatccgcacccgtcgatgtcggaagtcatgcgcgaagccgcgctggccgtcgacaagcgtcagctcaatatgtaa

SEQ ID NO: 57881 - protein, 474 aa, Ralstonia eutropha JMP134
MSKQFDVLVIGAGPGGYIAAIRAGQLGLNVACCEGNAYDDPKNEPRLGGTCLNVGCIPSKALLASSEEFENAQHHLADHGITVGDVKVDVSKMLKRKDDIVGKMTKGIEFLFRKNKVTLLKGYGKFVGKTAEGFQVEVAGEVVTAKQVIIATGSKARHLPGITVDNDLVSDNEGALKFPAVPKKLGVIGAGVIGLELGSVWRRLGAEVTVLEALPAFLGAADEGVAKEAQKQLTKQGLKFSLGVKVDEVTTGKSGVTVKYTDKDGAAQTLEVDRLIVSVGRVPNTDNLGLEAVGLAADQRGFIEVDDHCATKVPGLWAIGDVVRGPMLAHKAEDEGVAVAERIAGQKPHIDYNCIPWVIYTFPEIAWVGKTEAQLKAEGREFKAGQFPFMANGRALGMGHPEGFVKMLADAKTDEILGVHIVAANASDLIAEAVVAMEFKAASEDIGRVCHPHPSMSEVMREAALAVDKRQLNM

SEQ ID NO: 57882 - DNA, 1401 bp, Ehrlichia canis str. Jake
  CDS (1)..(1401): transl_table=11
atgcaaaattatgatattgtgattattggtggtgggcctggaggttataaatgtgcaattagagcatctcaacttggattaaaagttgcatgtatagataaaaataagattctaggcggtacttgtttaagagtaggttgtattccttctaaagcgttgttacatttttctcacgagtattatcatttgaaaaataatttatctgaagtcggtataacatttgataatttaaattttgacttaaataagattatgtcatttaaggataagaatattgctgagttaggaagtgggattagtcagttattttctagttataaaattgattatttatgtggtgctggaaaaataaaatctgtaggttctaatgattttattattgctataaatggggataatgctgagcagcagataacgagtaaaaatatagttattgctactgggtctgatgtatctagtttccctggtattactattgatgaagaaaatatagtatcttctactgcggctttatcttttaaagagccaccaaagagattagtggttataggagctggagctatagggttagaaatgtcatctgtatggagtagatttggttctgaagttactgttgttgaatttttagataaaattgctcctagtatggatggtgatattagtaaagctctactcacaagtttaaagaagcaatgtattaattttaaattgtctactaaagttgtttctatagataacaagggaagtaatttgactgtacatcttgaatctgtaaaagatggtaagtctgaagtaatagaagcagataaagttctagtatctattggacgtgttccatatactaaggggctgattgataataatttgatagaatgtgattctagaggttttattaaggtcaatagtagatatgagacaaatataccaggtatatttgctattggtgatgttattggtggagcaatgcttgcacataaggcagaagaagaaggtattgctgttgcagaattaatttctggtcatattccacatgtggattatgaaattattccatctgttatatatacacatcctgctgttgcatctattgggaagacagaagagagtttaaagaatgctaattatagctatagtgttggtaaatctaattttgctgcgaatggtagatcaaggattacaaataatgcagttgggtttgtaaaagtgttaacttctaaggtaaataatgctattttaggtgttcatattattggtacttatgctgatactatgattaatgaagctgctattgctatggcttatagagcatcttcagaagatgtatttcgtatttgtcattcacatccagacgttaatgaagcatttagagatgcatgtgaagcagcatttttaaatcattaa

SEQ ID NO: 57883 - protein, 466 aa, Ehrlichia canis str. Jake
MQNYDIVIIGGGPGGYKCAIRASQLGLKVACIDKNKILGGTCLRVGCIPSKALLHFSHEYYHLKNNLSEVGITFDNLNFDLNKIMSFKDKNIAELGSGISQLFSSYKIDYLCGAGKIKSVGSNDFIIAINGDNAEQQITSKNIVIATGSDVSSFPGITIDEENIVSSTAALSFKEPPKRLVVIGAGAIGLEMSSVWSRFGSEVTVVEFLDKIAPSMDGDISKALLTSLKKQCINFKLSTKVVSIDNKGSNLTVHLESVKDGKSEVIEADKVLVSIGRVPYTKGLIDNNLIECDSRGFIKVNSRYETNIPGIFAIGDVIGGAMLAHKAEEEGIAVAELISGHIPHVDYEIIPSVIYTHPAVASIGKTEESLKNANYSYSVGKSNFAANGRSRITNNAVGFVKVLTSKVNNAILGVHIIGTYADTMINEAAIAMAYRASSEDVFRICHSHPDVNEAFRDACEAAFLNH

SEQ ID NO: 57884 - DNA, 1428 bp, Anabaena variabilis ATCC 29413
  CDS (1)..(1428): transl_table=11
gtgagtcatgaatttgattacgatttagtcataataggcgctggtgtagggggacatggcgcagccctacacgcggtaagttgtggcttaaagacggcgattatcgaggcgggtgatatggggggaacctgtgtcaaccggggttgtattccatcgaaggcgctgttggctgcttctggacgtgtgcgggaattacgcgatgctcatcacctgaagtctctggggattcaaattggtaatgtggagtttgatcgtcaagcgatcgctaatcatgccaataatctcgtctccaaaattcaaggagatttaacaaatagcctgaaacgtctgggagtcgatatcatcaggggttggggcaaaatcgcggggacacaaaaagtcaccgtcacaggcgatggtggtgaaaaaaccatcaccgctagagatattatcctttcccctggttctgtccccttcgtacctccaggtattgaagtagatggcaaaaccgtattcaccagcgaccaaggcgtaaagttagaaaccttacctgaatgggtagccattattggtagtggttacattggtttagaattctcggatatttactcagctttgggctgtgaaatcaccttgattgaagccctcgaccagttaatgccaggatttgaccgcgatatcgccaaactcgcggaacgggtgctaattacaccccgcgatattgaaacaaaagttggtgtatatgccaaaaaagttattcctggttcgccagtagtaattgaattggcagatttcaaaaccaaggaagttgtcgatgtcatcgaggtagatgcttgcctagtagcaacaggacgcatcccagccaccaaaaacctgggtttagaatccattggtgtggaacttgaccgccgcaactttattcctgtagacgatcgcatggcagtgttatcagcaggtgaagtagtaccccatttgtgggcaattggtgatgccaacggcaaaatgatgctggcacacgcggcttcagcccaaggcattgtcgccgtggaaaatatcatcggtaaggaaagaacagtagactatcgcagcattcccgccgccgcatttacccatcccgaagttagctatgtcggcttaacagaaacaggcgctaaagaattaggccaagctgaaggttttgaaatcgccaccagcagaagttacttcaaaggcaattctaaagctttagccgaaaacgaagccgacggtatagccaaagtcatctaccgcaaagatacaggggaagttttaggcgtacatatctttggtttacacgcctccgacttaatccacgaagcatccgccgccgtagccaaccgtcaaaccgtccaaaccctagcccatttagtccacgcccacccaacattatccgaagtgttggatgaagcgtataaacgagctattgtttag

SEQ ID NO: 57885 - protein, 475 aa, Anabaena variabilis ATCC 29413
MSHEFDYDLVIIGAGVGGHGAALHAVSCGLKTAIIEAGDMGGTCVNRGCIPSKALLAASGRVRELRDAHHLKSLGIQIGNVEFDRQAIANHANNLVSKIQGDLTNSLKRLGVDIIRGWGKIAGTQKVTVTGDGGEKTITARDIILSPGSVPFVPPGIEVDGKTVFTSDQGVKLETLPEWVAIIGSGYIGLEFSDIYSALGCEITLIEALDQLMPGFDRDIAKLAERVLITPRDIETKVGVYAKKVIPGSPVVIELADFKTKEVVDVIEVDACLVATGRIPATKNLGLESIGVELDRRNFIPVDDRMAVLSAGEVVPHLWAIGDANGKMMLAHAASAQGIVAVENIIGKERTVDYRSIPAAAFTHPEVSYVGLTETGAKELGQAEGFEIATSRSYFKGNSKALAENEADGIAKVIYRKDTGEVLGVHIFGLHASDLIHEASAAVANRQTVQTLAHLVHAHPTLSEVLDEAYKRAIV

SEQ ID NO: 57886 - DNA, 1401 bp, Pseudomonas fluorescens PfO-1
  CDS (1)..(1401): transl_table=11
atgagcaactatgacgtggtgattctgggcggtggccccggcggttataacgcagcgatccgcgccggccagttgggcctcaaggccgcgtgcgtcgagggccgcgccacgctgggtggcacctgcctgaacgtcggctgcatgccgtccaaggcgcttttgcatgcgtcagagctctacgaagcggcgctgggcgcggagttcgccaacctcggcatcgaagtcaaacccacgctcaaccttgcgcaaatgatgaagcagaaagacgaaagcgtgagcggcctgaccaaaggcattgaattcctgttccgcaaaaacaaggtcgactggatcaagggctggggccacatcgacggccccggaaaagtcagcgtgaccggtgatcagggcagccgcatcgaactgacggccaaggacatcgtcatcgccaccggctccgaacccactcccctgcccggcgtggagatcgacaacaagcgcatcctcgactcgaccggtgcgctgtccttgagcgaagtgcccaagcatctggtggtgattggtgcgggcgtgatcggtctcgaactcggctcggtctggcgccggctcggcgcgcaggtaacggtggtggaatacttagaccgcatctgccccggcgtcgacggcgaagccggcaagactctgcaacgctcgctgagcaaacagggcatcagcttcaagctgagctcgaaagtgaccagcgccacttcatcggccaacggcgtacaactcagcgtggagcccgccgctggcggcagcgcggaaatccttgaagccgattacgtgctggtggccatcggtcgtcgtccgtacacccagggcctgggcctggaaaacgtcggcctgagcaccgacaaacgcggcatgctcgccaataaacagcatcgcactgaagcgcctggcgtgtgggtgatcggtgacgtgacctccgggccgatgctcgcgcacaaggccgaagacgaagccatggcctgcatcgaacagatcgtcggcaaggccggcgaggtcaattacgacctgattcccaacgtgatctacacccgccccgagctggccagcgtcggcaagaccgaagagcagctgaaggcggaaggccgggcgtacaaggtcggcaaattcccgttcaccgccaacagccgggcgaagatcaatcacgagaccgaaggcttcgccaaagtcatcgccgatgagcgcaccgacgaagtcctcggcgtgcacctggtcggcccgagcgtcagcgaaatgatcggcgagttctgcgtggccatggagttcagcgcctcggccgaggacatcgcgctgacctgtcacccgcatccaacccgctccgaagcgttgcgtcaggcagcgatgaatgtcgaggggatggcgacgcagatgtaa

SEQ ID NO: 57887 - protein, 466 aa, Pseudomonas fluorescens PfO-1
MSNYDVVILGGGPGGYNAAIRAGQLGLKAACVEGRATLGGTCLNVGCMPSKALLHASELYEAALGAEFANLGIEVKPTLNLAQMMKQKDESVSGLTKGIEFLFRKNKVDWIKGWGHIDGPGKVSVTGDQGSRIELTAKDIVIATGSEPTPLPGVEIDNKRILDSTGALSLSEVPKHLVVIGAGVIGLELGSVWRRLGAQVTVVEYLDRICPGVDGEAGKTLQRSLSKQGISFKLSSKVTSATSSANGVQLSVEPAAGGSAEILEADYVLVAIGRRPYTQGLGLENVGLSTDKRGMLANKQHRTEAPGVWVIGDVTSGPMLAHKAEDEAMACIEQIVGKAGEVNYDLIPNVIYTRPELASVGKTEEQLKAEGRAYKVGKFPFTANSRAKINHETEGFAKVIADERTDEVLGVHLVGPSVSEMIGEFCVAMEFSASAEDIALTCHPHPTRSEALRQAAMNVEGMATQM

SEQ ID NO: 57888 - DNA, 1431 bp, Burkholderia sp. 383
  CDS (1)..(1431): transl_table=11
atgtccaaggaatttgacgtcgtcgtgatcggcgccggccccggcggctacatcgccgcgatccgcgccgcgcagctcggcaagaccgttgcctgtatcgagaagtggaagaacccggccggcgcgctgaagcttggcggtacgtgcctgaacgtcggctgcattccgtcgaaggcgctgctcgcgtcgtcggaagagttcgagaacacgtcgcaccacctggccgaccacggcatcacggtcgacggcgtgaagatcgacgtcgcgaagatgctcggccgcaaggacgcgatcgtcgagaagatgacgagcgggatcgagttcctgttcaagaagaacaagatcacctggctgaagggccatggcaagttcaccggcaagaccgacgccggcgtgcagatcgaagtgagcggcgaaggtgaaaccgaagtcgtcaccgcgaagaacgtgatcattgcgacgggctcgaaggcgcgtcacctgccgggcatcccggtcgacaacaagatcgtgtcggacaacgaaggtgcactgacgttcgacgcggtgccgaagaagcttgccgtgatcggcgcaggcgtgatcggcctcgagctcggctcggtgtggcgtcgcctgggtgccgaagtgacggtgctcgaagcgctgccggccttcctcggcgcagctgacgaagcgctcgcgaaggaagcggccaagctgttcaagaagcagggcctcgacatcaacctcggcgtgcagatcggcgaagtgaaggcgaccgcgaacggcgtgtcgatcgcctacacggacaaggacggcaacgcgcagacgctcgacgccgaccgcctgatcgtgtcggtcggccgcgtgccgaacaccgacaacctcggcctcgaggctatcggcctgaaggcgaacgaacgcggcttcatcgacgtggacgaccactgccgcacggcggtgccgaacgtgtacgcgatcggcgacgtggtgcgtggcccgatgctcgcgcacaaggcggaagacgaaggcgtgctggtcgcggaagtgatcgatggccagaagccgcacatcgactacaactgcattccgtgggtgatctacacgtacccggaaatcgcatgggtcggcaagacggagcagcagctgaaggcggaaggccgcgagatcaagtcgggcaagttcccgttctcgatcaacggccgcgcgctcggcatgaacgcgccggacggcttcgtgaagatgatcgcggacgcgaagaccgacgaactgctcggcgtgcacgtgatcgcggcgaacgcgtcggacctgatcgcggaagccgtggtggcgatggaattcaaggcggcgtcggaagacatcgcccgcatctgccatccgcacccgtcgatgtcggaagtgatgcgcgaagcggcgctcgccgtcgacaagcgctcgctgaacagctga

SEQ ID NO: 57889 - protein, 476 aa, Burkholderia sp. 383
MSKEFDVVVIGAGPGGYIAAIRAAQLGKTVACIEKWKNPAGALKLGGTCLNVGCIPSKALLASSEEFENTSHHLADHGITVDGVKIDVAKMLGRKDAIVEKMTSGIEFLFKKNKITWLKGHGKFTGKTDAGVQIEVSGEGETEVVTAKNVIIATGSKARHLPGIPVDNKIVSDNEGALTFDAVPKKLAVIGAGVIGLELGSVWRRLGAEVTVLEALPAFLGAADEALAKEAAKLFKKQGLDINLGVQIGEVKATANGVSIAYTDKDGNAQTLDADRLIVSVGRVPNTDNLGLEAIGLKANERGFIDVDDHCRTAVPNVYAIGDVVRGPMLAHKAEDEGVLVAEVIDGQKPHIDYNCIPWVIYTYPEIAWVGKTEQQLKAEGREIKSGKFPFSINGRALGMNAPDGFVKMIADAKTDELLGVHVIAANASDLIAEAVVAMEFKAASEDIARICHPHPSMSEVMREAALAVDKRSLNS

SEQ ID NO: 57890 - DNA, 1434 bp, Geobacter metallireducens GS-15
  CDS (1)..(1434): transl_table=11
atgtctgaagagctttacgacctcattgtcatcggtgccggccctggcggctacgtggccgccatccgcgcggcccagctggggatgagcgtcgcggtggtggagaagcggtccgccctggggggggtctgcctcaacgaggggtgcattcccagcaaggcgctcctggattcctcggaactcttcgccctggccagggacaggttcgccggccacggcatagccatcgatccgccacggctcgacctggcccggatgatggcccgcaaggacgacgtggtgaagaagctgaccgacggcgtcgccttcctcttcaagaagaacaagattgcacgggtgcaggggacggcccggctcacgggcgagcgggacggagcccacggcgttgacgttgaaggcggggaccagggaccggggaccggggaccgggaaaagcagaccctcaggggaaagcgggtgcttctggcaacgggaagcgaggcggcggtgattccgttcatgccctttgacggtgaactggtggtgagcgcccgggaagccctctccttcgaccgggtgccggagcatctcctggtggtgggggcggggtacgtcggcctggagcttggctcggtctggcggcggctcggaagccaggttacggtggtggagatgctcccgaagatgcttcccaacaccgacggtcaggtggccgacaccctcatgggctccctgaagaagcaggggatcgtcttccggatggagaccaaggtgaccggctttgccaagcgtgacgggaaggcagcggtcaccgtggaagcggggggggccacggaggagatcgtctgcgaccgggtgctggtggcggcggggcggcgtcccctcacggcggggctcggcctggaggaattgggagtccggctggaggcgggacggatcgccgtggacgataactaccagacgtcccttcgggggatttacgccatcggcgacctgatccacggccccatgcttgcccacaaggccatggcggagggggaggtctttgccgagcggctcaccggccaggcgtcggtggtggactacgcctatatccctggtatcgtttatacgtggcccgaggcggccggcgtggggcggaccgaggaggagctgaaaacggagggggtcgagtaccgcgtcgggaagttccccttcatggccaacggccgcgccaagtgcatggacgagaccgaagggttcgtgaagatcctcgccacccccgacaccggccgggtcctcggcatccacgtcatcggcccccgggcctcggatgtcatcgccgaggcggttaccgtcatgacctacggcggcagcgccgccgacatcgccatgaccttccacgcccacccgaccctggccgaggccatgaaggaggcggccctggatgtggagaaacgggcgatacatgcgtga

SEQ ID NO: 57891 - protein, 477 aa, Geobacter metallireducens GS-15
MSEELYDLIVIGAGPGGYVAAIRAAQLGMSVAVVEKRSALGGVCLNEGCIPSKALLDSSELFALARDRFAGHGIAIDPPRLDLARMMARKDDVVKKLTDGVAFLFKKNKIARVQGTARLTGERDGAHGVDVEGGDQGPGTGDREKQTLRGKRVLLATGSEAAVIPFMPFDGELVVSAREALSFDRVPEHLLVVGAGYVGLELGSVWRRLGSQVTVVEMLPKMLPNTDGQVADTLMGSLKKQGIVFRMETKVTGFAKRDGKAAVTVEAGGATEEIVCDRVLVAAGRRPLTAGLGLEELGVRLEAGRIAVDDNYQTSLRGIYAIGDLIHGPMLAHKAMAEGEVFAERLTGQASVVDYAYIPGIVYTWPEAAGVGRTEEELKTEGVEYRVGKFPFMANGRAKCMDETEGFVKILATPDTGRVLGIHVIGPRASDVIAEAVTVMTYGGSAADIAMTFHAHPTLAEAMKEAALDVEKRAIHA

SEQ ID NO: 57892 - DNA, 1440 bp, Prochlorococcus marinus str. MIT 9312
  CDS (1)..(1440): transl_table=11
gtgactgattcaagttttgattttgatttaatcgtaataggagcaggatatggaggttttgatgccgctaaacatgctgctggtaagggactgaaagtcgcaatagtagaatcttctgacatgggaggcacttgtgttaacaaggggtgtgtcccctctaaagctcttttggctgcaagtggaaaagtcagagaaattgctgattatgaacatttagcaaaatttggtattcatgcttccccagtaaggtttgaaagatcaaaaattgcagatcatgcaaataatttagttttaaatgttagagaaaatttaacaaaaactctcaaaaggagtggagttgaaattattttgggcattggcagaattgaaggaaatcaaaaagtaggtgtaagagataaaaacggaattgataaaatcttcacatgtaagaatattgttatagcaactggttcttctccttttgttcctcgtggaataactttggataataggactgtatttactagtgatgatgctgttaaacttgagtggcttccaagatggatagctattattggaagcggatatataggattggaatttgctgatgtttatactgcgctaggttgtgaagttaccatgattgaggctttggaaaatattatgccaacatttgatccagacattacaaaaattgctaagaagaatcttattcaagctagagatatagacacaaaatcaaatgtctttgctacaaaaataacacctggatgtcctgtgaaaatagaactgacagatgcaaaatctaaagaagttgtagaaactttagaagttgatgccgtattagttgcaactggcagaagtcctaatagtaataacttaaatcttgagtcggctgggatagaaacagtaaaaggtttcattcctatagatgatcaaatgagggttaagaatggtgatgaaataatacctaacatttgggctgttggagatgtaacaggcaaactaatgcttgcccatacagctgcagcgcaaggtactattgctgttgataatatttgcggtggtaacgtcgaaattaactataaaagtatccctgcagcaacctttactcatcctgaaataagttcagttggtctctctgaagcagaagctaaagagatatctgcaaaagaaaattttactttgggagttgtcaaaagtttctttaaggctaattcaaaagcattggctgaattggagagtgatggattgctaaagttgattttcaataaagataatgggaaagtattaggtgctcatatttttgggttacatgcagctgatttaattcaagaaatttcgaacgctatttcaaggaaccaagatgtaattgaattatctacagaagttcatactcatcccactcttagtgaagtggttgaggtcgcatataaacaagcggcttctcaaataaaataa

SEQ ID NO: 57893 - protein, 479 aa, Prochlorococcus marinus str. MIT 9312
MTDSSFDFDLIVIGAGYGGFDAAKHAAGKGLKVAIVESSDMGGTCVNKGCVPSKALLAASGKVREIADYEHLAKFGIHASPVRFERSKIADHANNLVLNVRENLTKTLKRSGVEIILGIGRIEGNQKVGVRDKNGIDKIFTCKNIVIATGSSPFVPRGITLDNRTVFTSDDAVKLEWLPRWIAIIGSGYIGLEFADVYTALGCEVTMIEALENIMPTFDPDITKIAKKNLIQARDIDTKSNVFATKITPGCPVKIELTDAKSKEVVETLEVDAVLVATGRSPNSNNLNLESAGIETVKGFIPIDDQMRVKNGDEIIPNIWAVGDVTGKLMLAHTAAAQGTIAVDNICGGNVEINYKSIPAATFTHPEISSVGLSEAEAKEISAKENFTLGVVKSFFKANSKALAELESDGLLKLIFNKDNGKVLGAHIFGLHAADLIQEISNAISRNQDVIELSTEVHTHPTLSEVVEVAYKQAASQIK

SEQ ID NO: 57894 - DNA, 1401 bp, Rhodospirillum rubrum ATCC 11170
  CDS (1)..(1401): transl_table=11
atgaccgagacttccttcgatgtggtcgttctgggcgccggacccggcggctatgtcgccgccatccgcgccgcccagcttggcctgaaaacggcggtggtcgagcgcgagcacctgggcggcatctgcctgaactggggctgcattccgaccaaggcgctgttgcgcagcgccgaggtcttccgccagatccgccatgccggcgcctatggcttaaaggtgacgggggccgaggtcgatgtggccgccgtggtcaagcgctcgcgcggggtggccaaacaattggccggcggcgtcggccatcttctcaagaagaacaaggtcacggtgatcgatggccacggccggctggccggcgcgggcaagctgaccgtcgaaaaggacggcaagacgacgaccctggcggccaaggcgatcattttggccacgggggggcgggcgcgaaccctgcccgggctcgaggccgacggcaagctggtctggacctataagaacgccatgatccccgagtccctgcccaagcgcctgctggtggtcggctcgggggccatcggcatcgaattcgccagcttctacaccgattgcggctcgcaagtgacggtggtcgaggtgttggagcgggtgctgccggtcgaagacgaggagatcagcgccttcgccaaaaaatcctttgaaaagcaggggatgaccatcaagaccgccaccacggtcaaagccttgaaaaaatccggcgatgaggtgacggcgaccctggagaaggacggcaagaccgaggagatcaccgtcgatcgggtgatcatggccgttggcatcgccgccaatatcgaagatatcggcctggaaaccgtgccgtcgatcaaggtcgagcgcggccatgtggtgaccgacgccttctgtcgcaccggcgaccccggaatcttcgccatcggcgatttgaccgctccgccctggctcgcccataaggccagccacgagggcgtgctggtcgccgaggtgatcgccggcaagaaggaccttcatccccttgataccatgaagattcccggctgcacctattgccatccccaggtggcgagcatcgggctgagcgaggccaaggccaaggccaagggctttacggtcaaggtcggacgcttccccttcgtcggcaacggcaaggctatcgcccttggcgaagccgagggattgatcaagacggtgttcgatgcgcggacgggcgaattgctgggcgcccatatgatcggcgccgaggtgaccgagctgattcagggcttcgccatcgccaaaaccctggagaccaccgaggaagatttgatccacaccgtcttcgcccatccgaccctctcggagatggtgcatgaatccgtgcttgacgcttacggtcgcgccatccatttctag

SEQ ID NO: 57895 - protein, 466 aa, Rhodospirillum rubrum ATCC 11170
MTETSFDVVVLGAGPGGYVAAIRAAQLGLKTAVVEREHLGGICLNWGCIPTKALLRSAEVFRQIRHAGAYGLKVTGAEVDVAAVVKRSRGVAKQLAGGVGHLLKKNKVTVIDGHGRLAGAGKLTVEKDGKTTTLAAKAIILATGGRARTLPGLEADGKLVWTYKNAMIPESLPKRLLVVGSGAIGIEFASFYTDCGSQVTVVEVLERVLPVEDEEISAFAKKSFEKQGMTIKTATTVKALKKSGDEVTATLEKDGKTEEITVDRVIMAVGIAANIEDIGLETVPSIKVERGHVVTDAFCRTGDPGIFAIGDLTAPPWLAHKASHEGVLVAEVIAGKKDLHPLDTMKIPGCTYCHPQVASIGLSEAKAKAKGFTVKVGRFPFVGNGKAIALGEAEGLIKTVFDARTGELLGAHMIGAEVTELIQGFAIAKTLETTEEDLIHTVFAHPTLSEMVHESVLDAYGRAIHF

SEQ ID NO: 57896 - DNA, 1380 bp, Moorella thermoacetica ATCC 39073
  CDS (1)..(1380): transl_table=11
atgagttaccagatagccatcatcggcggtggccccggcggttacgtggcggccatccgggcagcccagctgggggcgaaggtagtcgtaatcgaacaggacgccctgggcggcacctgcctcaaccgcggctgcatccccaccaaagccctgctggccggggcggccatggtcaggggcatcaaaggggcggctgcttttggcatagatgtagaggattaccgggtagattatgcccgcctggcggcgcgtaaggacgccgtggtcaagcagcttaccgggggcatcgcctacttatttaagaaaaacaaggtcgacctcataaaagggcggggctttcttaaaggtcctggccagatcgaagtggctacggccgatggcacgatagaaaacctccaggccgaaaacatcatcctggccaccgggtcggagccggccctgattaaggccctgggatataacggccgcaccgtggtcaccagcaccgaggccctggcctggacggaggtgccggccgagctcctgattatcggcggcggggtcatcggctgcgagtttgccaccctctttgccactctggggagcaaggtcaccatcgtcgaaatgatgcccgccatcttacccatgatcgacagtgagatctccaggcgcttcagtatgctcctcaaaaagaccggggtggaaataaagacaaaggcccagataacagaagtcaaggaagccggcggccgggtccaggccacccttgccgacggccagactataaacgccgataaggttcttatctccatcggccgccagttcaatacccggggcttaggcctggaagatgccggcataaccctgggtcccaagggtgaaatcgtagttgacgaatacctgcggaccagcgtccccggcatctacgccatcggcgacgtgaccaacaagatccagctggcccacgtagcttcggcccagggcctggcggcggtgacaaccatcatgggccggccgacgaaggtgaactacgacgccgtacctagctgcatctacaccctgccggagatagccggcgtcggcctgactaaagaggcggccgaagggcggggcatgaaggttagggtcggcaaattccccttccaggccagcggcaaggccctctgcagcggcgagactgacggcatggtcaagataatcgccgaggcagagagcgaccgggtggttggggtcttcatcatgggtccccacgccacggaactcattgccgagggtgccctggcagtcaataaaggaataacggccggcgaactggcggcgaccattcacgcccatcccaccctgtccgaggccgttatggaggccgcggaggccgtacacgggcttagtatccattcatag

SEQ ID NO: 57897 - protein, 459 aa, Moorella thermoacetica ATCC 39073
MSYQIAIIGGGPGGYVAAIRAAQLGAKVVVIEQDALGGTCLNRGCIPTKALLAGAAMVRGIKGAAAFGIDVEDYRVDYARLAARKDAVVKQLTGGIAYLFKKNKVDLIKGRGFLKGPGQIEVATADGTIENLQAENIILATGSEPALIKALGYNGRTVVTSTEALAWTEVPAELLIIGGGVIGCEFATLFATLGSKVTIVEMMPAILPMIDSEISRRFSMLLKKTGVEIKTKAQITEVKEAGGRVQATLADGQTINADKVLISIGRQFNTRGLGLEDAGITLGPKGEIVVDEYLRTSVPGIYAIGDVTNKIQLAHVASAQGLAAVTTIMGRPTKVNYDAVPSCIYTLPEIAGVGLTKEAAEGRGMKVRVGKFPFQASGKALCSGETDGMVKIIAEAESDRVVGVFIMGPHATELIAEGALAVNKGITAGELAATIHAHPTLSEAVMEAAEAVHGLSIHS

SEQ ID NO: 57898 - DNA, 1431 bp, Burkholderia thailandensis E264
  CDS (1)..(1431): transl_table=11
atgtcgaaggaatttgacgtcgtcgtgatcggtgcgggcccgggcggctatatcgccgcgatccgcgccgctcaactgggcaaaacggttgcctgcatcgaaaaatggaagaacgcggccggcgcgctgaagctgggcggcacgtgcctgaacgtcggctgcatcccgtcgaaggcgctgctcgcgtcgtcggaggagttcgagaacgcgcagcaccatctcgccgaccacggcatcagcgtcgacggcgtgaagatggacgtcgcgaagatgctcgcgcgcaaggacgggatcgtcgagaagatgacgggcgggatcgagttcctgttcaagaagaacaagatcacgtggctcaagggccacggcaagttcgccggcaagaccgacgccggcgtgcagatcgaggtgagcggcgagggcgagacggaagtcgtcaccgcgaagaacgtgatcatcgcgacgggctcgaaggcgcgtcacctgccgaacgtgccggtcgacaacaagatcgtcgcggacaacgaaggcgcgctgacgttcgactcggtgccgaagaagctcgccgtgatcggcgcgggcgtgatcggcctcgagctcggctcggtgtggcgccgtctcggcgccgaagtgacggtgctcgaagcgctgccggcgttcctcggcgcggccgacgaggcgctcgcgaaggaagcggcgaagctgttcaagaagcagggcctcgacatccacctcggcgtgaagatcggcgaagtgaagacgagcgcgaacggcgtgtcgatcgcttacaccgacaaggacggcaacgcgaagacgctcgacgccgaccgcctgatcgtgtcggtcggccgcgtgccgaacaccgacaacctcggcctcgaggcgatcggcctgaaggtgaacgagcgcggcttcatcgacgtcgacgaccactgccgcaccgcggtgccgaacgtgtacgcgatcggcgatgtggtgcgcggcccgatgctcgcgcacaaggcggaagacgagggcgtgctggttgcggaagtgatcgacggccagaagccgcatatcgactacaactgcattccgtgggtgatctacacgtacccggaaatcgcgtgggtcggcaagacggagcagcagttgaaggccgagggccgcgagatcaagtcgggcaagttcccgttctcgatcaacggccgcgcgctcggcatgaacgcgccggacggcttcgtgaagatgatcgcggatgcgaagaccgacgagctgctcggcgtgcacgtgatcggcgcgaacgcgtcggacctgatcgccgaagccgtcgtcgcgatggagttcaaggcggcgtcggaagacatcgcccgcatctgccatccgcacccgtcgatgtccgaagtgatgcgcgaagcggcgctcgccgtcgacaagcgctcgctcaacagctaa

SEQ ID NO: 57899 - protein, 476 aa, Burkholderia thailandensis E264
MSKEFDVVVIGAGPGGYIAAIRAAQLGKTVACIEKWKNAAGALKLGGTCLNVGCIPSKALLASSEEFENAQHHLADHGISVDGVKMDVAKMLARKDGIVEKMTGGIEFLFKKNKITWLKGHGKFAGKTDAGVQIEVSGEGETEVVTAKNVIIATGSKARHLPNVPVDNKIVADNEGALTFDSVPKKLAVIGAGVIGLELGSVWRRLGAEVTVLEALPAFLGAADEALAKEAAKLFKKQGLDIHLGVKIGEVKTSANGVSIAYTDKDGNAKTLDADRLIVSVGRVPNTDNLGLEAIGLKVNERGFIDVDDHCRTAVPNVYAIGDVVRGPMLAHKAEDEGVLVAEVIDGQKPHIDYNCIPWVIYTYPEIAWVGKTEQQLKAEGREIKSGKFPFSINGRALGMNAPDGFVKMIADAKTDELLGVHVIGANASDLIAEAVVAMEFKAASEDIARICHPHPSMSEVMREAALAVDKRSLNS

SEQ ID NO: 57900 - DNA, 1455 bp, Saccharophagus degradans 2-40
  CDS (1)..(1455): transl_table=11
atgtccaacaaatatgacgttatcgttattggttctggtcctgcgggctacgtggcagctattcgctgtgcgcaattgggtttgaaaacagcctgtattgaaaaatggaaagataaagacggcaagggtgtgaacggcggtacttgtctaaacgtaggttgtataccttcaaaagcgttgttggatagctctcatcgctacgaagatgcgcacaaaggttttgcatctcacggtattaaagcgcctaacgttgaaattgacgtgccttcaatgattgcacgtaaagataaaattgttaagcagatgtctggcggtattactggtttgttccaagctaacaaagttacttctttgtacggaacaggtaaattacttgctggccgcaaagtgcaatacgttgcattagacggtaaagaagaagtgttagaagcagagaacgtaattcttgcttctggttctatccctgtaaacattcctgttgcaccagcagatggcgatgtaattgttgattcaactggcgcattggaattccaagctgtacctgagcgtttaggtgtaattggtgctggtgtaattggtcttgagctaggtagtgtttggggtcgtttgggctctaaagtggtttgtttagaagccatggatagtttcttggctatgatggatcagcagattgctaccgaagcgaagaaaattttggttaaacaaggtttagatatccgtctaagctgtcgtgtaactggcaccgaagttgtagaagctaagggcaaaaaagaagttatcgttacttacaccgataaagacggcaacgaagcgaaagaaactttcgataagttgattgtttgtgttggtcgtcgtccgttcactgacggcttgttgtctgaagacagcggcgttaagttggatgagcgcggttctatttacgttaacgatttgtgctctactagcgcgccaggcgtttgggctgttggtgacgttgtacgtggcccaatgttggctcacaaaggttctgaagaaggtgtgatggttgcagagcgcattgctggccaaaaaaccgtaatgaactacgacattattcctaacgtaatttatacccacccagaaattgcttcagttggtaaaactgaagagcaattaaaagcagatggcgaagcttacgaagtaggtactttcccattcttggcaattggtcgcgctgttgcagccgattgcgcagaaggtatggttaaaatgattgctcacgctgataccgatcgcgtattgggttgtcacattgttggcccgaacgcggcagaccttgtacagcaagtagcaattgctatggagtttggcgctacatcagaagatattggtatgactgtattcggtcacccaactttctctgaagctgttaaagaagctgcgttagcggtacatggtcatgctatccacatgcctaaccgtaaaaaacgcaagtag

SEQ ID NO: 57901 - protein, 484 aa, Saccharophagus degradans 2-40
MSNKYDVIVIGSGPAGYVAAIRCAQLGLKTACIEKWKDKDGKGVNGGTCLNVGCIPSKALLDSSHRYEDAHKGFASHGIKAPNVEIDVPSMIARKDKIVKQMSGGITGLFQANKVTSLYGTGKLLAGRKVQYVALDGKEEVLEAENVILASGSIPVNIPVAPADGDVIVDSTGALEFQAVPERLGVIGAGVIGLELGSVWGRLGSKVVCLEAMDSFLAMMDQQIATEAKKILVKQGLDIRLSCRVTGTEVVEAKGKKEVIVTYTDKDGNEAKETFDKLIVCVGRRPFTDGLLSEDSGVKLDERGSIYVNDLCSTSAPGVWAVGDVVRGPMLAHKGSEEGVMVAERIAGQKTVMNYDIIPNVIYTHPEIASVGKTEEQLKADGEAYEVGTFPFLAIGRAVAADCAEGMVKMIAHADTDRVLGCHIVGPNAADLVQQVAIAMEFGATSEDIGMTVFGHPTFSEAVKEAALAVHGHAIHMPNRKKRK

SEQ ID NO: 57902 - DNA, 1425 bp, Ralstonia metallidurans CH34
  CDS (1)..(1425): transl_table=11
atgagcaaacaattcgacgtgctggtgatcggcgccggccccggcggctatatcgccgccatccgcgctgcccagttgggcctgaacgtggcttgcctggaaggcaacgcctatgacgatccgaagggcgaagcacgcctgggcggtacctgcctgaacgtgggctgcattccgtccaaggcactgctggcttcctcggaagagttcgagaacgcctcgcatcacctggccgaccatggcatcaccgtgggcgacgtcaaggtcgacgtggccaagatgctcaagcgcaaggacgacatcgtcagcaagatgacgaagggcatcgagttcctgttccgcaagaacaaggtgaccctgttcaagggctacggcaagttcaccggcaaggctgcagaaggcttccaggtggaagtgaatggcgagacgctgaccgccaagcaggtcatcatcgccacgggctcgaaggctcgccatctgccaggcgtcgctgtcgacaacaacctgatcagcgataacgaaggcgcgctgaagttcggtaccgtgccgaagaagctgggcgtgatcggcgccggcgtgatcggcctggagctgggctcggtgtggcgccgtctgggtgccgaagtgaccgtgctggaagcgctgcccgcattcctgggcgccgccgacgaaggcgtggccaaggaagcgcagaagctgctgaccaagcaggggctgcagttccacctgagcgtcaaggtcgacgaagtgaagaccggcaaggacaacgtcacggtcaactacaccgacaaggacggcaaggcgcagacgctggaagtcgatcgcctgatcgtgtcggtgggccgcgtgccgaacaccgacaacctcggcctggacgccgtgggcctgggcgtggaccagcgtggcttcatcgaggtggacgaccactgccagaccaaggtgccgggcatctgggcaatcggcgacgtggtgcgtggcccgatgctggcccacaaggcagaagacgaaggcgtggccgtggccgaacgtatcgttggccagaagccgcatatcgacttcaacacggttccctgggttatctacacgttcccggaaatcgcgtgggtcggcaagaccgagcagcaactcaaggccgaaggccgcgagtacaagtcgggccaattcccgttcatggccaatggccgtgcgctgggcatgggtgcttcggacggtttcgtgaagatgctggccgatgccaggaccgacgagatcctgggcgtgcacatcgtggccgcgaatgcatcggacctgatcgccgaagccgtggtggcgatggagttcaaggctgcgagcgaagatatcggtcgcgtctgccacccgcacccgtcgatgtcggaagtcatgcgcgaagccgcgctggccgtcgacaagcgtcagctcaacatgtaa

SEQ ID NO: 57903 - protein, 474 aa, Ralstonia metallidurans CH34
MSKQFDVLVIGAGPGGYIAAIRAAQLGLNVACLEGNAYDDPKGEARLGGTCLNVGCIPSKALLASSEEFENASHHLADHGITVGDVKVDVAKMLKRKDDIVSKMTKGIEFLFRKNKVTLFKGYGKFTGKAAEGFQVEVNGETLTAKQVIIATGSKARHLPGVAVDNNLISDNEGALKFGTVPKKLGVIGAGVIGLELGSVWRRLGAEVTVLEALPAFLGAADEGVAKEAQKLLTKQGLQFHLSVKVDEVKTGKDNVTVNYTDKDGKAQTLEVDRLIVSVGRVPNTDNLGLDAVGLGVDQRGFIEVDDHCQTKVPGIWAIGDVVRGPMLAHKAEDEGVAVAERIVGQKPHIDFNTVPWVIYTFPEIAWVGKTEQQLKAEGREYKSGQFPFMANGRALGMGASDGFVKMLADARTDEILGVHIVAANASDLIAEAVVAMEFKAASEDIGRVCHPHPSMSEVMREAALAVDKRQLNM

SEQ ID NO: 57904 - DNA, 1797 bp, Ralstonia metallidurans CH34
  CDS (1)..(1797): transl_table=11
atggccgcgatcgaagtgaaggtgccgcagttgtccgaatctgtctcggaagccacgctgatgcagtggaagaagcaagccggcgaggccgtcaaacgcgacgagatcctggtggaactggaaaccgacaaggtcacgctggaggtgccgagtccggccgacggcgtactggcaaagatcgtccagcccgatggcgccacggtccatacggacgacgtgatcgcggtggtcgacaccgaggggaaagcggtcgcagcagcctcacccgtggccgctgcagcgccggcatccgccccagcgcccgcaccggcccctgccccggtagccgccgtggcatcaggtggcgctggtgccccggcatcggccaaggccgacttcgacgtgatcgtgatcggctccggcccgggtggatatatcgccgccatccgtgcggcccagctaggcaagacggtagcctgcatcgaggaatggaaagacgacgctggcaagccacggctcggcggtacctgcctgaacgtcggctgcattccaagcaaggcgctgctcgcctcgtccgagtacttcgagcaagcgaagcatgggctggccgaacatggtgtgcaggtcaagggcgtcacacttgatctggcgcagatgatccagcgcaaggctgcaatcgtcgacaagttcaccggtggcgtggagttcctgtttcgcaagaacaaggtcacctggatcaagggccatggcaagttcaaggggcgggccgcggatggcgtgattaccgtggaggccagcaacggcggcgagacgacgtcgcatacggcacgcaacgtcatcatcgcaacgggttcgaaggcccgccatctttcgggcgtgccggtcgacaacaaaatcgtctccgacaacgagggcgcgctgtccttcgattcggtgccgaaaaaactcgcagtgatcggcgccggggtgatcggtctcgaactcggctcggtatggcgacggctcgggtccgaagtcacgctgctggaagccctgcccacattcctcggcgcgcttgacgaagccgtggccagggaagccgccaaacagttcggcaagcaggggctcacgattcaccttggtgtcgacatcggcaatatcgaagccaccgccaagggcgtcagcatcgcctacaaggacaaggacggcgccgaacagaagctcgtcgcggaccggttgatcgtgtcgatcgggcgcgtgccgaacaccgacaatctgggtctggatgccgtgggcctggccgccgacgcgcgtggcttcatccccgtggacgaccagtgccgcaccccggtggcgggcatctacgctatcggcgatgtcgtgcgcggcccgatgctcgcccacaaggccgaggacgaaggcgtcatggccgccgaggtcatcgacggccagaagccacacatcgactacaactgcattccgtgggtgatctacaccgagcccgaaatcgcctgggtgggcaagtcagaagcccagttgaaggcggaaggccgcgagttccgttccggccagttcccaatgatggcaaacggccgcgcgcttgggatcggacatccggatggcttcatcaagatgatcgcggacgcaaagaccgacgaaatcctgggcgtgcacatcatctccgccaatgcctcggatctgatcgccgaggccgtggtcgccatggagttcaaggcggcatcggaggacatcggcatgatctgccacccgcacccatcactgtccgaggtcatgcgcgaggctgcgctggcggtgcgaaagcgggcgctcaatatgtag

SEQ ID NO: 57905 - protein, 598 aa, Ralstonia metallidurans CH34
MAAIEVKVPQLSESVSEATLMQWKKQAGEAVKRDEILVELETDKVTLEVPSPADGVLAKIVQPDGATVHTDDVIAVVDTEGKAVAAASPVAAAAPASAPAPAPAPAPVAAVASGGAGAPASAKADFDVIVIGSGPGGYIAAIRAAQLGKTVACIEEWKDDAGKPRLGGTCLNVGCIPSKALLASSEYFEQAKHGLAEHGVQVKGVTLDLAQMIQRKAAIVDKFTGGVEFLFRKNKVTWIKGHGKFKGRAADGVITVEASNGGETTSHTARNVIIATGSKARHLSGVPVDNKIVSDNEGALSFDSVPKKLAVIGAGVIGLELGSVWRRLGSEVTLLEALPTFLGALDEAVAREAAKQFGKQGLTIHLGVDIGNIEATAKGVSIAYKDKDGAEQKLVADRLIVSIGRVPNTDNLGLDAVGLAADARGFIPVDDQCRTPVAGIYAIGDVVRGPMLAHKAEDEGVMAAEVIDGQKPHIDYNCIPWVIYTEPEIAWVGKSEAQLKAEGREFRSGQFPMMANGRALGIGHPDGFIKMIADAKTDEILGVHIISANASDLIAEAVVAMEFKAASEDIGMICHPHPSLSEVMREAALAVRKRALNM

SEQ ID NO: 57906 - DNA, 1416 bp, Acidobacteria bacterium Ellin345
  CDS (1)..(1416): transl_table=11
ttgccagacacaatttatgacgttgtcatcatcggcagcggcccggccggttatacggccgcgatccgcgccggccaatttggactgaaaactgccctcatcgaaaaggacgcgaagcttggcggcacttgcctgcacgtcgggtgcatcccgaccaagtcgctgctcttcaatgccgagatttacgaccacattaaggaagccgaggagttcggcatcgaaggtttaggaactccgaaactgaactggagcaaagtccaggagcgtaagcaggccattatcgacaagcatgccaagggcctgcagttcctgatgaaaaagaacaaggtcacggtgatcccgggcttcggacgtcttaccggcccggcgaagggcggcattcatagcgtcgaagtggaagccgacggcaagaagcagaacgtgcaggcgaagaatgtgctgctctctacgggatcggtagcgcgcatgttgcccggcttgcaggcggacgaccgtatcctcaccaacatcgagatcctctcgctgaaagagattccgaagtcgctcgtcgtcataggctcgggcgcagtgggcgtggagtttgcctcgatctacaaatcgtttggcaccgactgcacgatcatcgagatgttgccgcggctcgttccggtggaagacgaagaagtctcgaaggaattgctgcgtaactacaagaagcgtggcatcaactgccacgtgaacgccaagaccgacaagttcgagaagacaaagactggtgtaaaggtcacgttcactgtcgacggaaagcaagaatccatcgaggccgagaagtgtttggtcgcgatcggccgcgcaccgcgcaccgagggcgtcggcatcgaaaagaccaacatcaagctcgaacgcggctttgtgccggtgaacgagtggatgcagaccacggaaccgggcgtttacgcgatcggcgatatcgtgctcggcctccaacaacttgctcacgcgggtgcgatggaaggcatggtcgcggtggcacacatcgccggcaaaccgaccaagccggtgcgaaaagaccgcgtgcccggcgcgacctactgccatcctgagatcggcagcgtcggcctcactgaggcgcaggcgaaggaagccggccacgaagtgaagatcggcaaattccccttcactgccaactcgcgcgcctcgatcgtgaaccagcacgagggcttcgtgaaggtcgtcgccgacgccaagcacggcgagattctcggcgtacacatcatcggaccgcaagctacggaactcgtcgccgaagcggttgccatgctcgaattggaagccacggccgatttcatgatgaccgtgatccacgcccatccaacgctagcggaagccatgctggatgcggtgagcgcggtgtatgggatggcgatcaacgcctaa

SEQ ID NO: 57907 - protein, 471 aa, Acidobacteria bacterium Ellin345
MPDTIYDVVIIGSGPAGYTAAIRAGQFGLKTALIEKDAKLGGTCLHVGCIPTKSLLFNAEIYDHIKEAEEFGIEGLGTPKLNWSKVQERKQAIIDKHAKGLQFLMKKNKVTVIPGFGRLTGPAKGGIHSVEVEADGKKQNVQAKNVLLSTGSVARMLPGLQADDRILTNIEILSLKEIPKSLVVIGSGAVGVEFASIYKSFGTDCTIIEMLPRLVPVEDEEVSKELLRNYKKRGINCHVNAKTDKFEKTKTGVKVTFTVDGKQESIEAEKCLVAIGRAPRTEGVGIEKTNIKLERGFVPVNEWMQTTEPGVYAIGDIVLGLQQLAHAGAMEGMVAVAHIAGKPTKPVRKDRVPGATYCHPEIGSVGLTEAQAKEAGHEVKIGKFPFTANSRASIVNQHEGFVKVVADAKHGEILGVHIIGPQATELVAEAVAMLELEATADFMMTVIHAHPTLAEAMLDAVSAVYGMAINA

SEQ ID NO: 57908 - DNA, 1425 bp, Haemophilus somnus 129PT
  CDS (1)..(1425): transl_table=11
atgaataaagagattaaaacacaagttgtcgtcttgggagcaggtccggctggttactcagcagctttccgttgtgcagatttaggcttagaaactgttattgtagagcgattttcgacgcttggtggagtatgtttaaatgtaggctgtattccgtccaaagcgttattgcatgtagctaaagtgattgaagaagctaagtccttatccgctcatggtattgtttttggtgaaccaacaacggatattgataaaattcgtggttggaaagaaaaagtaattaatcaattgactagcggtttagccggtatggctaaacagcgtaaagtacaggtagttaatggttatggtaaattctcaggaccaaatgcaattattgtggctggtgatgaaggtgaaacgaaaattacttttgataatgcaattattgctgccggctctcgccctattcagttaccatttattccacatgaagatcctcgtatttgggattctactgatgcgttaaagttaaaagaagtacctgaaaatctcttaattatggggggcggtatcatcggtcttgaaatgggaacggtttatcatgctttaggttctaaaattgatgtggttgaaatgtttgatcaagttatccctgcagcggataaagatatggttcaaatttatactaaacgcattgaaaaaaaattcaatttattactggaaactaaagtaactgctgttgaagcaaaagaagacggtatttatgtatcaatggaaggtaaggctgcaagtgaaactcgtcgttatgatgcagtattagttgcaattggtcgtgtaccaaatggtaaattaattgatgcaggtattgctggcgtcgaagttgatgatcgtggctttattcgcactgacaaacaaatgcgtactaatgtacctcatatctttgctattggtgatgttgttggtcagccaatgctagcacataaaggcgtacatgaaggtcatgtagctgcagaagtaattgcaggacaaaaacattattttgatccgaaagttattccatctattgcttataccgaaccggaagtagcttgggtggggaaaactgaaaaagaatgtaaagctgaagggattaattacgaagttgctaagttcccttgggcagcgtctggacgtgcaattgcatccgactgtgctgatggtatgacgaaattgattttcgataaagatacacatcgtgttattgggggagcaattgtcggtactaacggtggtgaattgctaggtgaaattggcttggcaattgaaatggggtgtgatgctgaagatttagcactaacaatccatgctcatccaactttacatgaatctgttgggctagccgctgaagtttttgaaggctctatcacagatttacctaacccaaaagcgaagaagaaaaaataa

SEQ ID NO: 57909 - protein, 474 aa, Haemophilus somnus 129PT
MNKEIKTQVVVLGAGPAGYSAAFRCADLGLETVIVERFSTLGGVCLNVGCIPSKALLHVAKVIEEAKSLSAHGIVFGEPTTDIDKIRGWKEKVINQLTSGLAGMAKQRKVQVVNGYGKFSGPNAIIVAGDEGETKITFDNAIIAAGSRPIQLPFIPHEDPRIWDSTDALKLKEVPENLLIMGGGIIGLEMGTVYHALGSKIDVVEMFDQVIPAADKDMVQIYTKRIEKKFNLLLETKVTAVEAKEDGIYVSMEGKAASETRRYDAVLVAIGRVPNGKLIDAGIAGVEVDDRGFIRTDKQMRTNVPHIFAIGDVVGQPMLAHKGVHEGHVAAEVIAGQKHYFDPKVIPSIAYTEPEVAWVGKTEKECKAEGINYEVAKFPWAASGRAIASDCADGMTKLIFDKDTHRVIGGAIVGTNGGELLGEIGLAIEMGCDAEDLALTIHAHPTLHESVGLAAEVFEGSITDLPNPKAKKKK

SEQ ID NO: 57910 - DNA, 1431 bp, Trichodesmium erythraeum IMS101
  CDS (1)..(1431): transl_table=11
atgactcaagaatttgattacgacttaataattattggtgcaggtgtcggtggacatggtgcagcattacacgctaccagttgtggcctaaaaacagctattgtagaagtagcagaaatgggaggtacttgtgttaaccgaggttgtataccatctaaggcacttctcgcagcatcaggtaaagttcgagagttacgaaatgctcaccacttaaaaactttgggaattgagttggataatgtttcttatgacagacaagtaatggccactcatgcaagtaacattgtgaccaaaattagaggtgacatgagcaaaagccttaaacgtctgagtgtagatattattacagggtgggctcaggtagcaggaaaacaaaaagttacggttaagacggaaaagggagaagaaaactttactgccaaagatattatacttgctcctggttcagtaccttttgttcctcctggaatagaattggatggtaaaacagtatttaccagtgatgatgctcttaaactagactggttaccaccttgggttgcaattattggtagtggttatataggactagaattttctgatatttacactgcccttggatctgaaattacgatgattgaggcattagataagttaatgcctactttcgatccagatatagctaagattgcacaaagagttctaattcagtcaagagatattgaagtaaaagtagggaagttggctataaaggtagttcctggatctccggtaattattgaacttgccgatgccaagactaaagaagtagaagaaattatagaggttgatgcttgtctagttgccacaggtcgcattccctatacaaaagatttaggactagattctgtagcagtagaaactgataaatatggatttattccagtaaatagcaaaatggcagttttgtcaagtggtgaaccagtacctaatttatgggcaattggtgatgcaacaggaaaaatgatgttggctcatgcagcatctgcccaaggaataacagtggtagaaaatatatgtggtcgtgatcgagaaccagattatcttagtattccggcggcagcttttactcatccagaaattagctatgttggtatgacagaaccagcagcaaaagatttaggccaaaaacaggggtttgaagtggcaagtgtcagaacttattttaagggtaattctaaggcgatagctgaagatgaaacagatggtattgctaaagtaatttatcgtcaagatacaggagaattattaggagtacatattattggtcttcatgcctctgacttaattcaagaagcagcaaatgctatagctaaaaaacaatctgttaatgagttatcttttaatgtacatactcatcctactttatcagaagttttggatgaagcatttaaacgagccactgttcactag

SEQ ID NO: 57911 - protein, 476 aa, Trichodesmium erythraeum IMS101
MTQEFDYDLIIIGAGVGGHGAALHATSCGLKTAIVEVAEMGGTCVNRGCIPSKALLAASGKVRELRNAHHLKTLGIELDNVSYDRQVMATHASNIVTKIRGDMSKSLKRLSVDIITGWAQVAGKQKVTVKTEKGEENFTAKDIILAPGSVPFVPPGIELDGKTVFTSDDALKLDWLPPWVAIIGSGYIGLEFSDIYTALGSEITMIEALDKLMPTFDPDIAKIAQRVLIQSRDIEVKVGKLAIKVVPGSPVIIELADAKTKEVEEIIEVDACLVATGRIPYTKDLGLDSVAVETDKYGFIPVNSKMAVLSSGEPVPNLWAIGDATGKMMLAHAASAQGITVVENICGRDREPDYLSIPAAAFTHPEISYVGMTEPAAKDLGQKQGFEVASVRTYFKGNSKAIAEDETDGIAKVIYRQDTGELLGVHIIGLHASDLIQEAANAIAKKQSVNELSFNVHTHPTLSEVLDEAFKRATVH

SEQ ID NO: 57912 - DNA, 1782 bp, Alkalilimnicola ehrlichei MLHE-1
  CDS (1)..(1782): transl_table=11
atggcagatttggtagaagtgaaggttccggacatcggcgacttcgacgcggtggacgtcatcgaggtgctggtcagcccgggtgacgagatcgaggtggagcagtcgctgatcaccctggagtcggacaaggcctcaatggaggtgccttcgagccacgcgggcgtggtcaaggaggtcaaggtcaaggtgggcgacaaggtctccgagggggatgtggtctgcaccctcgaggcggctgaagccacggccgggggcgaggcccccgccaccggcggcggcagggcggaaaagcccgccgagccggaaccgccggccgcggccaccaggcccgccccggcggccgccccgcagggggatgccccggtggacgccgactgcgacgtgctggtactgggcgccggcccgggcggctacaccgccgccttccgggcggcggacctgggcctgaagacggtgctggtggagcgctacccgaccctggggggcgtttgcctgaacgtgggctgcattccctccaaggctttgctgcacgcggccaaggtgatcgacgaggcggagcagttcgctgaccacggcatcaccttcggtaagcccaagatcgacatccgcaagctggccgactggaaatccagcgtggtcaagaagttgaccggcggactggccggtctggccaaacagcgcaaggtggaggtggtgaccggcaagggggccttcaaggacgcctaccacctggaggtggacggtaaggagggcaagcgcaccatcagttttcggcactgcatcatcgccgccggctcccggccggtggtcccgcccccgctggcggtggacgacccccgggttatggactccaccggcgcgctggagctggaggaggtgccggagcggctgctggtggtcggcggtggcatcatcggcctggagatggcctgtgtgtacgacgcgttgggcagcaaggtgacggtggtggagctggcggaccggctgatgccgggcgcggacgccgatttggtgaaggtgctgcgcaagcgcatcgataagcgctatgacgccatccacctgaacaccctggtcaaggagctgaagcccaacaagaagagcatcacggtgaagttcgagggcaaggacgcgccggagagcgaccggttcgaccgggtgctgctgtcggtggggcgccggccgaacaccgacctgatcggcctggaggccaccgggctcaagcccaatgatcagggttacatcgacgtcgatgagtatatgcgcaccggtgtgtcgcacatccatgccattggtgacatcgtcggccagccgatgctggcacacaaggcgtcgcacgagggcaaggtggcggcggaggttatcgcgggcgagaaaagcgcctgggatgcccgggcgattccatcggtggcctacacggacccggaggtggcctgggtgggcatcaccgaggaggaggcgaaggcgcaggggattgcgtacgagaagggcgccttcccctgggccgccaacggacggtcgctgtcgctcaattaccaggacgggatcagcaagctgttgttcgacgagcagtcggggcagctgattggcgccggcatcgtcggccccaacgccggtgacctgatcgccgaggcggccctggccctcgagatgggcgcggaggcggcggacatcggcctgacggtgcacccgcacccaaccctgtccgagaccgtggccatggccgccgaggcggcggaggggacgctgaccgatctctatatccccaagaagaagaaatag

SEQ ID NO: 57913 - protein, 593 aa, Alkalilimnicola ehrlichei MLHE-1
MADLVEVKVPDIGDFDAVDVIEVLVSPGDEIEVEQSLITLESDKASMEVPSSHAGVVKEVKVKVGDKVSEGDVVCTLEAAEATAGGEAPATGGGRAEKPAEPEPPAAATRPAPAAAPQGDAPVDADCDVLVLGAGPGGYTAAFRAADLGLKTVLVERYPTLGGVCLNVGCIPSKALLHAAKVIDEAEQFADHGITFGKPKIDIRKLADWKSSVVKKLTGGLAGLAKQRKVEVVTGKGAFKDAYHLEVDGKEGKRTISFRHCIIAAGSRPVVPPPLAVDDPRVMDSTGALELEEVPERLLVVGGGIIGLEMACVYDALGSKVTVVELADRLMPGADADLVKVLRKRIDKRYDAIHLNTLVKELKPNKKSITVKFEGKDAPESDRFDRVLLSVGRRPNTDLIGLEATGLKPNDQGYIDVDEYMRTGVSHIHAIGDIVGQPMLAHKASHEGKVAAEVIAGEKSAWDARAIPSVAYTDPEVAWVGITEEEAKAQGIAYEKGAFPWAANGRSLSLNYQDGISKLLFDEQSGQLIGAGIVGPNAGDLIAEAALALEMGAEAADIGLTVHPHPTLSETVAMAAEAAEGTLTDLYIPKKKK

SEQ ID NO: 57914 - DNA, 1404 bp, Hyphomonas neptunium ATCC 15444
  CDS (1)..(1404): transl_table=11
atggcagagacctatgacgtcgtcatcatcggcggcggccccggcggctacaactgcgccatccgcgccggccagcttggcctcaaggttgcctgtatcgagatgcgcggcaagctcggcggcacctgcctgaatgtcggctgcattccgtccaaggcgttgctgcacacctcccaccttttcagcgcggcgcaaaacgagtttgccacgctcggcatcaagaccggcaaggtagagctcgatctggcgcagatgatgggccagaaggacgaggcggttgaggggctgaccaagggcgtcgaattcctgctcaagaagaacaaggccgaatacatcaagggcaagggcaagatcctcggcaagggcaaggtcgaagtggcgctggcagatggcggcacccgcgtgctggaaacgaagaacatcgtcatcgcgaccggctccgagcctgccaccctgcccggcatcgagattgatgaggagcgggttgtttccaacaccggcgccctcagcctgaaagctgtgccgaagaaactcgtgctgatcggcgcgggcgtgattgggctcgagatgggctctgtctgggcgcggcttggctcggaagtgacggtcgtcgagtatcttgaccgcatcctgccgcccgctgacgcggaagtggccaaggaagccgagcgcaccttcaagaagcagggcctcgccttcaagctgggcaccaaggtgaccggtatcgagaagaccaagacaaagctgaaagtggccgtggagcctgccaagggcggagcggcggaaacgctggacgctgacatcgtgatcgtcgccatcggccgaaagccgtatacggaaggccttgggctggaagccgtgggcgggaagaccgacaagcgcggcgtgatcgaagtgaccgatcatttcaaggtggcagacggtgtctgggcggtgggcgactgtatccccggcccgatgctggcccacaaagccgaagacgatggcacggcggtggccgagctgatcgcgggcaaggcgggccatgtgaactatgacctcgtgccgagcgtcgtctacacgaacccggagatcgcttgggtcggcaagaatgaggaagaactcaaggccgctggcgttgagtatgtgaagggcaagttccccttcatggcaaactcccgtgcccggacgaaccatgagacggtgggtttcgtgaaaatcctcgccgaaaaaggcaccgacaagatccttggcgcgcacatgatcggcgtgggcgttggcgagatgatcgccgaagtctgcgtggcgatggagtttggcgcgtcttcggaagacatcgcccgcaccagccatgcccacccgacgctttccgaagccgttcgccaggcggcgatgggcgtcgaaggctggacgatgcagatgtga

SEQ ID NO: 57915 - protein, 467 aa, Hyphomonas neptunium ATCC 15444
MAETYDVVIIGGGPGGYNCAIRAGQLGLKVACIEMRGKLGGTCLNVGCIPSKALLHTSHLFSAAQNEFATLGIKTGKVELDLAQMMGQKDEAVEGLTKGVEFLLKKNKAEYIKGKGKILGKGKVEVALADGGTRVLETKNIVIATGSEPATLPGIEIDEERVVSNTGALSLKAVPKKLVLIGAGVIGLEMGSVWARLGSEVTVVEYLDRILPPADAEVAKEAERTFKKQGLAFKLGTKVTGIEKTKTKLKVAVEPAKGGAAETLDADIVIVAIGRKPYTEGLGLEAVGGKTDKRGVIEVTDHFKVADGVWAVGDCIPGPMLAHKAEDDGTAVAELIAGKAGHVNYDLVPSVVYTNPEIAWVGKNEEELKAAGVEYVKGKFPFMANSRARTNHETVGFVKILAEKGTDKILGAHMIGVGVGEMIAEVCVAMEFGASSEDIARTSHAHPTLSEAVRQAAMGVEGWTMQM

SEQ ID NO: 57916 - DNA, 1395 bp, Solibacter usitatus Ellin6076
  CDS (1)..(1395): transl_table=11
gtgccctacgatctgatcgtcatcgggagtggtcccggcggctactccgcagccatacgcgccggccagtacggactcaagacagcgctcatcgaaaagcagcccagactcggcggaacctgtcttttagtgggatgtatcccgaccaaaagcctgctccacaccgccgatgtctgggatcatttcgtgcacgccgaagccgatggcatagtagccgagaacccgcgcctcgactttcccaaggtgcaggcgcgcaaggatggcatcgtcagcaagcactccaaaggcgtggagttcctgttgaaacgcgccaaggtggagcgcatttcgggctacgccaccatcaaaggcggcggcaagatcgaagtcaagaccgatgccggcgtgcagaccctggaagccaggaacatcatcatcgccaccggcagcgaagcgcgcatgcttcccggtatgcagcccgaccccgaattcatcctcaccaacatcgaaatcctgaaccttgcggcggttccgaaaagcctgatcattatcggcgcgggcgctgtcggcgtggagtttgcctccattttcaagcgcttcggcaccgacgtcaccgtgatcgaaatgctgccgcgcattgtgccggtggaagacgaagacatctccaaggaactggagcgggtcttcaagaagcaaaagatccgcgtggaaaccggcgcgcgtgctgagaacatccagaagaccggcacgggcgtcaaactgaccctcaccaccaaagatgggaaacaggagcagctcgaagccgagaagttgctggtcgcggtgggccgcaagcccaacaccgacgccatcggtttggagaacacgaaggtccagctggaccgcggttttatcaaggtggatcagtaccagcagaccggcgagcccggcgtctatgccatcggcgacgtggtggccggcactccgcagctggctcatgtggccacccgggaagggatgatcgcggtggcgcacatggccggcaagcccgcggttccgatcaacaagaaccgtattccgggcgcgacctacaccactcccggcatcggcagcgtcggcctcaccgaagcccaggcgcgcgcccaaggctaccaggtaaaggtcggcaagttccccttcgccggcgatagccgggccaccatactcggccagcacgagggcttcatcaaggtagtggccgacgaaaaatacggcgagattcttggcgtccacatcatcgggcccgatggcttcgagttgatcgccgaagccgtcgcggcgatggaagccgaggctaccgtcgatgtcatgatgcagaccattcacgcccatcccacgctctacgaagcggtgggcgaggccttcaacgccgtttacggtctctccatcaatgcgtaa

SEQ ID NO: 57917 - protein, 464 aa, Solibacter usitatus Ellin6076
MPYDLIVIGSGPGGYSAAIRAGQYGLKTALIEKQPRLGGTCLLVGCIPTKSLLHTADVWDHFVHAEADGIVAENPRLDFPKVQARKDGIVSKHSKGVEFLLKRAKVERISGYATIKGGGKIEVKTDAGVQTLEARNIIIATGSEARMLPGMQPDPEFILTNIEILNLAAVPKSLIIIGAGAVGVEFASIFKRFGTDVTVIEMLPRIVPVEDEDISKELERVFKKQKIRVETGARAENIQKTGTGVKLTLTTKDGKQEQLEAEKLLVAVGRKPNTDAIGLENTKVQLDRGFIKVDQYQQTGEPGVYAIGDVVAGTPQLAHVATREGMIAVAHMAGKPAVPINKNRIPGATYTTPGIGSVGLTEAQARAQGYQVKVGKFPFAGDSRATILGQHEGFIKVVADEKYGEILGVHIIGPDGFELIAEAVAAMEAEATVDVMMQTIHAHPTLYEAVGEAFNAVYGLSINA

SEQ ID NO: 57918 - DNA, 1407 bp, Magnetococcus sp. MC-1
  CDS (1)..(1407): transl_table=11
atgtctgatacgtttgatctggtggtaattggtggtggtcctggtggctatgtggcggccattcgtgccgcgcaactgggcttaaagaccgcctgtattgataagcgcccaacgctggggggcacctgcctgaatgtgggctgcattccttctaaagcgctgttgcaatcctctcaccaactagagaccgcccagcatgccatggcggcccatggggtagagatcaaaggggttaaggccaacttaaccaccatgatgcagcgcaagcaagaggtggtgcaggggttgacccagggcattgcctttctctttaaaaagaacaaagtcacccaccttatgggcagcggtaccattgtggacagtagccatgtgcaagtgaccgcagcggatggcagcgtacagaccctaaccacagagaacattctcattgccagcggctccgaggttgccaccctgcccggtttggagatagatgaaaaacacattatctcgtccacgggtgcccttgcattggacaaggtgccaaaaaaaatggtggtgattggtgcgggggtgattggcttagaactgggctcggtctggcgccgcttaggggccgaagtgacggtggtggagtttttggatggcatcctgcccggcatggatggggagattcgcaaaaccgcccagcgcaccctgagcaaacagggcatgcactttaaactgggcaccaaagtgaccgcagccagcgtgcttaaaaatggcgtcaagctcaccatggagccggttaagggtggcgaggccgaagaacgacaggccgacgtggtgttggtggcggttggccgcagaccctacacccaggggctgggactggaaaacattggggtcacgctggatgagcggggctttattcccgtggatcatgatcgacagaccacctgcgcgggggtgtttgccattggcgatgtgatcggcggggccatgctggcccacaaggccgaagaggagggcagcgccgttgccgaagcgttggctggtcaggtggcccatgtcaactatgacgccattcccgctgtggtctacactcacccggagatcgccagcgtggggcaaagtgaggagtcccttacagcggcgggtatcccctataaagtgggtaaattcccctttatggccaactcgcgcgcccgtgccattggcgatgccgagggctttgtaaaaattcttgcccatgccaccagcgatgccattttgggggcccatatcatcggccccgcagcgggggatctcattgctgagattgtgctcgccatggagtgtgacattagtgccgaggatattgcccgcacctgccacgcccacccagggttgggcgaagcggttaaagaggccgctttagccgtggataaacgtgccatccacgcctaa

SEQ ID NO: 57919 - protein, 468 aa, Magnetococcus sp. MC-1
MSDTFDLVVIGGGPGGYVAAIRAAQLGLKTACIDKRPTLGGTCLNVGCIPSKALLQSSHQLETAQHAMAAHGVEIKGVKANLTTMMQRKQEVVQGLTQGIAFLFKKNKVTHLMGSGTIVDSSHVQVTAADGSVQTLTTENILIASGSEVATLPGLEIDEKHIISSTGALALDKVPKKMVVIGAGVIGLELGSVWRRLGAEVTVVEFLDGILPGMDGEIRKTAQRTLSKQGMHFKLGTKVTAASVLKNGVKLTMEPVKGGEAEERQADVVLVAVGRRPYTQGLGLENIGVTLDERGFIPVDHDRQTTCAGVFAIGDVIGGAMLAHKAEEEGSAVAEALAGQVAHVNYDAIPAVVYTHPEIASVGQSEESLTAAGIPYKVGKFPFMANSRARAIGDAEGFVKILAHATSDAILGAHIIGPAAGDLIAEIVLAMECDISAEDIARTCHAHPGLGEAVKEAALAVDKRAIHA

SEQ ID NO: 57920 - DNA, 1395 bp, Mycobacterium smegmatis str. MC2 155
  CDS (1)..(1395): transl_table=11
gtgacccactttgacgttgttgttctcggagccggtcccggtggatacgtcgcggccattcgcgccgcccagctggggctgaataccgcaattgtcgaacccaagtactggggcggcgtgtgtctcaacgttggctgtatcccgtccaaggcgctgctgcggaacgccgagatcgcccacatgttcaacaaggaagccaagaccttcggcatcagtggtgaggcgacgttcgactacggcgcggcgttcgaccgcagccgcaaggtcgccgacggccgtgtcgcgggcgtgcacttcctgatgaagaagaacaagatcaccgagatccacggttacgggaagttcaccggccccaacagcctggaggtcgcgctcaacgacggcgggaccgagaaagtcgagttctccaacgcgatcatcgcgaccggcagcagcacgcgcctggtgcccggcacgtcactgtcggagaacgtggtcacctacgagacacagatcctctcgcgtgagctgcccggctcgatcatcatcgccggcgccggcgcgatcggcatggagttcgcgtacgtgctgaagaactacggcgtcgacgtcaccatcgtcgagttcctgccgcgcgccctgcccaacgaggacgccgaggtctccaaggagatcgagaagcagtacaagaagctgggcgtgaagatcctcaccggcaccaaggtggagggtattgccgatgacggctcgacggtgaaggtgaccgtcagcaaggacggcaagaccgaggaactcaaggccgacaaggtgctgcaggccatcggcttcgcacccaacgtcgagggttacggcctggaggcggccggtgtcgagctcaccgaccgcaaggccatcggcatcgacgactacatgcgtaccaacgtggggcacatctacgccatcggtgacgtcaccggcaagcttcagctcgcccacgtcgccgaggcgatggcggtggtcgcggccgaaaccatcgccggcgcagagactctgccgctcggcgactaccgcatgatgccgcgcgcgacgttttgccagccgcaggtcgcgagcttcgggctcaccgaggagcaggcccgcgacgagggttacgacgtgaaggtcgccaagttcccgttcaccgcgaacggcaaggcgcacggcctggccgacccgaccgggttcgtgaagctcatcgccgacgccaagtacggcgaactgctcggcgggcacctcatcggccccgacgtctcggagttgctgcctgagctgaccctggcccagaagtgggacctgaccgtcaacgagctcgcccgcaacgtgcacacccacccgacgctgtcggaggcgttgcaggagtgcttccacggtctggccggccacatgatcaacttttga

SEQ ID NO: 57921 - protein, 464 aa, Mycobacterium smegmatis str. MC2 155
MTHFDVVVLGAGPGGYVAAIRAAQLGLNTAIVEPKYWGGVCLNVGCIPSKALLRNAEIAHMFNKEAKTFGISGEATFDYGAAFDRSRKVADGRVAGVHFLMKKNKITEIHGYGKFTGPNSLEVALNDGGTEKVEFSNAIIATGSSTRLVPGTSLSENVVTYETQILSRELPGSIIIAGAGAIGMEFAYVLKNYGVDVTIVEFLPRALPNEDAEVSKEIEKQYKKLGVKILTGTKVEGIADDGSTVKVTVSKDGKTEELKADKVLQAIGFAPNVEGYGLEAAGVELTDRKAIGIDDYMRTNVGHIYAIGDVTGKLQLAHVAEAMAVVAAETIAGAETLPLGDYRMMPRATFCQPQVASFGLTEEQARDEGYDVKVAKFPFTANGKAHGLADPTGFVKLIADAKYGELLGGHLIGPDVSELLPELTLAQKWDLTVNELARNVHTHPTLSEALQECFHGLAGHMINF

SEQ ID NO: 57922 - DNA, 1380 bp, Nocardioides sp. JS614
  CDS (1)..(1380): transl_table=11
gtggccgacgccgacttcgacgtactcatcctcggtgcgggctccggcggttacgcctgcgccctgcgctcagcacagctgggcctgtccgtgggcctggtggagaagtcgcacctgggcggcacctgcctgcacatcggctgcatcccgaccaaggcgctgctgcacgccgccgaggtcgcggaccaggcccgcgaggccgagacgttcggagtgcgcgccaccctggagggcatcgacatggcgggggtcaacgcctacaaggacggtgtcgtctcgcggctgttcaagggcctcaccggcctgatcaagggccgcggcatcacggtgatcgagggcgccggccggctcaccggcccgcggacggtcaccgtcggcgagacggcgtacaccggcaagcacgtggtgctcgcgtccggctcgtacgcccgcaccctgcccgggctcgagatcgacggcgagcgggtgatcacctccgaccacgccttgcggctggatcgggtgcccgcctcggtcgtggtgctcggcggcggcgtcatcggctgcgagttcgccagcgtgtggcgcagcttcggtgccgacgtgaccatcgtcgaggcgctgccgcggctggtggccgtcgaggacgaggcgtcctccaaggcgctggagcgggcgttccgcaagcgcggcatcgtgttccgcaccggcaccccgttccagagcgtcaagcacaccgacaccggcgtcgcggtgaccgtcgaggggggcgacgtgatcgaggccgacctgctgcttgtcgcagtcggtcgcgggccggtcaccgaaggcctcggctacgacgagcagggcgtgaccatggaccgcgggttcgtgctcaccgacgagcggtgccgcaccaacctggacggcgtgtacgccgtcggcgacatcgtccccggcccgcagctggcgcaccgcggcttccagcagggcatcttcgtcgccgaggacatcgcgggcctcgacccgagcccgatcgacgaggccggcatcccccgcgtgacgtactcgcacccggaggtcgcctccgtcgggctcgacgaggcgcgtgcggcggagacctacggcgccgacggcatcgagacgctcacctacgacctgggcggcaacggcaagagccagatcctcaagacccagggcttcgtgaagctgatccgtcgcaaggacggccccgtcgtgggcgtgcacatggtcggcgaccgggtcggcgagctcatcggcgaggcccagatgatctacaactgggaggggtacccggaggacgtggcaccccttgtccacgcccacccgacgcagaacgaggcgctcggcgaggcgcacctggcgctggcgggcaaacccctgcacgcccactcctga

SEQ ID NO: 57923 - protein, 459 aa, Nocardioides sp. JS614
MADADFDVLILGAGSGGYACALRSAQLGLSVGLVEKSHLGGTCLHIGCIPTKALLHAAEVADQAREAETFGVRATLEGIDMAGVNAYKDGVVSRLFKGLTGLIKGRGITVIEGAGRLTGPRTVTVGETAYTGKHVVLASGSYARTLPGLEIDGERVITSDHALRLDRVPASVVVLGGGVIGCEFASVWRSFGADVTIVEALPRLVAVEDEASSKALERAFRKRGIVFRTGTPFQSVKHTDTGVAVTVEGGDVIEADLLLVAVGRGPVTEGLGYDEQGVTMDRGFVLTDERCRTNLDGVYAVGDIVPGPQLAHRGFQQGIFVAEDIAGLDPSPIDEAGIPRVTYSHPEVASVGLDEARAAETYGADGIETLTYDLGGNGKSQILKTQGFVKLIRRKDGPVVGVHMVGDRVGELIGEAQMIYNWEGYPEDVAPLVHAHPTQNEALGEAHLALAGKPLHAHS

SEQ ID NO: 57924 - DNA, 1425 bp, Azoarcus sp. BH72
  CDS (1)..(1425): transl_table=11
atgtccaaagaattcgacgttctcgtcatcggcggcggccccggcggctatgtcgcggcgatccgcgcggcccagctcggcttcaagaccgcgtgctgcgaatccaacccctatgccgatcccaagggcgaaccgcgcctcggcggcacctgcctgaacgtgggctgcatcccgtccaaggcgctgctgcacacctcgcacctgttcgaggaagccggccacggcttcgaggcgcagggcatcaccgtcggcacgcccaagatcgacgtcgccaagatgattgcgcgcaagagcggcatcgtcgaccagctcaccggcggcatcaagggcctgttcaagaagaacaaggtcaccctgctcaacggccacggctctttcgtcgcccaggcgggcgagggttggcaggtcaaggtcggcgacgaagtggtcaccgccaagcaggtcatcgtcgccaccggctccaaggcgcgccacctgccgggcatcccggtcgataacaagatcgtctgcgacaacgtcggcgccctcgacatcgacgcggtgccgaagaagctcgcgatcatcggtgcgggcgtcatcgggctggaaatgggctcggtgtggcgccgcctcggtgccgacgtcaccatcctcgaagcgatgcccgacttcctcgccgccgccgacctggacgtggccaaggaggcgctcaaggtcttcaccaagcagggcctcaagctccagctcggcgtcaagatcggcgaggtcaaggccgccaagaagggcgtctcgatcgcctacaccgacaaggacggcgcggagcagaagctcgacgccgaccgcctgatcgtctcggtcggccgcgtgcccaacaccgacggcctcaacgccgaagcggtgggcctcaagctgaacgaccgcggcatgatcgaagtcgacggccactgccgcaccaacctgcccggcgtgtgggcggtgggcgacgtggtgcgcggcccgatgctggcgcacaaggcgatggaagaagcggtgatggtcgccgagctgatggcgggccaggccggccactgcaacttcgacaccgtgccctgggtgatctacaccagcccggaaatcgcctgggtcggcaagaccgagcagcagctcaagggcgaaggcgtcgcctacaaggtcggcaagatcccgttcctggccaacggtcgcgcgctcggcatgggcgaaaccacgggcttcgtcaagatgatcgcggatgccgcgaccgaccgcatcctcggtgtgcatatcatcggcgccggcgcttcggaactgatctccgaagccgtggtggcgatggagttcgccggttgcagcgaagacctcgcccgcatctgccacgcgcacccgacgctgtcggaagtggtgcacgaggcggcgctggcctgcgacaagcggccgctgcacttctaa

SEQ ID NO: 57925 - protein, 474 aa, Azoarcus sp. BH72
MSKEFDVLVIGGGPGGYVAAIRAAQLGFKTACCESNPYADPKGEPRLGGTCLNVGCIPSKALLHTSHLFEEAGHGFEAQGITVGTPKIDVAKMIARKSGIVDQLTGGIKGLFKKNKVTLLNGHGSFVAQAGEGWQVKVGDEVVTAKQVIVATGSKARHLPGIPVDNKIVCDNVGALDIDAVPKKLAIIGAGVIGLEMGSVWRRLGADVTILEAMPDFLAAADLDVAKEALKVFTKQGLKLQLGVKIGEVKAAKKGVSIAYTDKDGAEQKLDADRLIVSVGRVPNTDGLNAEAVGLKLNDRGMIEVDGHCRTNLPGVWAVGDVVRGPMLAHKAMEEAVMVAELMAGQAGHCNFDTVPWVIYTSPEIAWVGKTEQQLKGEGVAYKVGKIPFLANGRALGMGETTGFVKMIADAATDRILGVHIIGAGASELISEAVVAMEFAGCSEDLARICHAHPTLSEVVHEAALACDKRPLHF

SEQ ID NO: 57926 - DNA, 1425 bp, Actinobacillus pleuropneumoniae serovar 1 str. 4074
  CDS (1)..(1425): transl_table=11
atgagcaaagaaatcaaaacgcaagtcgtggtacttggtgcgggtcctgccggttattcagcggcattccgttgtgccgacttaggcttagaaacagtaattgtcgaacgttattcaactttgggcggtgtatgcttaaacgtaggttgtattccgtctaaagcattattacacgttgcaaaagttatcgaagaagcaaaacacgcagagaaaaacggtattactttcggtgagcccaacattgatttagataaagtgcgtgcgggtaaagaagcggttgtttctaaattaaccggcggtttagcgggtatggctaaagcacgtaaagtaacagtagtggaaggtttagcggcgtttaccgatccgaatactttagtagctcgtgaccgtgacggtaatccgacaacgattaaatttgataatgcaattattgcagccggttctcgtccgattcagcttccgttcattccacacgaagatccgcgtgtgtgggattctacggatgcacttaaattaaaagaagtaccgaaaaaattactcattatgggcggtggtatcatcggtttagaaatgggtaccgtgtataacgctttaggttcggaagttgaagtggttgagatgtttgaccaagtgattcctgcagcagataaagatgttgtagctatctacaccaaacaaatcgagaaaaaattcaagttaatgcttgaaactaaagtaactgcggttgaagcgaaagatgacggtatctatgtttcaatggaaggtaaagcatgtaacgatactaaacgttacgatgcggtattagtcgctatcggtcgtgtaccgaacggtaaattaatcgatgcgggtaaagcgggcgtgaatgttgatgatcgcggtttcatcgcagtggataaacaaatgcgtaccaacgtaccgcatatctttgctatcggtgatatcgtcggtcagccgatgttagcacacaaaggtgttcacgaaggtcatgtagcggcagaagtgattgccggtcaaaaacactattttgatcctaaagtgattccttcaatcgcttatacagagccggaagttgcttgggtaggtaaaacggagaaagagtgtaagcaagaaggcttaaactacgaagtggctaaattcccttgggctgcatcaggtcgtgcgatcgcttccgaatgttcggaaggtatgactaaacttatcttcgataaagatactcaccgtttacttggcggtgcaatcgtaggtagcaacggcggtgaattattaggtgaaatcggtcttgcaatcgaaatgggttgcgatgcggaagatatcgctttaactatccatgctcatcctacattacacgaatcggtaggtttagctgcggaagtatttgaaggctctattacagacttaccaaatgcaaaagcgaaaaaacgttaa

SEQ ID NO: 57927 - protein, 474 aa, Actinobacillus pleuropneumoniae serovar 1 str. 4074
MSKEIKTQVVVLGAGPAGYSAAFRCADLGLETVIVERYSTLGGVCLNVGCIPSKALLHVAKVIEEAKHAEKNGITFGEPNIDLDKVRAGKEAVVSKLTGGLAGMAKARKVTVVEGLAAFTDPNTLVARDRDGNPTTIKFDNAIIAAGSRPIQLPFIPHEDPRVWDSTDALKLKEVPKKLLIMGGGIIGLEMGTVYNALGSEVEVVEMFDQVIPAADKDVVAIYTKQIEKKFKLMLETKVTAVEAKDDGIYVSMEGKACNDTKRYDAVLVAIGRVPNGKLIDAGKAGVNVDDRGFIAVDKQMRTNVPHIFAIGDIVGQPMLAHKGVHEGHVAAEVIAGQKHYFDPKVIPSIAYTEPEVAWVGKTEKECKQEGLNYEVAKFPWAASGRAIASECSEGMTKLIFDKDTHRLLGGAIVGSNGGELLGEIGLAIEMGCDAEDIALTIHAHPTLHESVGLAAEVFEGSITDLPNAKAKKR

SEQ ID NO: 57928 - DNA, 1380 bp, Rickettsia rickettsii
  CDS (1)..(1380): transl_table=11
atgcaagaatttgatttagtggtaataggtagcggtccagccggttatacaggcagtattagggctgctcaacttggtatgaaagtagcgtgtattgagaaaagcgatactcttggcggcacttgtttaaatataggatgcataccatcgaaagctttacttaattcttccgaaaaatatgaagcagctctaaaacattttgagaatataggtattactgcggatgtaaaactagacttacaaaaaatgctagctaataaagataaagtagttcttgatctcacaaaaggtatagaaagtctctttgccaaaaacaaagttactaggataaaaggtgaagctaaaattagttctagtaatatcgttgaagtaaataaagagcaaattaaagccaaaaatatcctaattactacaggttccagcgtcatagaaataccgaatatcaaaatagacgaagaatttattgtttcatctaccggtgctttgaaactttctaaagtacctgagaacttaatagtagtaggcggagggtatataggcttagaacttggttcagtttggcgtcgtttgggagctaaagtaacggttattgagtatgcaccgagcattgtacctatgcttgataaagaaattgctacacaatttatgaaactacagcaaaaacaaggtatagagtttaaactgaatactaaagtgctatctgctgaagtaaagtcaggaaaagtaaatctaacaatagaggaggacgataagagttcagtagtaacaagcgatgttgtgttgatggcggtaggcagaaaagcctatacgcaaaatctagggcttgagtctgtcggtattattacggataagcaaggtagcattgagattaatgaccagttccaaacagcagtttccaatatttatgcagtcggtgatgtggtaaaaggagctatgcttgctcataaagccgaggaagaggctgtagctgccgtagaaattatggcagggcaggcaggacatgttaactataacttaattccaagcgtaatatatacttatcctgaagtagcaagcgtcggtgaaacggaagaacagctaaaagaaaaaggcattaattataaagtcggtaagtttccgtttttagcaaatagtagagcaagagcaatcggtagtacggaaggtatggttaagatccttgccgatagtaaaaccgatagggttttaggagctcatattataggagctgatgcaggtacattaattgccgcgcttacggcttatatggaattcggagcagcttcagaagatatagcaagaacatgccacgctcacccaactttaagcgaggctataaaagaggcagcacttagtgtagataagaggactattaatatttga

SEQ ID NO: 57929 - protein, 459 aa, Rickettsia rickettsii
MQEFDLVVIGSGPAGYTGSIRAAQLGMKVACIEKSDTLGGTCLNIGCIPSKALLNSSEKYEAALKHFENIGITADVKLDLQKMLANKDKVVLDLTKGIESLFAKNKVTRIKGEAKISSSNIVEVNKEQIKAKNILITTGSSVIEIPNIKIDEEFIVSSTGALKLSKVPENLIVVGGGYIGLELGSVWRRLGAKVTVIEYAPSIVPMLDKEIATQFMKLQQKQGIEFKLNTKVLSAEVKSGKVNLTIEEDDKSSVVTSDVVLMAVGRKAYTQNLGLESVGIITDKQGSIEINDQFQTAVSNIYAVGDVVKGAMLAHKAEEEAVAAVEIMAGQAGHVNYNLIPSVIYTYPEVASVGETEEQLKEKGINYKVGKFPFLANSRARAIGSTEGMVKILADSKTDRVLGAHIIGADAGTLIAALTAYMEFGAASEDIARTCHAHPTLSEAIKEAALSVDKRTINI

SEQ ID NO: 57930 - DNA, 1431 bp, Burkholderia vietnamiensis G4
  CDS (1)..(1431): transl_table=11
atgtccaaggaatttgacgtcgtcgtgatcggcgccggccccggcggctacatcgccgcgattcgcgccgcacagctcggcaagaccgttgcctgtatcgagaagtggaagaacccggccggcgcgctgaagctcggcggcacctgcctgaacgtcggctgcattccgtcgaaggcgctgctcgcgtcgtcggaggagttcgaaaacacgtcgcaccatctggccgaccacggcatcacggtcgatggcgtgaagatcgacgtcgcgaagatgctcggccgcaaggacgcgatcgtcgagaagatgacgagcgggatcgagttcctgttcaagaagaacaagatcacctggctcaagggccatggcaagttcaccggcaagacggacgccggcgtgcagatcgaagtgagcggcgaaggcgaagccgaagtcgtcaccgcgaagaacgtgatcatcgcgacgggctcgaaggcgcgtcatctgccgaacatcccggtcgacaacaagatcgtgtcggacaacgaaggcgcgctgcgcttcgactcggtgccgaagaagctcgccgtgatcggcgcgggcgtgatcggcctcgaactcggctcggtgtggcgtcgtctgggcgccgacgtgacggtgctcgaagcgctgccggcgttcctcggcgcagccgacgaagcgctcgcgaaggaagcggcgaagctgttcaagaagcagggcctcgacattcatctcggcgtgaagatcggcgacgtgaagacgaccgagaacggcgtgtcgatcgcctacacggacaaggacggcaacgcgcagacgctcgacgccgaccgcctgatcgtgtcggtcggccgtgtgccgaacaccgacaacctcggcctcgaggcaatcggcctgaaggcgaacgagcgcggcttcatcgacgtggacgaccactgccgcacggcggtgccgaacgtgtatgcgatcggcgacgtggtgcgcggcccgatgctcgcgcacaaggcggaagacgaaggcgtgctggtcgcggaagtgatcgacggccagaagccgcacatcgactacaactgcattccgtgggtgatctacacgtacccggaaatcgcatgggtcggcaagacggagcagcagctgaaggcggaaggccgcgagatcaagtcgggcaagttcccgttctcgatcaacggccgcgcgctcggcatgaacgcgccggacggtttcgtgaagatgatcgcggacgcgaagaccgacgaactgctcggtgtgcacgtgatcggcgcgaatgcgtcggacctgatcgcggaagccgtggtggcgatggaattcaaggcggcgtcggaagacatcgcccgcatctgccatccgcacccgtcgatgtcggaagtgatgcgcgaagcggcgctcgcggtcgacaagcgctcgctgaacagctga

SEQ ID NO: 57931 - protein, 476 aa, Burkholderia vietnamiensis G4
MSKEFDVVVIGAGPGGYIAAIRAAQLGKTVACIEKWKNPAGALKLGGTCLNVGCIPSKALLASSEEFENTSHHLADHGITVDGVKIDVAKMLGRKDAIVEKMTSGIEFLFKKNKITWLKGHGKFTGKTDAGVQIEVSGEGEAEVVTAKNVIIATGSKARHLPNIPVDNKIVSDNEGALRFDSVPKKLAVIGAGVIGLELGSVWRRLGADVTVLEALPAFLGAADEALAKEAAKLFKKQGLDIHLGVKIGDVKTTENGVSIAYTDKDGNAQTLDADRLIVSVGRVPNTDNLGLEAIGLKANERGFIDVDDHCRTAVPNVYAIGDVVRGPMLAHKAEDEGVLVAEVIDGQKPHIDYNCIPWVIYTYPEIAWVGKTEQQLKAEGREIKSGKFPFSINGRALGMNAPDGFVKMIADAKTDELLGVHVIGANASDLIAEAVVAMEFKAASEDIARICHPHPSMSEVMREAALAVDKRSLNS

SEQ ID NO: 57932 - DNA, 1434 bp, Crocosphaera watsonii WH 8501
  CDS (1)..(1434): transl_table=11
atgagtgagtcaggattcgattatgatttaatcattatcggtgcaggggttggaggacatggtgcagccctacacgccgtcaaatgcggcttaaaaacagccattatcgaagcaaaagacatgggaggaacctgtgttaatcgtggttgtatcccctcaaaagccctcttagcagcatcaggtaaagttcgagaactccaagatactaaacatctccacaacttaggtattgagatcgatggagtagactttcaaagagaagcgatcgccgatcatgctacaaatttagttaataaaatacgcggcgatctgaccaatagtttaaaacgtctcaaagtcgataccatccacggttggggaaaaatagtcgatacccaaaaagtcagcgttttaggcgatgatggggaaaaaattatcaccgccaaagacattatgttatgtccgggatcggttccttttgttccccgtggcatagaagttgaccacaaaaccgtttttaccagcgacgaagccgtaaaattagaagttttaccccaatggatcgccattattggcagtggttatatcggtttagaattttccgatatttacaccgcattaggctgcgaagtgaccatgatcgaagccttagacaccttaatgccagggtttgaccccgaaatttccaaactagcagaaagaagcctgatcaaagcccgtgatattgaaacctactccggagtatttgccacaaaaatcaccccaggcgcaccggttaccatcgaattaaccgacgctcaaagtaaagaagtgatcgatgtcttagaagtagacgcttgtttagtcgccacaggaagagtccccgctaccaaaaaccttggtttagaaaacattggcgttgaaaccaaccgaggttttatccccgtcaacgacaaaatggaagtcttacgggacggggaaccagttccccatctttgggcagtgggagatgcaaacgggaaaatgatgttagcccacgcagcctccggacaaggagagatcgccgtcgaaaatatgtgtggacgggagaaaaccatcgactatcgtagtattccagccgccgcctttacccatcccgaaattagttacgtgggcttgactgaaccagcagcccgtgaattaggggagaaagaagggtttgaggtctcaagcgtcaaaacttactttaaaggcaattctaaagcccttgctgaaggggaaaccgatgggattgctaaggtggtgtaccgcaaagataacggggaattattaggagtgcatatcatgggtattcacgcctccgacttgatccaagaggccgctaatgcgatcgctcaacgtcaaagcgttaaaaatctttccttcaatatccatactcatcccaccttatcagaagtcttggacgaagcctttaaacgcgctgaagctacagtttag

SEQ ID NO: 57933 - protein, 477 aa, Crocosphaera watsonii WH 8501
MSESGFDYDLIIIGAGVGGHGAALHAVKCGLKTAIIEAKDMGGTCVNRGCIPSKALLAASGKVRELQDTKHLHNLGIEIDGVDFQREAIADHATNLVNKIRGDLTNSLKRLKVDTIHGWGKIVDTQKVSVLGDDGEKIITAKDIMLCPGSVPFVPRGIEVDHKTVFTSDEAVKLEVLPQWIAIIGSGYIGLEFSDIYTALGCEVTMIEALDTLMPGFDPEISKLAERSLIKARDIETYSGVFATKITPGAPVTIELTDAQSKEVIDVLEVDACLVATGRVPATKNLGLENIGVETNRGFIPVNDKMEVLRDGEPVPHLWAVGDANGKMMLAHAASGQGEIAVENMCGREKTIDYRSIPAAAFTHPEISYVGLTEPAARELGEKEGFEVSSVKTYFKGNSKALAEGETDGIAKVVYRKDNGELLGVHIMGIHASDLIQEAANAIAQRQSVKNLSFNIHTHPTLSEVLDEAFKRAEATV

SEQ ID NO: 57934 - DNA, 1761 bp, Streptococcus suis 89/1591
  CDS (1)..(1761): transl_table=11
atggcaattgaaattattatgccgaaacttggtgtagatatgcaagaaggcgaaatcatcgagtggaaaaaacaagagggtgattttgtcaacgaaggtgatgttatcttggagatgatgtcagacaagacaagtatggaattggaagcagaagaatcaggtgtactcttgaaaatcgttcatggtaacggtgcaactgttcctgtaacagaagtcattgcttaccttggtgcagaaggcgaatcagttgaagttggtagcgcacctgctccagctgaggttgcacaagcaactgccgacttgaaagcagctggtttggaagtgcctgcagctcctgcagcagctccacaagctcctaaggctgaattggcagctgacgagtacgacatggttgttgtcggtggtggtcctgctggttactacgcagctattcgtggtgctcaattgggcggtaaaatcgctatcgttgagaaatcagaatttggtggtacctgcttgaacaagggttgtatcccaactaagacctaccttaaaaacgctgaaattcttgacggcttgaagattgctgctgagcgtggtatcaaccttgcttcaacaaattacaccgttgatatggacaagacagttgacttcaagaacaaggttgtgaagacattgactggtggcgttcaaggtctcttgaaagctaacaaggtaacaatcttcaacggtcttggtcaagtaaatcctgacaagactgttgtcatcggcgacaaggtcatcaaaggtcgtagcatcattcttgcaactggttctaaggtttctcgtatcaacatcccaggtattgattctaaattggtgttaacttctgatgatatccttgacttgcgtgaaattcctaagtcactcactgttatgggtggtggcgtagtcggtgtggaacttggtttggtttacgcgtcttacggtactgaagtaacagttgttgaaatggctgaccgtatcattccaggtatggaccgcgaagtgtctgttgaattgcaaaaagtcctttctaagaaaggcatgaaattcttgacatcagttggagtatctgaaattgttgaagccaacaatcaattgacaattaaattgaacgatggttcagaaattatctctgaaaaagctcttctttcaattggacgtgtacctcaattagctggtcttgaaaatcttcaccttgagttggatcgcggtcgtatcaaggttaatgcttaccaagaaacttctatcccaggaatttatgcacctggtgatgtcaacggtactaagatgttggcacacgctgcttaccgtatgggtgaagtggcagctgaaaatgctattcacggtaaccaccacaaggctaaattggacttcacaccagcagcggtttacacacacccagaaattgctatggttggtttgactgaagatcaggctatcgagaaatatggtaaagaaaacatccttatcggtcgcaacagctttactggtaacggtcgtgctattgcttctaacgaagcacatggtttcgtaaaagttatcgctgagaagaaatatcacgaaatccttggtgttcacatcatcggtccagttgcagctgaaatgattaacgaagcagcaactatcatggaatctgagttgacagttgatgacgtggcagcatcaatccacggtcacccaaccttctctgaagttatgtacgaagccttccttgatgttcttggtgttgcgattcacaacccaccaaaacggaaataa

SEQ ID NO: 57935 - protein, 586 aa, Streptococcus suis 89/1591
MAIEIIMPKLGVDMQEGEIIEWKKQEGDFVNEGDVILEMMSDKTSMELEAEESGVLLKIVHGNGATVPVTEVIAYLGAEGESVEVGSAPAPAEVAQATADLKAAGLEVPAAPAAAPQAPKAELAADEYDMVVVGGGPAGYYAAIRGAQLGGKIAIVEKSEFGGTCLNKGCIPTKTYLKNAEILDGLKIAAERGINLASTNYTVDMDKTVDFKNKVVKTLTGGVQGLLKANKVTIFNGLGQVNPDKTVVIGDKVIKGRSIILATGSKVSRINIPGIDSKLVLTSDDILDLREIPKSLTVMGGGVVGVELGLVYASYGTEVTVVEMADRIIPGMDREVSVELQKVLSKKGMKFLTSVGVSEIVEANNQLTIKLNDGSEIISEKALLSIGRVPQLAGLENLHLELDRGRIKVNAYQETSIPGIYAPGDVNGTKMLAHAAYRMGEVAAENAIHGNHHKAKLDFTPAAVYTHPEIAMVGLTEDQAIEKYGKENILIGRNSFTGNGRAIASNEAHGFVKVIAEKKYHEILGVHIIGPVAAEMINEAATIMESELTVDDVAASIHGHPTFSEVMYEAFLDVLGVAIHNPPKRK

SEQ ID NO: 57936 - DNA, 1389 bp, Sulfitobacter sp. EE-36
  CDS (1)..(1389): transl_table=11
atgtccagctacgatgtcatcatcatcggctccggccccggcggctatgtatccgccatccgctgcgcccaactgggcctcaaaaccgcctgtgtcgagggccgcgagacgttgggcggcacctgcctgaacgtcggctgtatcccgtccaaggcgctgctgcatgccacgcatatgctgcacgaagccgaacacaactttgccgatatgggcctcaagggtaaaagcccttcggtcgattgggcgcagatgcaaacctacaaacagaacacgatcgacaccaataccaaggggatcgagttcctgttcaagaagaacaagatcgactggatcaaaggctgggccaccatccccgaagccggcaaggtcaaggtcggcgacgaggtccacgaggccaagaacatcatcatcgccacagggtccgaaccctctgcccttcccggtgtcgaggttgacgaaaaggtcgtcgtcacctccactggtgcactgtcgctgaacaagatcccgaaaaagctggtcgtgatcggcgcgggcgtcatcgggctcgaactcggctctgtctacgcgcgtctgggggccgaggtgacggtcgtcgaatatctcgatgcgatcacccccggcatggacggcgaagtgcaaaagaactttatgcgtatcctgaaaaagcagggcgtcaactttgtcatgggcgccgccgtacaaggcaccgaagcctccaagaccaaagccaaggtgacctacaagctgcgcaaggatgacagcgaacatacgctggacgccgatgtcgttctcgtctccaccggccgcaagccgttccacgacggtctgggccttgaaggtctgggcgtcgagctgaccaaacgcggccagatcgcggtaagcgacacctgggaaacctcggtcaaaggcatctacgctatcggcgacgtcattgaaggtccgatgctggcgcataaggccgaagacgaaggcatggccgcagcagaggtcgtggcgggcaaacatggccacgtgaactatggcgtgatccccggcgtgatctacacccaccccgaggttgccaatgtcggtgccaccgaagagcagctgaaagaagcaggccgcgcctataaggtcggcaaattcagctttatgggcaacgcccgtgccaaggccgtcttcgcgggcgaaggcttcgtcaagctgatcgccgacaaggaaaccgaccgcatcctcggcgcgcatatcatcggccccggtgccggcgatctgatccacgaggtctgcgttgccatggaattcggtgcctctgccgaggatctggcgatgacctgccacgcgcacccgacctactccgaagcggtccgcgaagcggcgctggcctgtggcgatggcccgatccacatgtaa

SEQ ID NO: 57937 - protein, 462 aa, Sulfitobacter sp. EE-36
MSSYDVIIIGSGPGGYVSAIRCAQLGLKTACVEGRETLGGTCLNVGCIPSKALLHATHMLHEAEHNFADMGLKGKSPSVDWAQMQTYKQNTIDTNTKGIEFLFKKNKIDWIKGWATIPEAGKVKVGDEVHEAKNIIIATGSEPSALPGVEVDEKVVVTSTGALSLNKIPKKLVVIGAGVIGLELGSVYARLGAEVTVVEYLDAITPGMDGEVQKNFMRILKKQGVNFVMGAAVQGTEASKTKAKVTYKLRKDDSEHTLDADVVLVSTGRKPFHDGLGLEGLGVELTKRGQIAVSDTWETSVKGIYAIGDVIEGPMLAHKAEDEGMAAAEVVAGKHGHVNYGVIPGVIYTHPEVANVGATEEQLKEAGRAYKVGKFSFMGNARAKAVFAGEGFVKLIADKETDRILGAHIIGPGAGDLIHEVCVAMEFGASAEDLAMTCHAHPTYSEAVREAALACGDGPIHM

SEQ ID NO: 57938 - DNA, 1389 bp, Roseovarius nubinhibens ISM
  CDS (1)..(1389): transl_table=11
atggcaagctatgacgtcatcgtaatcggtgcaggccccggcggctatgtcgccgccatccgctgcgcgcaactgggactgaaaaccgcctgcgtcgaaggccgcgacacgctcggcggcacctgcctcaacgtcggctgcatcccgtccaaggccctgctgcacgcctcgcatatgctgcatgaggcggaacacaacttcgccaagatggggctcaagggcaaatccccctcggtcgattggcccggcatgctcgcctataaggacgacgtcatcggccagaacaccaaaggcgtcgaattcctcttcaaaaagaacaagatcgactggctcaagggctggggctcgatccccgaagcgggcaaggtcaaggtcggcgacgaggtccatgaggccaagaacatcatcatcgcctccggctccgaggccgcctcgctccccggtgtcgaggtggacgagaaaatcgtcgtgacctccaccggcgcgctggaactgcccaaggtgcccaagaaactcgtggtgatcggcgccggcgtcatcgggctcgaactgggctcggtctatgcccgcctcggctccgaggtcacggtgatcgaatatctcgacgcggtcacccccggcatggatgccgaggtgcagaaaaccgtgcagcgcatgctcaagaaacagggcatgtctttcatcatgggcgccgccgtgcagaaaaccgaggccaccaagaccaaggccaaggtccattacaagctgcgcaaggacgacagcgaacatgtgctcgacgccgatgtggtgctcgtcgccaccggccgcaaaccctataccgacggtctcgggctcgaggcgctcggcgtcgagatgtcccagcgcggccagatcaagaccgacgatcactggcagaccaacgtcaagggcatctatgccatcggcgacgcgatcgacgggccgatgctcgcccacaaggccgaggacgaaggcatggccgccgccgaggtcatcgccggcaaggcgggccatgtgaactatggcgtcatccccggcgtgatctacacccaccccgaggtcgccaccgtcggcaagaccgaggaccagctcaaggaagaaggccgcgcctataaggtcggcaagttctccttcatgggcaatggccgcgccaaggcggtctttgcgggcgacggcttcgtgaaacttctggccgacaaggacaccgaccgcatccttggctgccacatcatcggcccgggcgccggcgacctgatccacgaggtctgcgtcgcgatggagttcggcgcctccgccgaagacctcgccatgacctgccacgcccacccgacctattccgaggcggtgcgcgaggcggcgctggcctgtggcgacggcgcgatccacagctga

SEQ ID NO: 57939 - protein, 462 aa, Roseovarius nubinhibens ISM
MASYDVIVIGAGPGGYVAAIRCAQLGLKTACVEGRDTLGGTCLNVGCIPSKALLHASHMLHEAEHNFAKMGLKGKSPSVDWPGMLAYKDDVIGQNTKGVEFLFKKNKIDWLKGWGSIPEAGKVKVGDEVHEAKNIIIASGSEAASLPGVEVDEKIVVTSTGALELPKVPKKLVVIGAGVIGLELGSVYARLGSEVTVIEYLDAVTPGMDAEVQKTVQRMLKKQGMSFIMGAAVQKTEATKTKAKVHYKLRKDDSEHVLDADVVLVATGRKPYTDGLGLEALGVEMSQRGQIKTDDHWQTNVKGIYAIGDAIDGPMLAHKAEDEGMAAAEVIAGKAGHVNYGVIPGVIYTHPEVATVGKTEDQLKEEGRAYKVGKFSFMGNGRAKAVFAGDGFVKLLADKDTDRILGCHIIGPGAGDLIHEVCVAMEFGASAEDLAMTCHAHPTYSEAVREAALACGDGAIHS

SEQ ID NO: 57940 - DNA, 1443 bp, Synechococcus sp. RS9917
  CDS (1)..(1443): transl_table=11
gtgagcgacgccactttcgacttcgatgtgatcgtgatcggtgcgggttacggcggttttgatgccgccaagcacgctgccgagcacggcctgaaggtggcgatcatcgaaacccgcgacatgggcggtacctgcgtcaatcgcggttgcgtgccctccaaggccctgctggcggccagtggtcgggtgcgggagctggcggatgccgaccatctcgccggctttggcattcatgcggcaccggtgcgcttcgagcgccagaagatcgccgaccatgccaatgctctggttgccacgatcagagccaatctcaccaagaccctggagcgggccggcgtcacgatcatccgcggcaagggccgcctggagggaagccagcgtgtgggggtgcgggaggtcagcggtgtggatcgggtgctgacggcccgcgatgtgatcctggccaccgggtccgatccattcgtgccaccggggatcgacaccgatgggcgcagtgtcttcactagcgatgaggctgtgaatctggaatggctgccccgctggatcgcgatcatcggcagcggctacatcggcctggagttcgccgatgtgtacaccgctcttggctgtgaggtcacgatgatcgaggcgttggatcgggtgatgccgacgtttgaccccgacatcgccaaaatcgcagcccgcaaactgatcgatggccgcgatatcgaggcccgctcgggggtgctggccaaagcgatccgccccggttctcccgttcagatcgagttggtcgacatggacacccgcgagccggtggagacgctggaggtggatgcggtgctggtggccaccgggcgtgtgcccagcagcaaggatctcaatcttgaatcggtcggggtcgagacccagcgaggcttcgtaccgatcgacgacagcatgcatgttctggtgcatggccagcccttgccgcacctctgggctgtgggtgatgtgaccggcaagttgatgctggctcacacggcggccgcccagggcaccgtggccgtcgacaacattcttggccatggccgcaccattgattaccgcagcatcccggcggccaccttcacccaccctgagatcagttccgtggggctgagcgaagccgacgcgaagcagctggctgccgatcagggctttgaactcggcgtggtgcgctcctatttcaaagccaacaccaaggccctggcggaattggaaagtgatggtctgatgaagcttcttttcaacaagacgagcggagaggtgctgggtgcccacctctatggcctgcatgccgccgatctgattcaggagatcgccaatgcggtggccaggcgccagagcgtgacgcagctggcccaggaggtgcacacccatcccaccctgagtgaactggtggaagtggcctacaagcaggctgcaacagcgctgggggcctga

SEQ ID NO: 57941 - protein, 480 aa, Synechococcus sp. RS9917
MSDATFDFDVIVIGAGYGGFDAAKHAAEHGLKVAIIETRDMGGTCVNRGCVPSKALLAASGRVRELADADHLAGFGIHAAPVRFERQKIADHANALVATIRANLTKTLERAGVTIIRGKGRLEGSQRVGVREVSGVDRVLTARDVILATGSDPFVPPGIDTDGRSVFTSDEAVNLEWLPRWIAIIGSGYIGLEFADVYTALGCEVTMIEALDRVMPTFDPDIAKIAARKLIDGRDIEARSGVLAKAIRPGSPVQIELVDMDTREPVETLEVDAVLVATGRVPSSKDLNLESVGVETQRGFVPIDDSMHVLVHGQPLPHLWAVGDVTGKLMLAHTAAAQGTVAVDNILGHGRTIDYRSIPAATFTHPEISSVGLSEADAKQLAADQGFELGVVRSYFKANTKALAELESDGLMKLLFNKTSGEVLGAHLYGLHAADLIQEIANAVARRQSVTQLAQEVHTHPTLSELVEVAYKQAATALGA

SEQ ID NO: 57942 - DNA, 1449 bp, Synechococcus sp. WH 5701
  CDS (1)..(1449): transl_table=11
gtgagcgacgccagtgcagccagctttgacttcgatctgatcgtgatcggtgccggttatggcggcttcgacgccgccaagcacgccgccgaccatggcctgcgcacagcaatcgtggagtcgcgtgacatgggcggcacctgcgtgaaccggggctgcgtgccctccaaggccctgctggccgccagcggccgcgtgcgcgagctggccgacgccgagcacctgcgcggcttcggcatccacgcagctccggtgcgcttcgagcgccagaagatcgccgaccacgccaaccagctggtggccacgatccgcaccaacctcaccaagacgctggagcgtgccggcgccacgatcctgcggggcaagggcaggctggagggcccccagcgggtggcggtgcgcgaagccagcggcatcgagcgggtgtattccgcccgcgacgtgatcatcgccaccggctccgatcccttcgtaccgcccggaatcgaaaccgacggccgcaccgtcttcaccagcgacgaggccatcagcctggagtggctgccccgctggatcgcgatcatcggcagtggctacatcggcctggaattcgccgatgtctatacggccctcggctgtgaggtcacgatgatcgaggccctcgatcgggtgatgcccaccttcgatcccgacatcgccaagatcgccgcgcgcaagctgatcgacggtcgcgacatcgacgcccgctccggagtgctggccaagacggtgaccccgggatcgccggtgcggatcgagctggtggagatggccagccgcgagccggtggagaccctggaggtggatgcggtgctggtggccacaggccgggtgcccgtgagcaagtacctcaacctcgagagcgtcggtgtgacgaccaaccgcggcttcattccggtggatgaggccatgcgggtgctggtggatggcaaccccgtgccgcacctctgggccgtgggcgatgtgaccggcaagatgatgctggcccacaccgctgccgctcaggggagcgtggctgtggacaacatcctgggccaccagcgcctgatcgattaccgctcgattccggcggccactttcacccatcccgagatcagttccgtgggcttgagcgaagccgacgccaaggagctcgccgccgccgatggcttcgagctgggcctggtgcgcagctacttcaaggccaattccaaggcgctggcggagctcgaaagcgacggtctgatgaaactgctgttcaaccgctccagcggtgaggtgctgggggcccacatctacggtctgcatgctgccgacttgatccaggagatcgccaatgccgtggcccggcgccagagcgtgcgcgagctggccaacgaggtgcacacccaccccaccctgagcgaagtggtcgaggtggcctacaagcaggcggccgcggccctggtctga

SEQ ID NO: 57943 - protein, 482 aa, Synechococcus sp. WH 5701
MSDASAASFDFDLIVIGAGYGGFDAAKHAADHGLRTAIVESRDMGGTCVNRGCVPSKALLAASGRVRELADAEHLRGFGIHAAPVRFERQKIADHANQLVATIRTNLTKTLERAGATILRGKGRLEGPQRVAVREASGIERVYSARDVIIATGSDPFVPPGIETDGRTVFTSDEAISLEWLPRWIAIIGSGYIGLEFADVYTALGCEVTMIEALDRVMPTFDPDIAKIAARKLIDGRDIDARSGVLAKTVTPGSPVRIELVEMASREPVETLEVDAVLVATGRVPVSKYLNLESVGVTTNRGFIPVDEAMRVLVDGNPVPHLWAVGDVTGKMMLAHTAAAQGSVAVDNILGHQRLIDYRSIPAATFTHPEISSVGLSEADAKELAAADGFELGLVRSYFKANSKALAELESDGLMKLLFNRSSGEVLGAHIYGLHAADLIQEIANAVARRQSVRELANEVHTHPTLSEVVEVAYKQAAAALV

SEQ ID NO: 57944 - DNA, 1440 bp, Synechococcus sp. WH 7805
  CDS (1)..(1440): transl_table=11
gtgagtgcagccagtttcgacttcgatgtgatcgtgatcggtgccggttacggcggtttcgatgcagcgaagcatgccgctgagcatggcctgaaggtcgcgattatcgagtcgcgcgacatgggcgggacctgtgtgaatcgtggctgcgttccgtccaaggctctgctcgccgcttcaggtcgtgtccgcgagctggcggatgcggagcatctagcgggtttcggaattcatgcggccccggtgcgctttgaacgccagaaaatcgctgatcacgccaaccaactggtggccacgattcgcggaaacctcaccaaaacgctggagaggtcgggggtgacgattattcgtggttccggtcgtctggagtcggctcaagccgtgggcgtgcgggaaatcagtggtgtggacagggtgttgacggccaaggatgtgattctggcgacaggatcagatcccttcgttcctccgggtatcgagaccgatggtcgcagcgtgttcaccagcgacgaggccgtgagtctggagtggcttccccgctggctcgccatcatcggcagtggttatatcggccttgaatttgcagacgtctataccgctctgggctgtgaggtcacgatgatcgaggctcttgatcgggtgatgccgacctttgaccccgatatcagcaggatcgccgcgcgccacctgattgatggacgggatatcgatgcacgagcaggggttctggcccaatcgatcaaaccgggtgcgccggttcagattgaactggtcgacatgcagacacgtgagcctgttgagaccctcgaggtggatgctgttctggttgccaccggtcgtgttcccagcagccgcaccctcaaccttgaaaagctcggagtggagacccagcgtgggtttgtgcccatcaacgatcgcatgcaggtgctcgccaatggtcaaccgattccgcatctttgggcggttggtgatgtcactggaaaattgatgcttgctcacaccgctgccgcccagggaactgtggccatcgacaacatccttggccacaaccgcgagatcgattaccgcagcattccagctgccaccttcacccatccagagatcagttcagtgggactcagtgaagccgatgccaagcaattggcggctgatcagggatttgagctgggtgtggtgcgcagttacttcaaggccaattccaaggctctcgctgaattggatagcgatggactgatgaagcttctctttaacaaggtttcaggagaggtgttaggagcgcacatctatgggttgcatgccgctgatctgatccaggaggtggccaatgccgtggcacgtcgtcagagcgtacgtcagttggccaatgaagtgcacacacacccaacgttgagtgaagtcgtagaagttgcttataaattagctttatctactattgcctga

SEQ ID NO: 57945 - protein, 479 aa, Synechococcus sp. WH 7805
MSAASFDFDVIVIGAGYGGFDAAKHAAEHGLKVAIIESRDMGGTCVNRGCVPSKALLAASGRVRELADAEHLAGFGIHAAPVRFERQKIADHANQLVATIRGNLTKTLERSGVTIIRGSGRLESAQAVGVREISGVDRVLTAKDVILATGSDPFVPPGIETDGRSVFTSDEAVSLEWLPRWLAIIGSGYIGLEFADVYTALGCEVTMIEALDRVMPTFDPDISRIAARHLIDGRDIDARAGVLAQSIKPGAPVQIELVDMQTREPVETLEVDAVLVATGRVPSSRTLNLEKLGVETQRGFVPINDRMQVLANGQPIPHLWAVGDVTGKLMLAHTAAAQGTVAIDNILGHNREIDYRSIPAATFTHPEISSVGLSEADAKQLAADQGFELGVVRSYFKANSKALAELDSDGLMKLLFNKVSGEVLGAHIYGLHAADLIQEVANAVARRQSVRQLANEVHTHPTLSEVVEVAYKLALSTIA

SEQ ID NO: 57946 - DNA, 1443 bp, Oceanospirillum sp. MED92
  CDS (1)..(1443): transl_table=11
atgtctgataaatttgacgttattgtcatcggtgcaggtcctggcggttacgtagcagctattcgtgctgctcagctgggtctgaaaactgcatgtgttgaaaagtgggtagacgagaaaggcggtgcggttcttggcggtacttgtctgaacgtgggttgtatcccatctaaggcgctgctggaatctactcaccagttccacaatgcacagcatgcagatgttcacggtatccaggtttctggtgacgtgacaatggatgttaaagccatggttgctcgcaaggataaaattgtaggcaacctgactatgggtgttgcaggtctattcaaggcgaacggtgttactctgcttcagggcatgggtaaactgcacggcggtaaaaaagtagaagtaactgctgctgatggttcttctgctacttatgaagcggagaatgtgattcttgcttctggttctgtaccagtagagattccgccagcgcctttgactgaaggtttgattctggataacgaaggtgcactgaatatcgatgaaacgcctaagcgtttgggtgttatcggtgcgggtgttatcggtcttgagatgggttctgtatgggcacgtctgggaactgaagttactgttcttgaagctatggacgacttcctggctgcagctgataaagatgtagctaaagaagcggctaagctgtttaagaaacagaaccttgatatcaagctgggtgcgcgttgcacaggcactgaagttatcggtggcaaagaagttaaggttaaatacactgacgccaatggcgatcaggagatcgttgtagataagttgatcgttgcggtaggccgtaagcctcagacgcaaggtctgctagcagacgattctggtgtgaaccttgatgagcgtggtttcatttttgttaatgaacagtgccaaactggtgtaccgggcgtatacgcgattggtgactctgtacgtggtcctatgctggcgcataaggcttctgaagaaggcatcatggttgcggatatcattgcaggccaccatgcacagatgaactacgatgttattcctaacatcatctacactcaccctgaactggcgtgggttggtaaaactgagcaggaactcaaagctgaaggcgctaaaattaaagtgggtaaattcccatttgcagctaacggccgagctatggcagctaacgagactgatggtttcgttaagatgatcgcctgtgaagaaacagatcgcgttttgggcgttcatatcgtaagcggtatcgcttccgagctgatcggtcaggcggcaattgctatggaattctgctcaagtgcagaagacctgcagatgactgtatttgctcacccaacagtgagtgaagcaattcatgaagctgcactagcagttgacggtcacgccattcacatggcgaaccgtaaaaagcgtaagtaa

SEQ ID NO: 57947 - protein, 480 aa, Oceanospirillum sp. MED92
MSDKFDVIVIGAGPGGYVAAIRAAQLGLKTACVEKWVDEKGGAVLGGTCLNVGCIPSKALLESTHQFHNAQHADVHGIQVSGDVTMDVKAMVARKDKIVGNLTMGVAGLFKANGVTLLQGMGKLHGGKKVEVTAADGSSATYEAENVILASGSVPVEIPPAPLTEGLILDNEGALNIDETPKRLGVIGAGVIGLEMGSVWARLGTEVTVLEAMDDFLAAADKDVAKEAAKLFKKQNLDIKLGARCTGTEVIGGKEVKVKYTDANGDQEIVVDKLIVAVGRKPQTQGLLADDSGVNLDERGFIFVNEQCQTGVPGVYAIGDSVRGPMLAHKASEEGIMVADIIAGHHAQMNYDVIPNIIYTHPELAWVGKTEQELKAEGAKIKVGKFPFAANGRAMAANETDGFVKMIACEETDRVLGVHIVSGIASELIGQAAIAMEFCSSAEDLQMTVFAHPTVSEAIHEAALAVDGHAIHMANRKKRK

SEQ ID NO: 57948 - DNA, 1440 bp, marine gamma proteobacterium HTCC2143
  CDS (1)..(1440): transl_table=11
atgtcaaaattcgacgttgtcgtcattggttccggccctgccggttatgttgccgcgataagggcgacgcagctgggtttaaccgttgcttgcctggaaaaagaaaccaataaaatgggtaaacccaactatggtggtacctgtttaaatgtcggctgtattccttcaaaagcgctgctggatagctcacacaaatatgttgaagcgatagaaaactttggtcttcacggcattacggcaaaagagttgtcgatagacattccacaaatgatagcgcggaaagacagtattgttgatcagctaaccggtggcgtggggcagttatttaaggccaacggggttactgctattgaaggttcgggcagagttcttgccgggaaacaagtagaagtcactaagcgcgacggcagtgttgaaatactcgatgcgggtaacattattattgctgctggatctgtacctatagcaattcctccgacgcctatcgatgatgatgtcattgttgattcaacgggggcgcttgaatttctcgaggtgcccaagcgtgtcggcgtcattggcgctggtgtaattggcttagagctggggagcgtatggggacggttgggggctaaggttgttgtgctggaggcactcgaagactttttacccgctatagatcaacagatcgccaaggaagcgaagaaattgttcgttaagaagcagggtttggacatccgcttaggggcaagagtgacggcctcggaggtgaaagacgggcaggtgaccgttacttatattgataaggatggtgaaaagcaggaagtgttcgacaagttgattgttgccgtcggtaggcgtccacaaagtcaaaacttactcgctggtgattgtaatgtaacgatggatgaacgcggtttcatttccgtgaatgactactgtgaaactgaagctcccggaatctacgctgttggagatattgttcgtggtccgatgttagcccataaaggttctgaagaaggggttatggttgcagagaggatcgccggtcaaaaagcggcaatgaattacgattgtattcccaatgttatctatacacatcccgaaattgcagccgtgggccaaactgaggagcagctgaaggcagatggtattgagtacaaagtcggcgtatttccttttgctgctagcggcagggctctggctgcgaatgacacagcaggaatggtgaagatgattgcacatgccgaaacagaccgtattttgggctgtcatattattgggccaagtgctgcagatttggtgcaacaaatggtgattgcaatggaatttggatccagtgctgaagatatcgcgctgaccgtatttagtcatcctgccttatctgaggctgttcacgaggccgcattggccgtcgatggacatgccatccatatcgcaaacaaacgtaaacgcaagtaa

SEQ ID NO: 57949 - protein, 479 aa, marine gamma proteobacterium HTCC2143
MSKFDVVVIGSGPAGYVAAIRATQLGLTVACLEKETNKMGKPNYGGTCLNVGCIPSKALLDSSHKYVEAIENFGLHGITAKELSIDIPQMIARKDSIVDQLTGGVGQLFKANGVTAIEGSGRVLAGKQVEVTKRDGSVEILDAGNIIIAAGSVPIAIPPTPIDDDVIVDSTGALEFLEVPKRVGVIGAGVIGLELGSVWGRLGAKVVVLEALEDFLPAIDQQIAKEAKKLFVKKQGLDIRLGARVTASEVKDGQVTVTYIDKDGEKQEVFDKLIVAVGRRPQSQNLLAGDCNVTMDERGFISVNDYCETEAPGIYAVGDIVRGPMLAHKGSEEGVMVAERIAGQKAAMNYDCIPNVIYTHPEIAAVGQTEEQLKADGIEYKVGVFPFAASGRALAANDTAGMVKMIAHAETDRILGCHIIGPSAADLVQQMVIAMEFGSSAEDIALTVFSHPALSEAVHEAALAVDGHAIHIANKRKRK

SEQ ID NO: 57950 - DNA, 1545 bp, Aspergillus niger
  CDS (1)..(1545)
atgttccggagtcttttgccgcgggcgactccgcgggttgccctccgctgtgccggtcccaaggccgttccctctaccttcgtcgctgctccttctctcgcctcctttggacgcacacaacgtggctatgcctctgagtcaggcgaacacgatcttgtcatcatcggtggtggtgtcgctggttacgttgctgccatcaaggccggtcaggaaggtctgaagaccgcatgtatcgagaagcgtggccgtctgggcggtacctgcctgaacgtcggctgtatcccctcgaaatccctgctcaacaactcccacctctaccaccagattctccacgacacgaaaaagcgcggtatcgaggtcggtgatgtgaagctgaaccttgagcagatgatgaaggccaaggacacctccgtcgagggtctgactaagggtatcgaattcttgttcaagaagaacggtgtcgactacatcaagggtactggtgctcttgttgaccagaacaccgtcaaggttaacctccttgagggtggtgagcagactctgcgcggaaagaacatcctcattgccaccggtagtgaggctactcctttccccggcctcaacattgacgagaagagaatcatcaccagcactggtgccctctccctcaaggaggtccccaagaagatgatcgtcatcggtggtggaatcattggtctggaaatggcctctgtttggtcccgcctcggctctgaggttaccgtcgtcgagttcctgaaccagatcggtggtcccggcatggacgccgacatcgccaagcaggcccagaagatcctccagaagcagggtatcaagttcaagaccggcaccaaggttaccaagggtgacgacagcggtgctaccgtcgctctgagcgttgaggccgccaagggtggtaaggaggagaccctcgacgctgacgttgtcctcgtcgccatcggtcgccgcccctacaccgagggtctcaacctcgagagcgtcggtgtcgagaaggacgagcgcggccgtctggtcatcgaccaggagtaccgcaccaagatccccaacatccgcgtgatcggtgactgcactttcggacccatgcttgcccacaaggccgaggaggaggccgtcgctgccatcgagtacatcaagaagggttacggccacgtcaactacggctgcatccccagcgtcatgtacacccaccccgaggtcgcttgggtcggccagaacgagcaggaagtcaaggctgccggcatcaagtaccgcgtcggtaccttccccttcagcgccaactcccgtgccaagaccaatctcgagactgagggtcaggtcaagttcatcgccgatgctgagaccgaccgcatcctcggtgtccacatcatcggccccaacgccggtgagatgatcgccgaggccaccctggctgtcgagtacggtgcctcttgcgaggacattgctcgtacctgccacgctcaccctaccctggctgaggccttcaaggaggctgccatggctacctactccaaggccatccacttctaa

SEQ ID NO: 57951 - protein, 514 aa, Aspergillus niger
MFRSLLPRATPRVALRCAGPKAVPSTFVAAPSLASFGRTQRGYASESGEHDLVIIGGGVAGYVAAIKAGQEGLKTACIEKRGRLGGTCLNVGCIPSKSLLNNSHLYHQILHDTKKRGIEVGDVKLNLEQMMKAKDTSVEGLTKGIEFLFKKNGVDYIKGTGALVDQNTVKVNLLEGGEQTLRGKNILIATGSEATPFPGLNIDEKRIITSTGALSLKEVPKKMIVIGGGIIGLEMASVWSRLGSEVTVVEFLNQIGGPGMDADIAKQAQKILQKQGIKFKTGTKVTKGDDSGATVALSVEAAKGGKEETLDADVVLVAIGRRPYTEGLNLESVGVEKDERGRLVIDQEYRTKIPNIRVIGDCTFGPMLAHKAEEEAVAAIEYIKKGYGHVNYGCIPSVMYTHPEVAWVGQNEQEVKAAGIKYRVGTFPFSANSRAKTNLETEGQVKFIADAETDRILGVHIIGPNAGEMIAEATLAVEYGASCEDIARTCHAHPTLAEAFKEAAMATYSKAIHF

SEQ ID NO: 57952 - DNA, 1779 bp, Glycine max
  CDS (9)..(1511)
gaaagatcatggcgatggcaaacttggctcgacggaagggttacgccgtcgttttgtcgtcgaggtcgtcgctttgtctgacaaggtggagggggttcgcgtccggatctgacgaaaacgacgtcgtggtcatcggcggcggtcccggcggctacgtggcggccattaaagcggcgcagctgggtctgaaaaccacttgcatcgaaaaacgtggcactctcggcggtacctgcctcaacgtcggatgcatcccttccaaggcacttttgcattcttcccacatgtatcatgaggctaaacatgcatttgccaaccatggggtcaagttttcatctgtcgaggttgatttgccagccatgatggcccaaaaagataaagcagtttctaatcttaccaagggtattgaaggtctattcaagaaaaacaaggtaaactatgtcaaaggttatggcaaattagtttcaccatctgaggtctctgtggacaccactgaaggtggaaatactgttgtgaaaggcaagcatattataattgccactggctcggatgtgaaatctctgcctgggatcactattgatgaaaagaaagttgtttcatcaacgggagctcttgctttgactgaaatccccaagagactcatagtcattggggcaggctacattgggctggaaatgggctcagtatggggccgacttggctccgagataacagttgttgagtttgcatcggagattgttccaaccatggatgcggaggtccggaagcagtttcagcgttctcttgagaagcaaggcatgaaattcaagctgaagactaaggtggttggagttgatacttctggggatggtgtgaagctaactcttgaaccagcagctggtggtgatcagactacacttgaagcagatgttgtcctggtatctgctggtaggaccccattcactgccgaacttgggttggacaagataggagttgaaactgacaagattggacggattttggtaaatgaaagatttgccacaaatgtctctggtgtttatgcaattggagatgtaattccaggcccaatgttggcacacaaggcggaagaagatggtgttgcttgtgttgagtacatagctggtaaggttggtcatgtggattatgacaaagtccctggcgttgtctatacaatgcccgaggttgcatctgttgggaagacagaggagcaggtgaaggaacttggagttgaataccgtgttggcaagttcccattcctggctaatagcagagctaaggcaattgacaatgctgaaggactggtgaagatattggctgaaaaggagacagacaagatattgggagtgcacattatggcgcccaatgcaggagagcttattcatgaagctgcaatagcactacagtatgatgcatcaagtgaggacattgcacgtgtgtgccatgcacatccaacaatgagcgaggctgtgaaagaagccgcaatggccacttatgacaagcccattcacatctaaagagacggttgctactttcttcttgttatcatttttgtccaagaattttacaatgacttggagatgataccacctctgttaaatttagattcagatttttaaatgcaaattagccccttgtttacttgtttgcataataagaggaatggttgtgttgttcttatccttgttgaataatatatatatctccccttctctctgggacaatattgtaattctgacagggtgaagacaacttaatggaagtgtgggacggttttgattaaac

SEQ ID NO: 57953 - protein, 500 aa, Glycine max
MAMANLARRKGYAVVLSSRSSLCLTRWRGFASGSDENDVVVIGGGPGGYVAAIKAAQLGLKTTCIEKRGTLGGTCLNVGCIPSKALLHSSHMYHEAKHAFANHGVKFSSVEVDLPAMMAQKDKAVSNLTKGIEGLFKKNKVNYVKGYGKLVSPSEVSVDTTEGGNTVVKGKHIIIATGSDVKSLPGITIDEKKVVSSTGALALTEIPKRLIVIGAGYIGLEMGSVWGRLGSEITVVEFASEIVPTMDAEVRKQFQRSLEKQGMKFKLKTKVVGVDTSGDGVKLTLEPAAGGDQTTLEADVVLVSAGRTPFTAELGLDKIGVETDKIGRILVNERFATNVSGVYAIGDVIPGPMLAHKAEEDGVACVEYIAGKVGHVDYDKVPGVVYTMPEVASVGKTEEQVKELGVEYRVGKFPFLANSRAKAIDNAEGLVKILAEKETDKILGVHIMAPNAGELIHEAAIALQYDASSEDIARVCHAHPTMSEAVKEAAMATYDKPIHI

SEQ ID NO: 57954 - DNA, 1731 bp, Vigna unguiculata
  CDS (58)..(1557)
tagcttgttactctcctattacgacgacgcagatttagttcaatttgttcgattgcgatggctaggaagatgcttatcgacggtgaggctgaatcggttccaggtgtagaacaagggacgaattttgacttcgacttgtttattattggggctggaagtggtggcgttcgtgctgctagattttcatcgaattacggagctaaggtgggaatttgtgagcttccgtttaatcccattagctcagaaacaattggaggagttggtggaacgtgtgttattcgtggttgtgttcccaaaaagattttggtctatggagcatcttatggaggtgaactcgaggatgccaggaattatgggtgggaattgaatgagaaggttgacttcaattggaagaagctcttgcaaaagaagacagatgaaataaacagattaaatggaatttacaagaggctgttatccaatgcgggggttaaattatttgaaggcgagggaaagatagttggtccgaatgaggttgaggtgacacaattggatgggacaaaactgtcctatactgctaagcacatattaattgcaactggtagcagggctcaacgtccaaatattccagggcaggagttgggtataacatctgacgaggcactaagtttagaggatcttcctaaaagagctgtggttcttggaggaggttatattgcagtggaatttgcatctatatggcgtgggatgggttctgaagttgatttagttttcagaaaggaacttctgctaagaggttttgatgatgaaatgagagctgtagttgcaagaaatcttgaaggcaggggaattaatttacacccaaggaccaatttgactcagttgatcaaaacagaaaatggaattaaagttattacagatcacggtgaggaactgattgcagatgttgtactatttgccactgggagggctcctaattctaagaggttgaatttagaagctgtaggtgttgaggttgacaaagctggagcaataaaggtggatgagtattcacgcacaagcatacctagtatatgggctgtcggtgatgtcacaaacagaatgaatcttacacccgtggccttgatggaggcatcgtgctttgcaaaaacagtatttaatgggcaagcaagcaagccagactacagtaatattgcatgtgcagtgtttagcattccaccactttctgtagttggtctcagtgaggagcaggcaatagagcaaaccaaaggtgatctgttgatttttacatcgaccttcaatcctatgaaaaacaccatctctgggcgacaagaaaaaactgaagtcatgaagcttattgttgatgccgagaccgataaggttcttggagcctcaatgtgtggacctgatgcacctgaaattatacagggtattgctattgcattgaagtgtggagctaccaaggaacagtttgatagcacggtgggaatacacccatcggcggcagaagaatttgtaaccatgcggacagtgacacggcgcgtaactggaagtggcaaacccaagaccaatttgtaagagtcttctttagtgaaaataatttgtgtttgatgggtagtgtaaagctgcaaattacttcctttggtgacctttctataaaatggcctttctattgtcacatccattatatttcacattccttagtggaaacagtttggttcattatgtaacaatgttaaataaattaggacg

SEQ ID NO: 57955 - protein, 499 aa, Vigna unguiculata
MARKMLIDGEAESVPGVEQGTNFDFDLFIIGAGSGGVRAARFSSNYGAKVGICELPFNPISSETIGGVGGTCVIRGCVPKKILVYGASYGGELEDARNYGWELNEKVDFNWKKLLQKKTDEINRLNGIYKRLLSNAGVKLFEGEGKIVGPNEVEVTQLDGTKLSYTAKHILIATGSRAQRPNIPGQELGITSDEALSLEDLPKRAVVLGGGYIAVEFASIWRGMGSEVDLVFRKELLLRGFDDEMRAVVARNLEGRGINLHPRTNLTQLIKTENGIKVITDHGEELIADVVLFATGRAPNSKRLNLEAVGVEVDKAGAIKVDEYSRTSIPSIWAVGDVTNRMNLTPVALMEASCFAKTVFNGQASKPDYSNIACAVFSIPPLSVVGLSEEQAIEQTKGDLLIFTSTFNPMKNTISGRQEKTEVMKLIVDAETDKVLGASMCGPDAPEIIQGIAIALKCGATKEQFDSTVGIHPSAAEEFVTMRTVTRRVTGSGKPKTNL

SEQ ID NO: 57956 - DNA, 1707 bp, Medicago truncatula
  CDS (1)..(1707)
atgacgctatcaccaatctcactatctttctcctcccccaccaccatttcaggaccacaccactgttccctcttcaacaccaccaccactgccacgtcactcactctccgtttctgtagtctcagacgcgaagccttcgctttcacttccctcagccatcgctcaccacgcaaccaccacctccgcctgacacacctcaatgccatatccgccgcaatttcaaataacggcactcctcctaaatcattcgattacgatttgctcattattggagctggtgttggtggtcacggtgccgctcttcacgccgtcgagaagggtttgaaaacagcaattgttgagggagatgttgtgggagggacatgtgtcaacagaggttgtgttccttctaaagctctattggctgtaagtggtcgtatgcgagacctcaggaatgatcatcatttgaagtctctcggcattcaggtttctaatgctggatatgacagacaagcagttgctgaccatgctaataatcttgcttcaaaaattcgcggtaacttgaccaactcgatgaaagcacttggagtcgatatactcactggttttggaactattttgggtcctcaaaaggtgaaaattggctcttccaacaatgtagtaactgcaaaagacatcatcattgccactggttccgttccttttgttcctaagggaattgaagtcgatgggaagactgtgatcaccagtgaccatgcacttaagttggagacagttcctgactggatagcaattgttggaagtggttatatcggccttgaattcagtgatgtatatacagcacttggaagtgaggttacttttgttgaagctttagatcagcttatgcctggatttgatcctgaaattagcaagttggctcagagggttctcataaatcccaggaatattgactatcatactggcgtttttgcatccaagataactcctgcaagagatggaaaacctgtaatgattgagctcattgatgcaaaaaccaaggagcaaaaggaaactttagaggtggatgctgcattaatagcaactggaagggctccattcacacaaggactggggttggagaatattgacgttgcaacacagcgtggttttgttcccgtggatgagcgtatgagagtaattgatgcaaatggaaacctggttcctcatttatattgtattggcgatgcaaatggcaagatgatgcttgctcatgctgccagtgcacaaggaatttcagtggttgagcaagtcactggaagagatcatgtgctcaatcatttaagcataccagcggcttgtttcactcatcctgaaatcagcatggttggtttgacagagcctcaagcaagggagaaaggtgaaaaagaagggtttgacgtaagtattgccaaaacaagttttaaagctaatacaaaagccttagcagaaaatgaaggagagggtcttgccaagttaatatacagacctgacaacggagagatactaggagttcatatatttgggttgcatgctgcagatctcatccacgaggcttcaaatgcaatagcattagggacacatattcaggatattaaatttgcagttcatgcccatccaactttgtctgaggtgcttgatgagctatttaaatcagcaaaggttaaagcacaagcttctgacccagtaaaggaaccagtttcagtctaa

SEQ ID NO: 57957 - protein, 568 aa, Medicago truncatula
MTLSPISLSFSSPTTISGPHHCSLFNTTTTATSLTLRFCSLRREAFAFTSLSHRSPRNHHLRLTHLNAISAAISNNGTPPKSFDYDLLIIGAGVGGHGAALHAVEKGLKTAIVEGDVVGGTCVNRGCVPSKALLAVSGRMRDLRNDHHLKSLGIQVSNAGYDRQAVADHANNLASKIRGNLTNSMKALGVDILTGFGTILGPQKVKIGSSNNVVTAKDIIIATGSVPFVPKGIEVDGKTVITSDHALKLETVPDWIAIVGSGYIGLEFSDVYTALGSEVTFVEALDQLMPGFDPEISKLAQRVLINPRNIDYHTGVFASKITPARDGKPVMIELIDAKTKEQKETLEVDAALIATGRAPFTQGLGLENIDVATQRGFVPVDERMRVIDANGNLVPHLYCIGDANGKMMLAHAASAQGISVVEQVTGRDHVLNHLSIPAACFTHPEISMVGLTEPQAREKGEKEGFDVSIAKTSFKANTKALAENEGEGLAKLIYRPDNGEILGVHIFGLHAADLIHEASNAIALGTHIQDIKFAVHAHPTLSEVLDELFKSAKVKAQASDPVKEPVSV

SEQ ID NO: 57958 - DNA, 1539 bp, Aspergillus oryzae
  CDS (1)..(1539)
atgttccggactctcttgccgcgggctgcaccgcgggctgccctccgcactgctcgccctcagtctgtcccttctaacttcgtcgctgctcctaccctctccttcttctcgaaacgtggctacgcctccgagtctggtgaacatgaccttgttatcatcggtggtggtgtcgctggatacgttgctgctatcaaggccggtcaagagggcttgaagactgtctgtatcgagaagcgtggccgtcttggaggcacctgcttgaacgtcggctgtatcccctcgaaatctctcttgaacaactcccacctttatcaccagatcctccacgacacgaaaaagcgcggtattgaggtcggtgatgtcaagctgaacctcgagcagatgatgaaggccaaggacacttccgtcgagggtctgacgaagggtattgagttcttgctcaagaagaacggtgtcgactacgtcaagggtactggtgctcttgttgatcctaacactgtcaaggtgaacctgctcgagggtggtgaacaaacccttcgcggaaagaacatccttatcgccaccggtagcgaggccacccctttccccggcctgaacatcgacgagaagcgcatcatcactagcaccggtgctctttcgctacaggaagttcccaagaagatggttgtcattggtggtggtatcatcggtttggagatggcttccgtttggtctcgtctcggtgctgaagttaccgttgttgagttcttgaaccagatcggtggacctggtatggatgcagagattgccaagcaggctcagaagatcctgtcgaagcagggtatcaagttcaagactggcaccaaggtcaccaagggtgatgacagcggcgcttctgtttctattagcgtcgagtctgccaagggcggcaaggaggagaccctagacgctgacgttgtcctggttgccatcggtcgcagaccttacaccgagggtcttggcttggagaacgttggtattgagaaggacgagcggggccgtctggtcatcgaccaggagtaccgcactaaggttcctcacatccgtgtcgttggtgactgcacttttggccccatgcttgcccacaaggctgaggaggaggctgttgctgctgttgagtacatcaccaagggttacggtcacgtcaactacggcgtcatccccagtgtcatgtacactcaccccgaagttgcctgggttggccagaacgaggccgaagtcaaggccgctggcatcaaataccgcgtcggtactttccccttcagcgccaactcccgtgccaagaccaacctcgacactgagggtcaggtcaagttcatcgctgacgctgagactgaccgtgtgctcggtgttcacatcattggccccaacgctggtgagatggttggtgaggctactctggccgttgagtacggtgcttcttgcgaggacatcgcccggacgtgtcacgctcaccccactctctccgaagctttcaaggaggctgccatggctacctactccaaggccatccacttctaa

SEQ ID NO: 57959 - protein, 512 aa, Aspergillus oryzae
MFRTLLPRAAPRAALRTARPQSVPSNFVAAPTLSFFSKRGYASESGEHDLVIIGGGVAGYVAAIKAGQEGLKTVCIEKRGRLGGTCLNVGCIPSKSLLNNSHLYHQILHDTKKRGIEVGDVKLNLEQMMKAKDTSVEGLTKGIEFLLKKNGVDYVKGTGALVDPNTVKVNLLEGGEQTLRGKNILIATGSEATPFPGLNIDEKRIITSTGALSLQEVPKKMVVIGGGIIGLEMASVWSRLGAEVTVVEFLNQIGGPGMDAEIAKQAQKILSKQGIKFKTGTKVTKGDDSGASVSISVESAKGGKEETLDADVVLVAIGRRPYTEGLGLENVGIEKDERGRLVIDQEYRTKVPHIRVVGDCTFGPMLAHKAEEEAVAAVEYITKGYGHVNYGVIPSVMYTHPEVAWVGQNEAEVKAAGIKYRVGTFPFSANSRAKTNLDTEGQVKFIADAETDRVLGVHIIGPNAGEMVGEATLAVEYGASCEDIARTCHAHPTLSEAFKEAAMATYSKAIHF

SEQ ID NO: 57960 - DNA, 1740 bp, Glycine max
  CDS (22)..(1593)
cggccgcaaaaaagaaagatcatggcgatggcaaacttggctcgacggaagggttacgccgtcgttttgtcgtcgaggtcgtcgctttgtctgacaaggtggagggggttcgcgtccggatctgacgaaaacgacgtcgtggtcatcggcggcggtcccggcggctacgtggcggccattaaagcggcgcagctgggtctgaaaaccacttgcatcgaaaaacgtggcactctcggcggtacctgcctcaacgtcggatgcatcccttccaaggcacttttgcattcttcccacatgtatcatgaggctaaacatgcatttgccaaccatggggtcaagttttcatctgtcgaggttgctttgccagccatgatgggccaaaaagataaagcagtttctaatcttacccaaggtattgatggtctatttcagaagaataaggtaacctatgtcaaaggatatggcaaattagtttcgccgtctgaaatctctgtagacaccactgaaggtgaaaatactgtggttaagggcaagcatattattattgccactggttcggatgtgaaatctctgcccggtgtcactattgatgaaaagaaaattgtttcatcaactggggctcttgctttgtctgaaatccccaagaagctcgtagtcattggggcaggctacattgggctggaaatgggctcagtatggggccgaattggctccgaggtaacagttgttgagtttgcatcggagattgttccaaccatggatgcagacatccggaagcagtttcagcgttctcttgagaagcaaggcatgaaattcaagctgaagaccaaggtggttggagttgatacttctggggatggtgtgaagctaactgttgaaccatccgctggcggtgaacagaccataattgaagcagatgttgtccttgtttcggctggtagaactccattcacttctggacttaatttggataagataggagttgagactgacaagttaggacggattttggtaaatgaaagattttcaacaaatgtctctggtgtctatgcaatcggagatgtgattccaggtccaatgttggcacacaaggcagaagaagatggtgttgcttgtgttgagtacttaactggtaaggttggccatgtggattatgacaaagtccctggcgttgtctatacaaaccctgaagttgcatctgttgggaagacagaggagcaggtgaaggaaactggagttgaataccgtgttggcaagttcccattcctggctaatagcagagctaaggcaattgacaatgctgaaggactggtgaagataattgctgaaaaggagacagacaagatattgggagtgcacattatggcgcctaatgcaggagaactcattcatgaagctgccatagcactacagtatgatgcatcaagtgaggacattgcacgtgtgtgccatgcacatccaacaatgagcgaggctgtgaaagaagccgcaatggccacttatgacaagccgcattcacatctaaagagctggttgctactttcttctcttgttttcatttttgtccaagaatttacaatgacttggagatgataccacctctgttaaatttagattcaaatttttaaatgcaaattagccccttgtttacttgtttgcataataagaggaatggttgtgttgttcttatccttgttgaataaattatatatctccccttctctctgggacaatattgta

SEQ ID NO: 57961 - protein, 523 aa, Glycine max
MAMANLARRKGYAVVLSSRSSLCLTRWRGFASGSDENDVVVIGGGPGGYVAAIKAAQLGLKTTCIEKRGTLGGTCLNVGCIPSKALLHSSHMYHEAKHAFANHGVKFSSVEVALPAMMGQKDKAVSNLTQGIDGLFQKNKVTYVKGYGKLVSPSEISVDTTEGENTVVKGKHIIIATGSDVKSLPGVTIDEKKIVSSTGALALSEIPKKLVVIGAGYIGLEMGSVWGRIGSEVTVVEFASEIVPTMDADIRKQFQRSLEKQGMKFKLKTKVVGVDTSGDGVKLTVEPSAGGEQTIIEADVVLVSAGRTPFTSGLNLDKIGVETDKLGRILVNERFSTNVSGVYAIGDVIPGPMLAHKAEEDGVACVEYLTGKVGHVDYDKVPGVVYTNPEVASVGKTEEQVKETGVEYRVGKFPFLANSRAKAIDNAEGLVKIIAEKETDKILGVHIMAPNAGELIHEAAIALQYDASSEDIARVCHAHPTMSEAVKEAAMATYDKPHSHLKSWLLLSSLVFIFVQEFTMTWR

SEQ ID NO: 57962 - DNA, 1737 bp, Clostridium magnum
  CDS (1)..(1737): transl_table=11
atggcaaagattgtagttatgccgaaactagggttgacaatgacagaaggtacattggtgacatggaaaaaggctgaaggagatcaagttaaagtcggagaaattttatttgaggtatcaacagataagctgactaatgaagttgaatcaagtgatgaaggaatagtaagaaaattgcttgtaaatgaaggagatgtagttgagtgcctgaacccagttgcaattattggtagtgctgatgaagatatatcttctttattaaatggttcatctgaaggaagtggatcagcagagcaaagtgatacaaaagcacctaaaaaagaagttgaagctgttaaaggtggagacaatttagtagttataggcgggggtccagggggatatgttgcagctattcgtgctgctcaattgggagcaaaagttacattaattgagaaggaatcccttggaggaacatgtttaaatgtaggctgcatacctactaaggttttattacattcttcacagctgcttacagaaatgaaggaaggggacaaacttggaattgatattgagggaagcatagtagttaattggaaacatattcaaaaaagaaagaagattgttataaaaaaattagtttcaggggtttctggattgttaacttgtaataaagtcaaagtaattaaaggaacagcgaaatttgaatcaaaggatactattttagtgacaaaagaagatggggtagcggagaaagttaactttgacaatgccataattgcaaccggttcaatgccctttataccagaaatagaaggcaataagctgtcaggggtaattgatagtacaggagcattaagtttagagagtaaccctgaaagtattgcaattatcggtggaggagtaataggggtagaatttgcaagtattttcaactctttaggctgtaaagtaagtatcattgagatgcttccacatattttaccgccaatggacagggaaatttcagaaatagctaaggcaaagctaatcagggatggaattaatattaataataattgtaaggttactagaattgaacagggtgaagatggactaaaagtgtcatttataggtgataaaggtgaagaaagcatagatgttgaaaaagtactcattgcagtagggcgacgttcaaatatcgaaggtctagatgtagaaaagattggagtaaagactgagggaggatctatcatagtcaatgataaaatggaaaccaatgttgaagggatttatgcaataggtgattgtaccggcaagattatgctagctcatgtagcctcagatcaaggtgttgtggcagcggagaatataatgggccaaaataaaaaaatggattataaaactgtacctgcctgtgtatatactaagccagagttagcttctgttggtctaactgaagaacaggcaaaagaaaagggaattgattataaagtaggtaaattccaattagcagctaatggaaaatctcttataatgaatgaaactggaggagttattaaaattatcacagacaaaaagtacgaggagattttaggtgttcatatacttggacctagagctacagatttgataacggaagcagccttagctttaaggttagaagctactttagaagaaataatcacaacagtacatgcccatccaactgtaggagaagcgatgaaggaagcagctctagcagtaaataatcaagctattcatatgatgaacaagtag

SEQ ID NO: 57963 - protein, 578 aa, Clostridium magnum
MAKIVVMPKLGLTMTEGTLVTWKKAEGDQVKVGEILFEVSTDKLTNEVESSDEGIVRKLLVNEGDVVECLNPVAIIGSADEDISSLLNGSSEGSGSAEQSDTKAPKKEVEAVKGGDNLVVIGGGPGGYVAAIRAAQLGAKVTLIEKESLGGTCLNVGCIPTKVLLHSSQLLTEMKEGDKLGIDIEGSIVVNWKHIQKRKKIVIKKLVSGVSGLLTCNKVKVIKGTAKFESKDTILVTKEDGVAEKVNFDNAIIATGSMPFIPEIEGNKLSGVIDSTGALSLESNPESIAIIGGGVIGVEFASIFNSLGCKVSIIEMLPHILPPMDREISEIAKAKLIRDGININNNCKVTRIEQGEDGLKVSFIGDKGEESIDVEKVLIAVGRRSNIEGLDVEKIGVKTEGGSIIVNDKMETNVEGIYAIGDCTGKIMLAHVASDQGVVAAENIMGQNKKMDYKTVPACVYTKPELASVGLTEEQAKEKGIDYKVGKFQLAANGKSLIMNETGGVIKIITDKKYEEILGVHILGPRATDLITEAALALRLEATLEEIITTVHAHPTVGEAMKEAALAVNNQAIHMMNK

SEQ ID NO: 57964 - DNA, 1407 bp, Bartonella henselae
  CDS (1)..(1407): transl_table=11
atgtcttatgatgtagttgtgatcggggcaggtccaggtggttatgtggcagcaatcaaagcagcacagttggggcttaaaacagcgattattgaaaaacgtatgacactaggtggtacatgtctcaatgttggctgtattccttctaaagcattgttgcatgcttcagaagtctttgctgagacgcaacatggttttgaaacgcttggtatttctattgcaaaatctaagcttaatcttgaacaaatgatggcgcataaaaaagctgttgtcactgcaaatacgagtggtgtttcttttttgatgaagaaaaataaaattgacactttttttggtactgccaaaattttaaacgcaggtcagatcgaagttgttgcaagggatggtaacaaacaaacgattgaaacaaaaaatattattattgctactggttcagagagctcaggcattccgggtgtgaatgttgaaattgatgaaaaggttattgtatcctctacaggagcacttgctcttgaaaaagttccaacgcgtatgattgttgtgggcgctggtgttattggttcagagcttggttcggtttggagccgtttaggggctaaagttaccattattgaatatcttaataaagttttaggatcaatggatggtgaagtctcacggcaattccaaaaaataatggaaaaacaaggaattgaatttaagattggtgcaaaagtaacagctattacacaatctggttcagttgctcaggtgacttttgaggctgttaagggtggtccttctgaaactctagaagctgatgtcgtgcttattgctactggacgttttccatatacagaaggacttggcttggaagaggctggtgttcagttggatgaacgggggtttattacaattgatgcgcattggcaaacgaatattccaggagtttatgcgattggtgatgtcgttaaaggaccaatgttggcacataaggcagaggaagaaggcgttgctgtggcagaaattttagcgggtcaaaagggacatgttaattttgatgtcattcctagtgttgtttacacacagccagaaattgctagtgtaggcaagacagaagaagaacttaaagcagccggtatcgattataatgttggaaaatttcctttcatggccaatggtcgtgcgcgtgccatgcaaaagagtgatggatttgttaaaattcttgctgataaaaagacagatcgggttttgggcggacatattttggggtttggtgctggtgaaatgattcatgaaattgcagttttaatggaatttggtggttcatcagaagatctgggacgttgttgtcatgcgcatcctactttatcagaggcagtgcgcgaagcagctttggcaacatttgctaaaccccttcatatctag

SEQ ID NO: 57965 - protein, 468 aa, Bartonella henselae
MSYDVVVIGAGPGGYVAAIKAAQLGLKTAIIEKRMTLGGTCLNVGCIPSKALLHASEVFAETQHGFETLGISIAKSKLNLEQMMAHKKAVVTANTSGVSFLMKKNKIDTFFGTAKILNAGQIEVVARDGNKQTIETKNIIIATGSESSGIPGVNVEIDEKVIVSSTGALALEKVPTRMIVVGAGVIGSELGSVWSRLGAKVTIIEYLNKVLGSMDGEVSRQFQKIMEKQGIEFKIGAKVTAITQSGSVAQVTFEAVKGGPSETLEADVVLIATGRFPYTEGLGLEEAGVQLDERGFITIDAHWQTNIPGVYAIGDVVKGPMLAHKAEEEGVAVAEILAGQKGHVNFDVIPSVVYTQPEIASVGKTEEELKAAGIDYNVGKFPFMANGRARAMQKSDGFVKILADKKTDRVLGGHILGFGAGEMIHEIAVLMEFGGSSEDLGRCCHAHPTLSEAVREAALATFAKPLHI

SEQ ID NO: 57966 - DNA, 1707 bp, Zinnia elegans
  CDS (1)..(1707)
atggcgacttctgcaacaacaccaaaactcaccacaactctctcatcatcaactcttcaaaccttcatcttccgacacaaaaaatcctcaatcctcaaccgttcttcattcctcatcactaactcaccatcatcatcatcataccacacacctactttcagtctctccaaaaaaaccctaggttttctctccgattacaaacctaagtctcgccgattcgtcacccgagccgagtcgtcgactaacggcgccgagccgcgtagctacgacttcgacttgtttactatcggcgctggtagtggcggtgttagggcttctcgttttgctgccaattttggggcttcggttgctgtttgtgagcttccgtttgccacgatttcttctgagactactggtggtgtaggtggaacgtgtgtgcttcgtggatgtgtaccaaagaaactgcttgtttatgcatccaaatactctcatgaattcgaggagagccttggatttggatggtcgtacaactctgagccaacacatgattggagcactctaatggctaataagaacgctgagttgcaacgtctgactggaatctacaaaaacatattaaataatgcaggtgtcaaattgatcgaaggacgaggaaagattgtggacccacacacagtggatgttgatgggaaactttacactgcaagaaatatcttagtttcagttggtggacgcccatttataccagatattcctggaaaagaacatgtgatagattcagatgctgctcttgatctgccatcaaaacctacaaaaattgcaattgttggtggtggttatattgcacttgagtttgctggtattctcaatggtttgcaaagtgatgtacatgtatttattcgtcaaaagcaggttttacgtgggtttgatgaagagattagagactttgtagccgaacagatgtcattgaaaggaattgagttccacacagaggaaacaccacaagcagttatcaaatctgcagacgggtcattgtccttaaaaactaataaaggaacaatcgacggcttctcacatgtgatgtttgccacagggcgcaaaccaaatacaaagaatttgggattggagactgtgggcgtgaaactggacaaaaatggagcaatactggttgatgagtattcacgtacatcagttccatcaatttgggccgttggagatgttactgatagaatgaatctaactcctgttgctttgatggagggcggggcattagccaaaaccctttttgcaaatgaacctacaaaaccagattttagggctgtaccatctgcagtattctcccagccaccaattgggcaagttggtcttagtgagcaacaggcaatagaagaatacggcgatgttgatgtctatacagcaaattttaggcctttaaaagctactctatcaggccttcccgatagagttttcatgaaacttctagtgtctgcaaaaactaaccaagtggtcgggttacacatgtgtggtgaagattcagcagaaattgttcagggatttgctgttgctatcaaagccggattgaccaaggcacagtttgattcgacagtcggtgttcatcctacatcagcagaggaatttgtcaccatgaggacccctacaaggaaaattcgaaattcatcatctgggggtaagacagattctgaggccaaagcggctgcaggagtttag

SEQ ID NO: 57967 - protein, 568 aa, Zinnia elegans
MATSATTPKLTTTLSSSTLQTFIFRHKKSSILNRSSFLITNSPSSSSYHTPTFSLSKKTLGFLSDYKPKSRRFVTRAESSTNGAEPRSYDFDLFTIGAGSGGVRASRFAANFGASVAVCELPFATISSETTGGVGGTCVLRGCVPKKLLVYASKYSHEFEESLGFGWSYNSEPTHDWSTLMANKNAELQRLTGIYKNILNNAGVKLIEGRGKIVDPHTVDVDGKLYTARNILVSVGGRPFIPDIPGKEHVIDSDAALDLPSKPTKIAIVGGGYIALEFAGILNGLQSDVHVFIRQKQVLRGFDEEIRDFVAEQMSLKGIEFHTEETPQAVIKSADGSLSLKTNKGTIDGFSHVMFATGRKPNTKNLGLETVGVKLDKNGAILVDEYSRTSVPSIWAVGDVTDRMNLTPVALMEGGALAKTLFANEPTKPDFRAVPSAVFSQPPIGQVGLSEQQAIEEYGDVDVYTANFRPLKATLSGLPDRVFMKLLVSAKTNQVVGLHMCGEDSAEIVQGFAVAIKAGLTKAQFDSTVGVHPTSAEEFVTMRTPTRKIRNSSSGGKTDSEAKAAAGV

SEQ ID NO: 57968 - DNA, 1823 bp, Capsicum annuum
  CDS (45)..(1556)
aaaaaagctgtctgtaaaaaattcatcccagaaagcaaagaaaaatggcgatagggagtttagctagacgaaaagcatcaacaatattatcatcatcaagatatgtgtctaaatattcgtcatattatttttcgagaagttttgcatcgggatcggatgagaatgatgttgttgtaattggtggtggacctggtggatatgtagcggccattaaagctgcgcaacttggtttgaaaacaacgtgtattgaaaaacggggtactcttggtggtacttgtcttaatgttggttgtattccttctaaggcacttcttcattcctcccacatgttccatgaagctcaacattcatttgctcaacatggtgtgaagttctcttctgttgaggtagatcttcctgccatgatgtcccaaaaagataaggctgtggctggcctaacacgaggtattgagggtctatttaagaagaacaaagtgaactatgttaagggctattgtaaattcctttcgccttctgaagtttccgttgacaccatagacggtggtaatactgttgttaagggtaagaatattataattgcaactggttctgatgtcaaaagtcttcctgggttaaccattgatgagaagagaattgtatcatctactggcgctttagctttgactgaagttcccaaaaacctggttgttattggtgctggctacataggcctcgaaatgggatctgtctggggccgccttggctcacaggtgactgttgttgaatttgcgtctgatattgttccaaccatggatggtgaagttcgcaagcaattccaacgctctcttgagaagcaaaagatgaagttcatgcttaaaactaaggtggtatcagttgacactgctggggatgttctgaagttgacccttgaacctgcagctggtggtgaacaaactacactagaggctgatgttgttcttgtttctgctggtagggttccattcacttcaggtcttggattggacaagataggtgttgaaaccgataaggctggtagaatcttggtcaatgagcgttttgccagtaatgtcacgggggtatatgcaattggtgatgtcattcctgggccaatgttggctcacaaggcagaggaggatggtgttgcttgtgtggaattcattgcaggcaaagagggtcatgtggactacgatttggttcctggtgtttgttacactcacccagaggttgcttccgttgggaaaactgaagaacaggttaaggcccttggacttgattatcgcgttggcaaatttcctttccttgcaaacagtagggccaaggcaattgacgatgctgaaggaattgtaaaggtacttgctgagaaagagactgataaaatcttgggcgttcatatcatggcacccaacgcaggtgagcttattcacgaagcagtcctggccttgcattatggagcatcaagtgaggacattgctcgtacatgccacgcacatccaacaatgagcgaagctctgaaagaagcagccatggccacttatgacaagcccatccacatatagaaagtgtcatatcattgttttcgtttttccttcgaggatctttgattacttggaggagagtttgtaattgctatatcatccctcaagtatatctcgaacagaagtttacactccctcctctcttaatttggtaatcaaaactacctcaaagttaatgttttctcttctgcatattcatttctgtaataacgacacgagctgcatgtcgagtttaattgtcattaaaaaaaaaaaaaaaaaaaaaaaaaaaaaaaaaaaaaaaaaaaa

SEQ ID NO: 57969 - protein, 503 aa, Capsicum annuum
MAIGSLARRKASTILSSSRYVSKYSSYYFSRSFASGSDENDVVVIGGGPGGYVAAIKAAQLGLKTTCIEKRGTLGGTCLNVGCIPSKALLHSSHMFHEAQHSFAQHGVKFSSVEVDLPAMMSQKDKAVAGLTRGIEGLFKKNKVNYVKGYCKFLSPSEVSVDTIDGGNTVVKGKNIIIATGSDVKSLPGLTIDEKRIVSSTGALALTEVPKNLVVIGAGYIGLEMGSVWGRLGSQVTVVEFASDIVPTMDGEVRKQFQRSLEKQKMKFMLKTKVVSVDTAGDVLKLTLEPAAGGEQTTLEADVVLVSAGRVPFTSGLGLDKIGVETDKAGRILVNERFASNVTGVYAIGDVIPGPMLAHKAEEDGVACVEFIAGKEGHVDYDLVPGVCYTHPEVASVGKTEEQVKALGLDYRVGKFPFLANSRAKAIDDAEGIVKVLAEKETDKILGVHIMAPNAGELIHEAVLALHYGASSEDIARTCHAHPTMSEALKEAAMATYDKPIHI

SEQ ID NO: 57970 - DNA, 1753 bp, Paracoccus denitrificans
  CDS (315)..(1709): transl_table=11
gaattctcggccctgaccggccggctgcgccgcgccgtggataaccatttcgaggggctgatcctgttcaccatcgccgtcgtgctggtggtgctttcggatgccggctcgcccctgaccgtgctttgctcctggagctatctgctggcgcggctgctctacgttcccgcctatgcctatggctggtcgccctggcgctcggtcatctggggggtaggcttcatcgccacgctggtgatgatcctgaccacgttattcacctgaatcgaacgggcggcaccggaacgggcgccgcgaactgcaaggagacctgaatgtccacctatgacctgatcgtgatcggcgccggtcccggcggctatgtctgtgcgatccgcgccgcccagctgggcctgaaggtcgcctgcgtcgagggacgcgaaacactgggcggaacctgcctgaacgtcggctgcatcccctccaaggcgctgctgcatgccagccacatgctgcacgaaacccacgagaactttgaaaagatgggcctgatgggcgccaagcccaaggtcgattggggcaagatgcagggctacaaggccgagacggtcggcggcaacaccaagggcatcgagttcctgttcaagaagaacaagatcgactggctcaagggctgggccagcatcgaggcgcccggcaaggtcaaggtcggcgacaccacccatgagacgaagaacatcgtcatcgccaccggctcggagccggccagcctgaagggggtcgaggtcgacaacgacgccggcatcgtcgtcgattcgaccggcgcgctgtccctgccgaagatccccaagtcgatggtggtgatcggcgccggggtgatcgggctggagctgggctcggcctatgcccggctcggcgccgaggtgacggtggtcgagttcctcgacgccatcacccccggcatggacggcgaggtgcaaaagcagttccagcggatcctggcgaaacaggggctgaaattcgtcctcggcgccgccgtgtccggggtcgaggtcgaaaagggcaaggccgaggtcaagtacaagctgcgcaaggacgacagcgagcatgagatcaaggccgaatgcgtgctggtcgcgaccggccgccgcccctatgtcgcggggttggggctcgacaaggtcggcgtcgcgctgaccgaccgcggcttcgtccagatcgacgatcattggcagaccagcgtcaagggcatctatgccatcggcgacgcggtgcccggcccgatgctggcccacaaggccgagaacgagggcatggcggtcgccgaggtcatcgccggcaagcatggccatgtgaactacgacgtcattcccggcgtgatctacaccacacccgaggtcgcctcggtcggcctgaccgaagaggccgcaaaggaaagcggccgcaagatcaaggtcggcaaattccccttcatgggcaatgcccgcgccaaggcgctgttccaggccgaaggcttcgtcaagatgatcgccgatgccgagaccgaccgggtcctgggctgccacatcatcggcccgaacgccggcgagatgatccacgaggtctgcgtggcgatggaattcggtgcctcggcccaggacatcgcgctgacctgccatgcgcatccgacctgctcggaggcggtgcgcgaggcggcgctggcctgcggcgacggcgcgattcacgcctgatcggcggatcgccaccgaaaccgccgccgcgctgcggcgaaaat

SEQ ID NO: 57971 - protein, 464 aa, Paracoccus denitrificans
MSTYDLIVIGAGPGGYVCAIRAAQLGLKVACVEGRETLGGTCLNVGCIPSKALLHASHMLHETHENFEKMGLMGAKPKVDWGKMQGYKAETVGGNTKGIEFLFKKNKIDWLKGWASIEAPGKVKVGDTTHETKNIVIATGSEPASLKGVEVDNDAGIVVDSTGALSLPKIPKSMVVIGAGVIGLELGSAYARLGAEVTVVEFLDAITPGMDGEVQKQFQRILAKQGLKFVLGAAVSGVEVEKGKAEVKYKLRKDDSEHEIKAECVLVATGRRPYVAGLGLDKVGVALTDRGFVQIDDHWQTSVKGIYAIGDAVPGPMLAHKAENEGMAVAEVIAGKHGHVNYDVIPGVIYTTPEVASVGLTEEAAKESGRKIKVGKFPFMGNARAKALFQAEGFVKMIADAETDRVLGCHIIGPNAGEMIHEVCVAMEFGASAQDIALTCHAHPTCSEAVREAALACGDGAIHA

SEQ ID NO: 57972 - DNA, 1473 bp, Podospora anserina
  CDS (1)..(1473)
atgctgtcacagagattactactcggccggaccgccgtcaggtccgccctcaagccatcaggttgcgcagaggagaaggatcttgtcatcatcggtggtggtgttgctggctatgttgccgccatcaaggccggccaggagggcatgaaggtcgcatgcatcgagaagcgcggaacactcggcggaacctgcctcaacgtcggatgcatcccatcaaaatcgctccttaacaactcacatctgtaccaccagatcctccacgacacaaaacaccgtggtatcgaggtcggtgatgtcaagctcaacctccaacagctcatgaaggccaaggagacatccgtcactggtctcaccaagggtgtcgagttcctgctcaagaagaacggcgtcgagtatatcaagggtaccggcagcttccaggatgagcacaccgtcaaggtcgagctcaacgacggcggcgagaccagcgtcaccggcaagaacatcctcatcgccaccggttccgaggttacccccttccccggccttacgattgacgagcagaccgtcatcagcagcactggcgccattgccctcgagaaggtccccgagaagctcgtcgtcattggtggtggtatcattggtctagagatggcctccgtctggtctcgcctgggctccaaggtcaccgttgtcgagtacctcgaccagatcggcggtcccggcatggacaccgaggttgccaagggcatccagaagatcctgaagaagcagggcatcaccttcaagaccggtaccaaggtcctttccggcgagaagactggtgatgaggtcaaggttcagaccgaggctgccaagggtggcaaggaggagacgctcgatgctgacgtcgtccttgttgctattggtcgtcgcccctataccggcggtcttggccttgagaacatcggcctcgagctcgatgagcgcggccgtgtcattatcgacgccgagtaccgcaccaagatcccccacattcgctgcgtcggtgacgccaccttcggccccatgcttgcgcacaaggctgaggaggaggctgttgctgttgtcgagtacatcaagaagggctacggccacgtcaactacggctgcattccctccgtcatgtacaccttccccgaggttgcgtgggttggtcagtctgagcaggacctcaagaaggccgacatcccctaccgcgtcggcactttccccttcagcgccaactcccgtgccaagaccaacctcgacactgaggggttcgtcaagattctcgccgaccctgagaccgaccgccttctcggtatccacatcatcggccccaacgctggtgagatgattgctgagggcactcttgcgctcgagtatggtgcttccagcgaggatattgcgcgcacttgccacgcccaccctactctttctgaggccttcaaggaggctgccatggccacccacgccaaggccatccatttctaa

SEQ ID NO: 57973 - protein, 490 aa, Podospora anserina
MLSQRLLLGRTAVRSALKPSGCAEEKDLVIIGGGVAGYVAAIKAGQEGMKVACIEKRGTLGGTCLNVGCIPSKSLLNNSHLYHQILHDTKHRGIEVGDVKLNLQQLMKAKETSVTGLTKGVEFLLKKNGVEYIKGTGSFQDEHTVKVELNDGGETSVTGKNILIATGSEVTPFPGLTIDEQTVISSTGAIALEKVPEKLVVIGGGIIGLEMASVWSRLGSKVTVVEYLDQIGGPGMDTEVAKGIQKILKKQGITFKTGTKVLSGEKTGDEVKVQTEAAKGGKEETLDADVVLVAIGRRPYTGGLGLENIGLELDERGRVIIDAEYRTKIPHIRCVGDATFGPMLAHKAEEEAVAVVEYIKKGYGHVNYGCIPSVMYTFPEVAWVGQSEQDLKKADIPYRVGTFPFSANSRAKTNLDTEGFVKILADPETDRLLGIHIIGPNAGEMIAEGTLALEYGASSEDIARTCHAHPTLSEAFKEAAMATHAKAIHF

SEQ ID NO: 57974 - DNA, 1434 bp, Listeria monocytogenes
  CDS (1)..(1434): transl_table=11
atggcaaaagaatatgatgtagttattcttggcggaggaactggcggttacgtcgcagcaattcaagcagctaagaatggccagaaagtagccgtcgttgaaaaagggaaagttggaggaacgtgtcttcaccgtgggtgtattccaacgaaagcgttattacgttcagcggaagttctacaaacggtaaaaaaagcaagtgaatttggtatttctgtagaaggaactgccggaatcaattttttacaagcacaagaacgaaaacaagcaatagtagatcaattggaaaaaggtattcaccaattatttaaacaagggaaaattgacttgtttgtagggacgggaactattttgggaccatcaattttttcaccaacagctggaacaatttcagttgaattcgaagatggttctgaaaatgaaatgctaattcctaaaaacttaattatcgcaactgggtccaaaccgcgcacattaagcggtttaacaatcgatgaggaacatgttttatcatctgacggcgcgcttaacctagaaactttaccaaaatcaattattattgttggcggtggggttatcggaatggaatgggcttcgatgatgcatgatttcggtgtagaagttacggtgctagaatatgcagaccgaattttgccaacagaagataaagaagtggccaaagaattagcaagactttataaaaagaaaaaattaaacatgcatacatctgctgaagttcaagcagctagttataaaaaaacagatactggtgtggaaattaaagcaatcattaaaggcgaagagcagactttcacagcagataaaattcttgtttcagttggtcgttctgctaatacagaaaacatcggcttacaaaatacagatatcgcgaccgaaaacggctttatccaagtaaatgatttttaccaaacaaaagaaagtcacatctatgcgattggagactgcattccaacgattcaactcgcgcacgttgcaatggaagaaggaacaattgcagccaaccatattgccggaaaagcagccgaaaaacttgactacgacttagttcccccgctgtatttatactttacttctacagaaatcgcaagtgtcggtatcacagaagaacaagcaaaagaacggggtcatgaagtgaaaaaaggcaaattcttcttccgtggtatcgggaaagcgctcgtttacggagaatcagatggcttcattaaaattattgcagataaaaaaacagacgatatcttaggcgtgagcatgattggaccgcacgttacggacatgattagcgaagccgctttagcacaagttttaaatgcaacgccgtgggaagtgggcaacacgattcacccgcacccaactttatcagaaagttttagagaagctgcccttgctgtggatggcaatgcaattcacggttaa

SEQ ID NO: 57975 - protein, 477 aa, Listeria monocytogenes
MAKEYDVVILGGGTGGYVAAIQAAKNGQKVAVVEKGKVGGTCLHRGCIPTKALLRSAEVLQTVKKASEFGISVEGTAGINFLQAQERKQAIVDQLEKGIHQLFKQGKIDLFVGTGTILGPSIFSPTAGTISVEFEDGSENEMLIPKNLIIATGSKPRTLSGLTIDEEHVLSSDGALNLETLPKSIIIVGGGVIGMEWASMMHDFGVEVTVLEYADRILPTEDKEVAKELARLYKKKKLNMHTSAEVQAASYKKTDTGVEIKAIIKGEEQTFTADKILVSVGRSANTENIGLQNTDIATENGFIQVNDFYQTKESHIYAIGDCIPTIQLAHVAMEEGTIAANHIAGKAAEKLDYDLVPPLYLYFTSTEIASVGITEEQAKERGHEVKKGKFFFRGIGKALVYGESDGFIKIIADKKTDDILGVSMIGPHVTDMISEAALAQVLNATPWEVGNTIHPHPTLSESFREAALAVDGNAIHG

SEQ ID NO: 57976 - DNA, 1782 bp, Solanum lycopersicum
  CDS (21)..(1523)
gaaaattgaagccggaaaaaatggcgattgggagcttagctagacgaaaggcttcaacaattttatcttctagatatctcaagtattcattttctcttagcagaggtttcgcttcgggatccgatgagaacgacgtcgttgttattggtggtggacctggcggatatgtggcggcgatcaaagcggcgcagttaggtctcaaaactacctgtattgagaagcgtggtactcttggcggtacttgtctcaatgttggctgtattccttctaaggcacttcttcattcctctcacatgtatcatgaagctcaacattcttttgctagtcatggtgtgaagttctcttctgttgaggtagatcttcctgctatgatggcccagaaagataaggctgtggctggtctaacacggggtattgagggtctatttaagaagaacaaagtgaactatgttaagggctatggtaaattcctctccccttccgaagtttctgttgacaccgtggaaggtggtaatactattgttaaggggaagaatatcataattgcgactggttctgatgtcaaaagtctacctgggttaaccattgatgaaaagagaattgtatcatctactggagctttagctttaactgaaatccctaaaaaactggttgttattggtgctggctacataggcctcgaaatgggatctgtctggggccgccttggctcagaggtgactgttgttgaatttgcatctgatattgttccaaccatggatggtgaagttcgcaagcaattccaacgttctcttgagaagcaaaagatgaagttcatgcttaaaactaaggtggtgtcagttgacactgttggcgatagtgtgaagttgacccttgaacctgccgcgggtggtgagcagactactcttgaggctgatgttgttcttgtttctgctggtagggttcccttcacttcaggacttggactggacaagataggtgttgaaactgacaaggctggtaggatcttggtcaatgaacgttttgccagtaatgtcccaggggtatatgcaattggtgatgtcattccggggccaatgcttgctcacaaggcagaggaggatggtgttgcttgtgtggaatttattgcaggcaaggaaggtcatgtggactacgatttggttcctggtgtttgctacactcacccagaggtggcttccgttgggaaaactgaagaacaggttaaggcccttggagttgattatcgcgtaggcaaatttccattccttgcaaacagtagggccaaggcaattgacgatgctgaaggtattgtaaaggtaattgctgagaagggaaccgacaaaatcttgggcgtccatattatgtcatccaatgcaggtgagcttattcacgaagcagtcctggctttgaattatggagcatcgagtgaagacattgctcgtacatgccacgcacatcctacaatgagcgaggctctgaaagaagctgccatggccacttatgacaagcccattcacatgtagaggtagcgtcagtcatatcattgttttttattttccttcgagtatctcaaatacttgaagcagattttctaattgccatatcaagtatatctggaacacaagtttcttccccctctcctctcttaattgggtacactcaaaaccacctcaaagttcatgtttctcttctgcatattcattactgtaataaagatacaagttgcatgtcgagtttaaatgccatcaatggtgagtttcattgaaaaaaaaaaaaaaaaaa

SEQ ID NO: 57977 - protein, 500 aa, Solanum lycopersicum
MAIGSLARRKASTILSSRYLKYSFSLSRGFASGSDENDVVVIGGGPGGYVAAIKAAQLGLKTTCIEKRGTLGGTCLNVGCIPSKALLHSSHMYHEAQHSFASHGVKFSSVEVDLPAMMAQKDKAVAGLTRGIEGLFKKNKVNYVKGYGKFLSPSEVSVDTVEGGNTIVKGKNIIIATGSDVKSLPGLTIDEKRIVSSTGALALTEIPKKLVVIGAGYIGLEMGSVWGRLGSEVTVVEFASDIVPTMDGEVRKQFQRSLEKQKMKFMLKTKVVSVDTVGDSVKLTLEPAAGGEQTTLEADVVLVSAGRVPFTSGLGLDKIGVETDKAGRILVNERFASNVPGVYAIGDVIPGPMLAHKAEEDGVACVEFIAGKEGHVDYDLVPGVCYTHPEVASVGKTEEQVKALGVDYRVGKFPFLANSRAKAIDDAEGIVKVIAEKGTDKILGVHIMSSNAGELIHEAVLALNYGASSEDIARTCHAHPTMSEALKEAAMATYDKPIHM

SEQ ID NO: 57978 - DNA, 1404 bp, Methylobacterium extorquens
  CDS (1)..(1404): transl_table=11
atgtcctacgatctcatcgtcatcggcaccggccccggcggctatgtctgcgccatccgcgcggcccagctcgggctgaagaccgcggtggtcgagaagcgggcgacccacggcggcacctgcctcaatgtcggctgcatcccgtccaaggcgctgctgcacgcatcggaagccttcgaggaggccaacaagcacttttcggagttgggcatcgacgtgggcacgccgaagcttgatctcaaaaaaatgcagagcttcaagcagagcggcgtggacggcaacaccaagggcgtcgagttcctgctcaagaagaacaaggtcgatacctatcacggccgcggccgcatcgccggggccggccgcgtcgaggtaatctcggacgacggcggcaaccagttgctggagacgaagaacatcgtcatcgccaccggctccgacgtgacccggctgccgggcgtcgagatcgacgagaagacggtggtctcctccaccggcgcgctcgaactcgccgaggtgcccaagcgcctcgtggtgatcggcgcgggcgtgatcgggctcgaactcggctcggtctggcgccgcctcggcgccgaggtcaccgtgatcgagtatctcgaccgcgtgctgccgggcatggacggcgaggtcggcaagcagttccagcgcatcctggccaagcagggcatggtcttcaagctctcgaccaaggtgaccggtgtcgagaccggcaagaagggccgcgccaccgtcaccgtcgagccggcgcagggcggcgagccggagaagctcgaggccgacgtggtgctcgtggccatcggccgggtgccctacacggaagggctcgggctcgagacggtgggcgtggcgaccgacgacaagggccggatcgaggtcgattcgcactacgccaccaacgtcaccggcatctacgccatcggcgacgtgatcgccgggccgatgctcgcccacaaggcggaggacgagggcgtcgcggtcgccgagatcctggccggccagtcgggccacgtgaattacggcgtgatcccgaacgtcgtctacaccttccccgaggtcgcctcggtcggcaagaccgaggaggagctgaagaaggacgggatcgcctacaacgtcggcaagttccccttcaccgccaacggccgggccaaggccaacggcaccaccgacggcttcgtgaagatcctcgcggacgcgcagaccgaccgggtgctcggcgtgcacatcgtcggggcggatgccggcaacctcatcgccgaggtcgcggtggcgatggagttcgcagcctccgccgaggacatcgcccgcacctgccacgcccacccgacgctgaccgaggcgatcaaggaagccgccctcgccgtcgacaagcgcgcgatccacgtctga

SEQ ID NO: 57979 - protein, 467 aa, Methylobacterium extorquens
MSYDLIVIGTGPGGYVCAIRAAQLGLKTAVVEKRATHGGTCLNVGCIPSKALLHASEAFEEANKHFSELGIDVGTPKLDLKKMQSFKQSGVDGNTKGVEFLLKKNKVDTYHGRGRIAGAGRVEVISDDGGNQLLETKNIVIATGSDVTRLPGVEIDEKTVVSSTGALELAEVPKRLVVIGAGVIGLELGSVWRRLGAEVTVIEYLDRVLPGMDGEVGKQFQRILAKQGMVFKLSTKVTGVETGKKGRATVTVEPAQGGEPEKLEADVVLVAIGRVPYTEGLGLETVGVATDDKGRIEVDSHYATNVTGIYAIGDVIAGPMLAHKAEDEGVAVAEILAGQSGHVNYGVIPNVVYTFPEVASVGKTEEELKKDGIAYNVGKFPFTANGRAKANGTTDGFVKILADAQTDRVLGVHIVGADAGNLIAEVAVAMEFAASAEDIARTCHAHPTLTEAIKEAALAVDKRAIHV

SEQ ID NO: 57980 - DNA, 1440 bp, Methylobacterium extorquens
  CDS (1)..(1440): transl_table=11
atgtccgaaacctatgacgtcctcatcatcggcgcggggcccggcggctacgtggccgcgatccgctcggcacagctcggtttcaagaccgccgtggtcgatcgcgagcatctcggcggcatctgtctgaactggggctgcattcccaccaaggccctgctgcgctcggccgagatctaccactacatgcagcacgcctccgattacggcctctccgccaaggaggtcagcttcgatgcggcggcgatcgtcaagcgctcgcgcggggtgtcgggccgcctcaacggcggcgttggcatgctgctcaagaagaacaaggtcgatgtgatctggggcgaggcctcgatcgagtccggcgccaagggcaacgagcccggcaaggtcacggtcaaggagaccaagcgcgccgagccgccgaagggcgccaagggtgcgggcacctacgcggccaagcacatcatcgtcgcgaccggcgcccgcccgcgcgtgctgcccggtatcaagcccgacaagaagcagatctggacctattacgaggcgatggtccccgaaaagatgcccaagagcctgctggtgatgggctcgggcgcgatcggcatcgagttcgcctcgttctatcgcacgatgggcgccgacgtgacggtcatcgagttgctgccgcagatcctgccggtcgaggatgcggagatcgccggtctcgcccgcaagcgtttcgagaagcagggcatcaagatcctgaccagcgccaaggtgacgaaggtcgagaagggcgccgactcggtcaccgccacggtcgaggacgacaagggcaagacgcagcagctcaccgccgagaagctgatctcggccgtcggcgtcgtcggtaacatcgagaatctgggtcttgagaaggtcggggtgaagatcgagcgcggcgtcgtcgtgaccgacgggctcggacgcaccaacgtgccgggcgtctacgccatcggcgatgtggccggcccgccaatgctggcccacaaggccgagcacgaaggcgtcctctgcgtcgagaccatcaagggcctacacacccacccgatggacaaggccaagatcccgggctgcacctattgccagccgcagatcgccagcgtcggcgtcaccgaggggaaggcgaaggagctcggcctctcgatcaaggtcggccgcttccccttcgcgggcaacggcaaggcgatcgcgctcggcgagccggacggtctcgtcaagacgatcttcgatgccaagaccggccagttgctcggcgcccacatggtcggagcggaagtcaccgagctgatccagggctacgtcgtcgcgatgaccctggaatcgaccgaggaagagctgatgcacacggtgttcccgcatccgacgctctccgagatgatgcatgagagcgtgctcgatgcgtatggccgggtgatccacacctga

SEQ ID NO: 57981 - protein, 479 aa, Methylobacterium extorquens
MSETYDVLIIGAGPGGYVAAIRSAQLGFKTAVVDREHLGGICLNWGCIPTKALLRSAEIYHYMQHASDYGLSAKEVSFDAAAIVKRSRGVSGRLNGGVGMLLKKNKVDVIWGEASIESGAKGNEPGKVTVKETKRAEPPKGAKGAGTYAAKHIIVATGARPRVLPGIKPDKKQIWTYYEAMVPEKMPKSLLVMGSGAIGIEFASFYRTMGADVTVIELLPQILPVEDAEIAGLARKRFEKQGIKILTSAKVTKVEKGADSVTATVEDDKGKTQQLTAEKLISAVGVVGNIENLGLEKVGVKIERGVVVTDGLGRTNVPGVYAIGDVAGPPMLAHKAEHEGVLCVETIKGLHTHPMDKAKIPGCTYCQPQIASVGVTEGKAKELGLSIKVGRFPFAGNGKAIALGEPDGLVKTIFDAKTGQLLGAHMVGAEVTELIQGYVVAMTLESTEEELMHTVFPHPTLSEMMHESVLDAYGRVIHT

SEQ ID NO: 57982 - DNA, 2635 bp, Bruguiera gymnorhiza
  CDS (84)..(1619)
gaagctactgacttgtgaaaagaccaaaaaggataattatttagattttgattggaaaggcaggagcagcaggagaatcgaagatggctatggcaagcttcgcgagaagaaaggcatacctgctcactagaaacttgtccaataactcttgctcagatgctctcagttgctctttttgcctctccagcttctctcgtggctttgcctccgccggatctgacgacaacgacgtagtcgtcatcggcggaggtccgggtggctacgtcgccgccatcaaggccgcccagcttggtcttaaaaccacctgcatcgagaaacgcggtgctctcggtggcacttgcctcaacgttggttgtatcccttccaaggcacttctgcactcatcccatatgttccatgaagccaaacattcatttgccagccatggagtgaagttttcttctgttgagattgatttacctgccatgatggcccaaaaagaaaaagctgtatctaccctaacaaaagggattgaaggattattcaagaagaacaaagtcacctacgtcaaaggttatggaaagtttgtctctccctctgaggtgtctgtggacactcttgaaggcgggaatattgttgtgaaaggcaagaatatcattattgccactggttctgatgtcaaatctctgcccgggattaccattgatgagaagaaaattgtgtcttctactggtgctttagctttgtcagaaatccccaggaaacttgtggtcattggggcaggctacattgggcttgaaatgggctcagtgtggggccggcttggttcagaagttactgttgtcgagtttgctcctgatattgtcccaagcatggatggggaaatccgcaagcaattccagcgtacccttgagaagcagaagatgaaattcatcctcaagacgaaggttgtaggagttgacacttctggtgatggtgtaaagttgacacttgagccagcatctggaggcaatcagacaacacttgaggctgatgtagtccttgcctctgctggtaggattcccttcactgctggactcgggttggacaagataggtgtggaaactgataaggttggaagagttttagtaaatgataggtttcaaaccaatgcttctggtgtctatgccattggagatgtaattccagggccaatgttagctcacaaggcagaagaggatggagttgcttgtgtggaatttattgctggcacacacgggcatgtggactatgataaggttcctggagttgtctatacacacccagaggtcgcttctgttggtaaaacagaggagcaggtcaagtcacttggaattgattaccgtgttggaaagttcccattcttggcaaatagccgtgccaaggcaattgatgatgctgaagggatagtcaagatattggctgaaaaggagacagacaaagttttaggagtccatatcatgtcgcctaacgcaggggagcttattcatgaggctgtactggcactcacttatgatgcttcaagtgaagatatagcacgtgtgtgccatgcacatccaaccatgagtgaggcgttgaaggaagccgccatggccacttatgacaagcccattcacatctgaaaaaaaaaaaaatgataatcaatttttattttgttttttttttcttttttcatttttccttgacaactttagcaatcacttgcccttaccttgtgcatctctgattgcagcagatggaacatctgaattgaaatttgctgtttgtttccttcaatatgagagaggatagcttcacagttcaagtgttcttgcatcaataatggggtattggtttatcaatgtataaggccatgcatgcggataaccgtgggcatttaaactaagtggagcaggagattcacttgtgcttctaatgtacaaactgccagttcagtcgctggttttgtccaattttgtcaagattattgatatgcttgtgtcaatatgctacatgcatcccatttggctacggagccgttggccttatactcccctttgttgcggtttcaaccagggtttctgcaaagtcagccaatattttggccgaaagcaattgtaaatccgcacctcaacgcgggacgatataggatgatgccaagaagtactgctttaagctttcggtggatcaccactaagccaaatacaagagggagactctggtagtcggacaatttactgggcgacggaataacatagaaggggaatcaaattttgctcacctcaactttaccccacaactcatgcagcagctgcggcaatctttgatgtgagatcagcaggccgcaagctatctgacctcatcactgataatatttccgacaatcattcattcgcatggctttctgcagtctttgttgccttgcccgtgtaagtcaaatagcaggtacttgggttgatgatgacatgttaaaaatatatctacaaagagtagccaagtcaaggtaaaaggtgagaggagagagaagatctgaatttcacaacatgagttaatccacggctcgctagacttgttccggaatgatctgaatttcttattacataattgattattcatttgctcccacgcggcagcaatcctttcctcctaaaaaaaaaaa

SEQ ID NO: 57983 - protein, 511 aa, Bruguiera gymnorhiza
MAMASFARRKAYLLTRNLSNNSCSDALSCSFCLSSFSRGFASAGSDDNDVVVIGGGPGGYVAAIKAAQLGLKTTCIEKRGALGGTCLNVGCIPSKALLHSSHMFHEAKHSFASHGVKFSSVEIDLPAMMAQKEKAVSTLTKGIEGLFKKNKVTYVKGYGKFVSPSEVSVDTLEGGNIVVKGKNIIIATGSDVKSLPGITIDEKKIVSSTGALALSEIPRKLVVIGAGYIGLEMGSVWGRLGSEVTVVEFAPDIVPSMDGEIRKQFQRTLEKQKMKFILKTKVVGVDTSGDGVKLTLEPASGGNQTTLEADVVLASAGRIPFTAGLGLDKIGVETDKVGRVLVNDRFQTNASGVYAIGDVIPGPMLAHKAEEDGVACVEFIAGTHGHVDYDKVPGVVYTHPEVASVGKTEEQVKSLGIDYRVGKFPFLANSRAKAIDDAEGIVKILAEKETDKVLGVHIMSPNAGELIHEAVLALTYDASSEDIARVCHAHPTMSEALKEAAMATYDKPIHI

SEQ ID NO: 57984 - DNA, 1515 bp, Solanum tuberosum
  CDS (1)..(1515)
atggcgatttctaccttagctagacgaaaggctaccacgtttctgtcatccagactcctttacagcacttccaagtattcgttctctttaaccagaggtttcgcttcaggatccgatgagaacgacgtcgttgttatcggtggtggtcccggaggctatgtggcggcgatcaaagcagcacagcttgggcttaaaactacatgtatcgagaaacgtggtaccctcggtggtacttgccttaacgttggttgtattccttctaaggcacttcttcattcgtcccacatgtttcatgaagcgcaacattcatttgccaatcatggtgtgaagttttcttctgtcgaagtagatctccctgccatgatgggacaaaaagataaagccgtgtctaacttaacacgaggtatagagggtctattcaagaaaaacaaagtaaactatgtgaagggatatggtaaattcctctccccttctgaaatttctgttgacactgtcgaaggtggtaactctgttgttaaaggcaaaaatattattattgcaactggctctgatgtcaaaggtctacctggcataaccattgatgagaagaaaattgtgtcatccaccggagcattagctttgactgaaattccaaaaagattagttgttattggtgctggctatataggccttgagatgggatctgtctggggtcgcctcggctcagaggtgactgttgttgaatttgcatctgatattgttccaaccatggatggtgaagttcgcaagcaatttcaacgtgctcttgagaagcaaaagatgaaattcatgctaaacactaaggtggtgtcagttgatgctacaggtgatggtgtgaaattgacccttgaaccttcagctggtggtgatcaaactattctcgaggctgatgttgttctcgtctctgctggaagagtaccattcacttcaggacttggattggacacgataggagttgaaactgacaaggctggtagaatcttggtcaatgaacgttttgccactaacgtcccaggggtacatgcaattggtgatgtcattcctggaccaatgctggctcacaaggcagaggaggatggcgttgcttgtgtagagttcattgcaggtaaggagggtcatgtagactatgatatggtacctggtgtcgtttacacccacccggaagtggcttatgttgggaaaaccgaggaacaggtaaagtcactcggagttgattatcgtgttggcaaattccccttcctagcaaacagtagagccaaggcaattgatgatgctgagggaattgtcaaggtaattgctgagaaagagagtgacaagatattgggcgtccatattatgtcacctaatgcaggggagcttattcacgaagctgtactggcattgcagtacggagcatcaagtgaggacattgctcgtacttgtcatgcacatccaacaatgagtgaggcactcaaagaagcagccatggccacttatgacaagcccatccacatgtag

SEQ ID NO: 57985 - protein, 504 aa, Solanum tuberosum
MAISTLARRKATTFLSSRLLYSTSKYSFSLTRGFASGSDENDVVVIGGGPGGYVAAIKAAQLGLKTTCIEKRGTLGGTCLNVGCIPSKALLHSSHMFHEAQHSFANHGVKFSSVEVDLPAMMGQKDKAVSNLTRGIEGLFKKNKVNYVKGYGKFLSPSEISVDTVEGGNSVVKGKNIIIATGSDVKGLPGITIDEKKIVSSTGALALTEIPKRLVVIGAGYIGLEMGSVWGRLGSEVTVVEFASDIVPTMDGEVRKQFQRALEKQKMKFMLNTKVVSVDATGDGVKLTLEPSAGGDQTILEADVVLVSAGRVPFTSGLGLDTIGVETDKAGRILVNERFATNVPGVHAIGDVIPGPMLAHKAEEDGVACVEFIAGKEGHVDYDMVPGVVYTHPEVAYVGKTEEQVKSLGVDYRVGKFPFLANSRAKAIDDAEGIVKVIAEKESDKILGVHIMSPNAGELIHEAVLALQYGASSEDIARTCHAHPTMSEALKEAAMATYDKPIHM

SEQ ID NO: 57986 - DNA, 1750 bp, Vigna unguiculata
  CDS (22)..(1593)
gaaaaaagagagagaagaatcatggccatggcaagcttggctcgacggaaggcgtacgctgtcgtttcatcatccaggtcatcggttttcctcacaagtttgaggggattcgcatccggatctgacgaaaacgatgtcgtcgtcatcggcggcggtcccggcggctacgtcgccgccattaaagcctcgcagttgggtcttaaaaccacttgcatcgaaaagcgtggaactctaggcggcacctgtctcaacgtcggatgcatcccttccaaggcgcttttgcattcttcccacatgtaccatgaggctaaacactcctttgccaaccatgggatcaagctttcatctgtcgaggttgatttggctggcatgatggcccaaaaggataaagctgtttcgaatcttaccaagggtattgaaggactgttcaagaaaaacaaggtaaactatgtcaaaggttatgggaagtttgtttcaccatctgaagtctctgtggacaccattgacggtggaaacactgttgtcaaaggaaagcatattataattgccacaggttcggatgtgaaatcactacctggtgtcaccattgatgaaaagaaaattgtatcatcaactggtgctcttgctttgactgagatccccaagaaactcgtagtcattggggcaggctacatcggtctagagatgggctcagtatggggccgacttggatctgaggtaaccgttgttgagtttgcatcagacattgttccaaccatggatgcagaggtgcggaagcaatttcagcgttctcttgagaaacagggcatgaaattccagttgaagacaaaggttgttggagtcgatacctctggggatggtgtgaagctaacacttgaaccagctgctggtggtgatcagactatacttgaaacagatgttgtccttgtatctgcaggtaggactccattcactgctggacttgggttagacaagataggagttgaaactgacaagatccgacggattttggtaaatgagagattcaccacaaatgtctctggtgtttatgcgattggagacgtaattccaggcccaatgttggcacacaaggcagaagaagatggggttgcttgtgtcgaattcatagctggaaaggttggccatgtggactatgacaaagtcccaggtgttgtctataccacccccgaggttgcttatgttgggaagacagaggagcaagtgaaggcacttggagttgaataccgtgttggcaaattcccctttatggctaacagcagagctaaggcaattgataatgctgaaggactggtgaagatattggctgagaaggagacggataagatattgggagtgcatattatggcacccaatgcaggagagctcattcacgaagcagcaatagcattacagtatgatgcatccagtgaggacattgcacgtgtgtgccatgcacatccaacaatgagcgaggctgtgaaagaagccgcaatggccacttatgacaagccgcattcacatatgaagagctggttgcttcttcattctcttcttttcatttttgtccaacaatttacaatgacttggagatgataccacctctgttaaatttagattcaggtttttaaatgaaaattatccccctgtttacttgtttgcataataataggaatgattgtgttgttcttatctctgttcaataaattttatatctccccttctctctgggacaatgctgtaaaaaaaaaaa

SEQ ID NO: 57987 - protein, 523 aa, Vigna unguiculata
MAMASLARRKAYAVVSSSRSSVFLTSLRGFASGSDENDVVVIGGGPGGYVAAIKASQLGLKTTCIEKRGTLGGTCLNVGCIPSKALLHSSHMYHEAKHSFANHGIKLSSVEVDLAGMMAQKDKAVSNLTKGIEGLFKKNKVNYVKGYGKFVSPSEVSVDTIDGGNTVVKGKHIIIATGSDVKSLPGVTIDEKKIVSSTGALALTEIPKKLVVIGAGYIGLEMGSVWGRLGSEVTVVEFASDIVPTMDAEVRKQFQRSLEKQGMKFQLKTKVVGVDTSGDGVKLTLEPAAGGDQTILETDVVLVSAGRTPFTAGLGLDKIGVETDKIRRILVNERFTTNVSGVYAIGDVIPGPMLAHKAEEDGVACVEFIAGKVGHVDYDKVPGVVYTTPEVAYVGKTEEQVKALGVEYRVGKFPFMANSRAKAIDNAEGLVKILAEKETDKILGVHIMAPNAGELIHEAAIALQYDASSEDIARVCHAHPTMSEAVKEAAMATYDKPHSHMKSWLLLHSLLFIFVQQFTMTWR

SEQ ID NO: 57988 - DNA, 1715 bp, Arabidopsis thaliana
  CDS (1)..(1524)
atggcgatggcgagtttagctaggaggaaggcgtattttctcaccagaaacttatcaaactctcccactgacgctctcagattctccttttccctctcccgtggcttcgcctcatcaggatctgatgaaaacgacgtcgtcatcatcggcggcggtcccggtggttacgtagccgcgatcaaagcctctcagcttggtctcaaaaccacttgtatcgagaaacgcggcgctctcggtggtacttgtctcaacgtcggttgcattccttccaaggctctgcttcactcttcacatatgtaccatgaggcgaagcattccttcgctaaccatggtattaaggtctcttctgttgaggtagatcttcctgctatgttggctcagaaagataatgcggttaagaacctcactcgtggtattgagggtttgttcaagaaaaataaggtgacttatgtcaaaggatatggtaagtttatttccccaaatgaagtctcggtggagactattgatggaggaaacactattgtgaaaggtaaacatatcattgttgctactggctcggatgttaagtccttgcctggtattacgattgatgaaaagaagattgtttcgtcgactggagcgttgtctctatcggaagttccgaagaaattgattgttattggtgcggggtatattgggcttgagatgggttctgtttggggtaggcttggatctgaggttacggttgttgagtttgctggagatattgttccttcgatggatggtgaaattcgtaagcagtttcaacgttctcttgagaagcagaagatgaagttcatgctcaagactaaagttgtttctgtggattcctcctctgatggtgtgaagcttacagtggaaccggcagaaggaggagagcagtctattctggaagctgatgtggtacttgtctcagcgggaagaacaccgttcacttctggacttgatctggagaaaatcggagtggaaactgacaaagccgggaggattctggtgaatgatagattcttgagtaatgtcccaggcgtgtatgctattggagatgtgattccaggaccaatgcttgctcacaaagccgaagaagacggtgttgcttgtgtggagttcatagcaggcaaacacggtcatgttgattatgacaaggttcctggtgttgtttacactcatcctgaggttgcttcggttggtaaaaccgaagaacagctgaagaaagaaggtgtgagttaccgggttgggaaattcccgtttatggcgaatagcagagctaaggctattgataatgcagaaggattggttaagattctggccgataaggagactgataagatcttgggcgttcacattatggcgccaaacgctggagagctgattcatgaggctgttcttgcgattaactacgatgcatcaagtgaagacattgctcgagtctgccatgctcatcccactatgagcgaggctcttaaggaagctgccatggccacctatgacaagcctattcacatctaaaagggaacaaggaagaccttaaaggagtgagccacctatgacaagccaaatcgatatcttaacctggttggattttggttcggttttctgtggtttagccttcaatttgtcctttatactgtgtttttattcgttaatgttcagatacgtgttaagcctgatctttaataaaatattcaacattcactcaa

SEQ ID NO: 57989 - protein, 507 aa, Arabidopsis thaliana
MAMASLARRKAYFLTRNLSNSPTDALRFSFSLSRGFASSGSDENDVVIIGGGPGGYVAAIKASQLGLKTTCIEKRGALGGTCLNVGCIPSKALLHSSHMYHEAKHSFANHGIKVSSVEVDLPAMLAQKDNAVKNLTRGIEGLFKKNKVTYVKGYGKFISPNEVSVETIDGGNTIVKGKHIIVATGSDVKSLPGITIDEKKIVSSTGALSLSEVPKKLIVIGAGYIGLEMGSVWGRLGSEVTVVEFAGDIVPSMDGEIRKQFQRSLEKQKMKFMLKTKVVSVDSSSDGVKLTVEPAEGGEQSILEADVVLVSAGRTPFTSGLDLEKIGVETDKAGRILVNDRFLSNVPGVYAIGDVIPGPMLAHKAEEDGVACVEFIAGKHGHVDYDKVPGVVYTHPEVASVGKTEEQLKKEGVSYRVGKFPFMANSRAKAIDNAEGLVKILADKETDKILGVHIMAPNAGELIHEAVLAINYDASSEDIARVCHAHPTMSEALKEAAMATYDKPIHI

SEQ ID NO: 57990 - DNA, 1413 bp, Bacillus stearothermophilus
  CDS (1)..(1413): transl_table=11
atggtagttggcgattttgcaattgaaacggaaacgcttgtcgtcggcgccggtcctggcgggtatgtcgccgccatccgcgccgcgcagctcggacaaaaagtgacgattgtggaaaagggcaatttaggcggcgtctgcttaaatgttggctgcatcccgtcaaaggcgctgatctccgcaagccatcgctatgagcaggcgaagcattccgaagaaatgggcattaaggcggagaacgtcaccatcgattttgccaaagtgcaagaatggaaagcaagcgtcgtgaaaaaattaacgggcggcgtcgaagggctgttaaaaggaaacaaagtagagatcgtcaaaggggaagcgtattttgtcgacgccaatacggtgcgtgtcgtcaacggcgacagcgcgcagacgtatacgttcaaaaacgcgattatcgccaccggctcgcgcccgattgagctgccgaacttcaagttttccaaccgcattcttgactcgacgggagctctcaaccttggggaagtgccgaaatcgctcgtggtcatcggcggcggctatattggcatcgaactcggtacggcttacgccaactttgggacgaaagtgaccattttagaaggagccggcgaaattttgtccggttttgagaagcaaatggctgccatcatcaagaagcgcctgaagaaaaaaggcgttgaagtcgtgacgaacgcattggcgaaaggggccgaagaacgcgaagacggcgtcacggtcacgtatgaggcgaatggtgaaacgaaaacgattgacgccgactatgtgctcgtcaccgtcggccgccgtccgaatacagatgaacttggtcttgaacaaatcggcatcaaaatgacgaaccgcggcttgattgaagtggaccaacaatgccggacaagcgtgccgaacatttttgcgatcggcgacatcgttccaggtccggcgctcgcccataaagcgtcgtatgaaggaaaagtggctgcggaagctatcgccggccatccgtcggcagtcgattacgtggccattccagctgttgtcttctccgatccggaatgcgcgtcggtcggctattttgagcagcaggcgaaagacgagggcattgacgtcattgccgcgaaattcccgtttgctgccaacggccgcgccttggcgctgaacgatacggacggcttcttgaagctcgttgtccgcaaagaggacggcgtcatcattggtgcgcaaatcatcggtccaaatgcttctgacatgatcgccgagcttgggctcgccattgaagccggcatgacggcggaagacatcgctttgacgatccatgcccatccgacgcttggcgaaatcgccatggaagcggcggaagtggcgcttggcacaccgattcatatcattacgaagtaa

SEQ ID NO: 57991 - protein, 470 aa, Bacillus stearothermophilus
MVVGDFAIETETLVVGAGPGGYVAAIRAAQLGQKVTIVEKGNLGGVCLNVGCIPSKALISASHRYEQAKHSEEMGIKAENVTIDFAKVQEWKASVVKKLTGGVEGLLKGNKVEIVKGEAYFVDANTVRVVNGDSAQTYTFKNAIIATGSRPIELPNFKFSNRILDSTGALNLGEVPKSLVVIGGGYIGIELGTAYANFGTKVTILEGAGEILSGFEKQMAAIIKKRLKKKGVEVVTNALAKGAEEREDGVTVTYEANGETKTIDADYVLVTVGRRPNTDELGLEQIGIKMTNRGLIEVDQQCRTSVPNIFAIGDIVPGPALAHKASYEGKVAAEAIAGHPSAVDYVAIPAVVFSDPECASVGYFEQQAKDEGIDVIAAKFPFAANGRALALNDTDGFLKLVVRKEDGVIIGAQIIGPNASDMIAELGLAIEAGMTAEDIALTIHAHPTLGEIAMEAAEVALGTPIHIITK

SEQ ID NO: 57992 - DNA, 1524 bp, Arabidopsis thaliana
  CDS (1)..(1524)
atggcgatggcgagcttagctaggagaaaagcgtactttctcaccagaaacatctctaattctcccactgatgctttcagattctctttctccctcactcgcggcttcgcttcgtcaggatccgacgacaacgacgtcgtcatcatcggcggcggtcctggaggttatgtggcggcgattaaagcggcacagctcggtcttaagactacctgtatcgaaaagcgaggcgctctcggtggtacttgtcttaacgtcggctgtattccttcaaaggcccttcttcactcttctcacatgtaccatgaagcaaagcacgtttttgctaaccatggtgttaaggtctcttcggttgaggtagatcttcctgctatgttggcgcagaaagacacagccgtcaagaatttaacccgtggagtcgaaggtctgttcaagaagaacaaggtaaactatgttaagggctatggtaagtttctgtccccatcggaagtctctgtggacacaatcgatggagaaaacgtggttgtgaaaggcaaacatatcatagttgcaactggctcggatgtcaagtctttgcctggaatcaccatcgatgaaaagaagattgtctcatcaaccggggcactgtctctgacagagatcccaaagaaactcattgtcattggtgctggctatattgggctagagatgggttctgtatggggacggctaggatcagaggtcacagttgttgagtttgcagcggatatcgtaccagcaatggatggtgaaatccgcaagcagtttcaacgctcactagagaagcagaagatgaaatttatgctcaaaactaaagtcgttggggtagattcatctggagatggtgttaaactcatagtggaacctgctgaaggtggagaacagaccactctagaagctgatgtggtcctcgtctcagctggtagaactccgttcacatctggacttgatctagagaaaatcggagttgagacagacaaaggcgggagaattctggtgaacgagagattctcgacaaatgtttcaggcgtttatgcaattggagatgtgattccaggaccaatgctggctcacaaagccgaagaagatggtgttgcatgtgttgagtttatagcaggcaaacacgggcatgtggattacgacaaagtccctggggttgtctacacgtaccctgaagttgcgtcggttggtaaaaccgaggagcagctgaagaaagaaggtgtaagctacaatgttggaaaattcccattcatggccaatagcagagccaaggccatagacacagcagagggaatggtcaagattttggctgataaagagacagacaagatcttgggagttcacattatgtcaccaaacgcaggagaattgatccatgaggcggttctagctatcaactatgatgcatcaagtgaagacattgctcgagtctgtcacgctcatcccaccatgagtgaggctatcaaggaagctgccatggctacctatgacaagcccattcacatgtag

SEQ ID NO: 57993 - protein, 507 aa, Arabidopsis thaliana
MAMASLARRKAYFLTRNISNSPTDAFRFSFSLTRGFASSGSDDNDVVIIGGGPGGYVAAIKAAQLGLKTTCIEKRGALGGTCLNVGCIPSKALLHSSHMYHEAKHVFANHGVKVSSVEVDLPAMLAQKDTAVKNLTRGVEGLFKKNKVNYVKGYGKFLSPSEVSVDTIDGENVVVKGKHIIVATGSDVKSLPGITIDEKKIVSSTGALSLTEIPKKLIVIGAGYIGLEMGSVWGRLGSEVTVVEFAADIVPAMDGEIRKQFQRSLEKQKMKFMLKTKVVGVDSSGDGVKLIVEPAEGGEQTTLEADVVLVSAGRTPFTSGLDLEKIGVETDKGGRILVNERFSTNVSGVYAIGDVIPGPMLAHKAEEDGVACVEFIAGKHGHVDYDKVPGVVYTYPEVASVGKTEEQLKKEGVSYNVGKFPFMANSRAKAIDTAEGMVKILADKETDKILGVHIMSPNAGELIHEAVLAINYDASSEDIARVCHAHPTMSEAIKEAAMATYDKPIHM

SEQ ID NO: 57994 - DNA, 1401 bp, Pseudomonas putida
  CDS (1)..(1401): transl_table=11
atgaaatcctatgacgtggtgatcatcggcggtggccctggtggctacaacgccgccatccgcgccggccagctggggctgaccgttgcctgtgtggaaggccgctcgaccttgggcggcacctgcctgaacgtgggctgcatgccgtccaaggcgttgctgcacgcttccgaactgtacgaggctgccagtggcgacgagttcgcccacctgggtatcgaagtaaaacccaccctcaacctcgcccagatgatgaaacagaaggacgagagcgtaaccgggctgaccaaaggcattgagtatctgttccgcaaaaacaaagtggactggatcaagggctggggccgcctggatggcgttggcaaggttgtggtcaaggccgaagacggcagcgaaactgcgctgcaggccaaggacattgtcattgccaccggctccgaacccaccccgctgccgggcgtgaccatcgacaaccagcgcatcatcgattcgaccggtgcgctgtccctgccccaagtgcccaagcacctggtcgtcatcggtgccggtgtgatcggccttgagctgggttcggtctggcgccgcctgggaagccaggtcacggtcatcgaatacctcgaccgtatttgcccgggcaccgacacggaaaccgccaagaccctgcagaaggcactggccaagcaaggcatggtgttcaagttgggtagcaaagtgacccaggccaccgccagtgccgacggcgtgagcctggtgctggaacctgccgccggtggcacggcagaatcactgcaggccgactatgtgctggtggctatcggccgccgcccttataccaaagggctgaacctggaaagcgtaggcctggaaaccgacaagcgcggcatgctcgcccaacgaacaccaccgacatccgtgccgggtgtctgggtgattggcgacgtcacctccggcccgatgctggcacataaagccgaagacgaagcggtggcctgtatcgagcgaatcgccggcaagccacacgaggtcaactacaacctcatcccgggcgtgatctacacccgcccggagctggccaccgtgggcaagaccgaagagcagctcaaggctgaaggccgtgcctacaaggtcggcaagttccccttcaccgccaacagccgcgccaagataaaccacgaaaccgaaggcttcgccaaggttatcgccgatgccgaaaccgatgaggtgctgggtgtgcacctggtaggcccaagtgtcagcgaaatgatcggcgaattctgcgtggccatggagttctcggcctcggcggaagatatcgccctcacctgccacccgcacccgacccgctccgaggcattgcgccaggcggcgatgaatgtggacggtatggcaatgcagatctga

SEQ ID NO: 57995 - protein, 466 aa, Pseudomonas putida
MKSYDVVIIGGGPGGYNAAIRAGQLGLTVACVEGRSTLGGTCLNVGCMPSKALLHASELYEAASGDEFAHLGIEVKPTLNLAQMMKQKDESVTGLTKGIEYLFRKNKVDWIKGWGRLDGVGKVVVKAEDGSETALQAKDIVIATGSEPTPLPGVTIDNQRIIDSTGALSLPQVPKHLVVIGAGVIGLELGSVWRRLGSQVTVIEYLDRICPGTDTETAKTLQKALAKQGMVFKLGSKVTQATASADGVSLVLEPAAGGTAESLQADYVLVAIGRRPYTKGLNLESVGLETDKRGMLAQRTPPTSVPGVWVIGDVTSGPMLAHKAEDEAVACIERIAGKPHEVNYNLIPGVIYTRPELATVGKTEEQLKAEGRAYKVGKFPFTANSRAKINHETEGFAKVIADAETDEVLGVHLVGPSVSEMIGEFCVAMEFSASAEDIALTCHPHPTRSEALRQAAMNVDGMAMQI

SEQ ID NO: 57996 - DNA, 1398 bp, Chlamydia muridarum
  CDS (1)..(1398): transl_table=11
atgaatgaagctttcgactgtgtagtgattggagcagggcctggaggctatgttgccgccattactgccgcccaagcaggattaaaaactgcgctaatcgaagagcgggaagctggaggaacctgtttaaaccggggatgcattccttctaaagctctacttgcatcggcagaaattgttgcccaaatacgccatgctgaccaatttggcattcatattaatggtttcagcattgactatcccgctatggtacaaagaaaggatactgttgttcgcagtattcgtgatgggcttaatggcttgattcgtagcaacaaaatcactgtgttttctggaagaggttccttaatttcttcaacagaagtaaaaattttgggggaaactccttctgtaatcaaagcacaatccattatcctggctacaggatctgaacctagagcctttcctggggtccctttttcccaacaatctcctagaatcttatgctcgacaggagttcttaacctaaaagaaatccctcaaaaaatggctattatcggaggtggggtcattggatgtgaattcgcttccttattccataccctaggatcagaagtttccgtcatcgaagcaagccaacaaattctagccctgaataatccagatatttcgaaaaccatgttcgataagttcacgcgtcatggcattcgctttatgttaggagcgtctgtgtcgagcattgaggatatgggtgatcgcgttcgactaactattaacggaaatattgaagaatacgattacgttctcgtatccataggacgtcgattgaatacagaaaatattggattagataaagccggtgtgatttgtgacgaacgcggagtcatccctacagattccactatgcgcactaacgttcctaatatttatgctattggagatatcacagggaaatggcaacttgcccatgtggcctcccaccagggaattgttgctgctcgaaatatagctggacataaggatgaaatcgattattctgcagtcccttccgtaatttttactttcccggaagttgcatccgtgggactttctccgacatcagctcaacaacaaggaattcctgtcaaagtaacgaaattcccattccgagccattgggaaagccgttgctatgggcgaatccgacggatttgctgccattatcagccatgaaacttctcagcaaattctaggtgcttacgttattggccctcacgcctcttctcttatttccgaaatcaccttagctattcgcaatgagctgaccctcccctgcatttatgaaaccatccatgcacatccaaccttagcagaagtttgggcagaaagtgcactattggccgttgataccccgttacatatgccccctactagaaaatga

SEQ ID NO: 57997 - protein, 465 aa, Chlamydia muridarum
MNEAFDCVVIGAGPGGYVAAITAAQAGLKTALIEEREAGGTCLNRGCIPSKALLASAEIVAQIRHADQFGIHINGFSIDYPAMVQRKDTVVRSIRDGLNGLIRSNKITVFSGRGSLISSTEVKILGETPSVIKAQSIILATGSEPRAFPGVPFSQQSPRILCSTGVLNLKEIPQKMAIIGGGVIGCEFASLFHTLGSEVSVIEASQQILALNNPDISKTMFDKFTRHGIRFMLGASVSSIEDMGDRVRLTINGNIEEYDYVLVSIGRRLNTENIGLDKAGVICDERGVIPTDSTMRTNVPNIYAIGDITGKWQLAHVASHQGIVAARNIAGHKDEIDYSAVPSVIFTFPEVASVGLSPTSAQQQGIPVKVTKFPFRAIGKAVAMGESDGFAAIISHETSQQILGAYVIGPHASSLISEITLAIRNELTLPCIYETIHAHPTLAEVWAESALLAVDTPLHMPPTRK

SEQ ID NO: 57998 - DNA, 1386 bp, Chlamydia pneumoniae
  CDS (1)..(1386): transl_table=11
atgacccaagaatttgattgtgttgttattggtgcgggacctagtggctatgttgccgcaatcactgctgcgcaatcaaaattacggaccgctcttattgaagaagaccaggctggggggacctgcttaaaccgcggatgcatcccttcaaaagccctcattgctggagccaatgttgtatctcacattaagcatgcggagcagttcggcatccatgttgatggttatacaatcgattaccctgcgatggcaaaaagaaaaaatacagtcgtccaggggatccgtcaaggattagaaggattgatccgcagcaacaagattactgtcttaaaaggaaccggatctctagtatcttctacagaagttaaagttattggccaagacacgactataatcaaagccaatcatattatcctagctacaggatccgagcctcgtcctttcccaggggttcccttctcctctagaattttgagttccacagggatcttagaacttgaagtcctccctaaaaagctcgctattattggtggcggcgttattggctgtgaatttgcgtctctatttcacactttaggcgttgagattaccgttatagaagctttggatcatattcttgcggttaacaataaagaagtttctcaaaccgtaacgaataaatttacgaaacaaggaattcgaattcttaccaaagcctcgatctctgcaatcgaagaatcccaaaaccaagttcgcattactgtgaacgatcaagtggaagagtttgattatgtcttggtggctattggtcgccaatttaatacagcaagtatagggctagataatgctggagtgatccgggacgatcgtggcgtgattcctgttgacgaaaccatgcgcactaatgttccaaatatctatgcgattggagacatcactggaaagtggctacttgctcatgtggcttcgcaccaaggcgttattgccgcgaaaaatatttcgggacatcacgaagttatggattattctgccataccttctgtgatctttacccacccagaaattgctatggtaggtctatctctacaagaagcagaacaacaaaatcttcctgcaaagctcaccaaatttccttttaaagcgattggaaaagctgttgctttgggagcatctgatggttttgctgctattgtgagtcatgaaattacccagcaaatactcggagcttatgtcataggacctcacgcctcatcattaattggagagatgaccttagcgatccgcaatgagctgaccctaccttgcatatatgaaaccgtgcatgctcatcccacactctctgaagtttgggctgaaggtgctttacttgctacaaatcaccctttacacttccctcctaagtcatga

SEQ ID NO: 57999 - protein, 461 aa, Chlamydia pneumoniae
MTQEFDCVVIGAGPSGYVAAITAAQSKLRTALIEEDQAGGTCLNRGCIPSKALIAGANVVSHIKHAEQFGIHVDGYTIDYPAMAKRKNTVVQGIRQGLEGLIRSNKITVLKGTGSLVSSTEVKVIGQDTTIIKANHIILATGSEPRPFPGVPFSSRILSSTGILELEVLPKKLAIIGGGVIGCEFASLFHTLGVEITVIEALDHILAVNNKEVSQTVTNKFTKQGIRILTKASISAIEESQNQVRITVNDQVEEFDYVLVAIGRQFNTASIGLDNAGVIRDDRGVIPVDETMRTNVPNIYAIGDITGKWLLAHVASHQGVIAAKNISGHHEVMDYSAIPSVIFTHPEIAMVGLSLQEAEQQNLPAKLTKFPFKAIGKAVALGASDGFAAIVSHEITQQILGAYVIGPHASSLIGEMTLAIRNELTLPCIYETVHAHPTLSEVWAEGALLATNHPLHFPPKS

SEQ ID NO: 58000 - DNA, 1494 bp, Manduca sexta
  CDS (1)..(1494)
atgggctacaaatttttgaaactcgcctccgcttcctttaggaatggaggtgtacgtattgtgtcaagacaatactccacaacacatgatgcagaccttgtggttattggagcgggccctggtggttatgtggcagccattaaagccgcacaacttggcatgaaggtggtgtctgtggaaaaggaaccatccctgggtggaacatgtctaaatgttggttgcatcccatcaaaagccctcctccacaacacacatttgtaccacatggccaagcatgacttcaaacaccgtggcatagaaactggtgaagtcaaattcaacttcaaagccatgatggactataaagttaatgcagtgaaagccctcactgggggtattgctatgctgttccagaaaaacaaggtgaaacttgttcgtggagcaggtacaattgttgcacccaacaaagttgaagtgaagggtgaaaagggtgtggagactgtgaacactaaaaacattcttattgctactggctcggaagtaacacctttccccggtgtcacgtttgatgaaaagcaaatcataacatcaactggtgctctgtctttggaatctgtgccaaagaaaatgttggtgattggtgcgggagtcatcggacttgagttaggatctgtttaccagcggctcggtgctgatgttactgccattgagttccttggttccattggaggtattggcattgatatggaagtaagcaaagactacagaatcttagccaaacagggaatgaaattcaaacttgagaccaaagtgttgggtgttaagaaggaagggagcacagtgaaagtggaagatgtgtcaatcgagggagccaagggtggtaacaaggaaactatggactgtgatgttgtcctgatttcgattggtcgtcgcccctacactaaggacttggggctggacaaggtcggcatcgctctggatgaccgcggtcgcgtcccggtcaacaacaaattccagaccactgtgcccggaatttacgctattggtgacgtcatccacgggcccatgttggcacacaaggccgaggacgaaggtattgtgtgcgtcgaaggtatcaagggtatgccagttcatttcaattacgatgccattccatcagtcatctacacatcacctgaagttggctgggttcggaaaacggaggaagatcttaagaaggagggcaaagcgtacaaagtgcgcaaattcccattcttagccaactccagagcaaagaccaacggcgaacccgacggcttcgtgaaggttttgtctgacaaggcgactgatgtcattctaggaacccacattattggccccggcggtggcgagctgatcaacgaagctgtgttggcccaggagtacggcgccgcggccgaggacgtcgcgagagtgtgccacgcgcatcctacatgtgccgaggcgcttcgtgaggctaacctggcagcatactgcggcaaaccgataaacttctaa

SEQ ID NO: 58001 - protein, 497 aa, Manduca sexta
MGYKFLKLASASFRNGGVRIVSRQYSTTHDADLVVIGAGPGGYVAAIKAAQLGMKVVSVEKEPSLGGTCLNVGCIPSKALLHNTHLYHMAKHDFKHRGIETGEVKFNFKAMMDYKVNAVKALTGGIAMLFQKNKVKLVRGAGTIVAPNKVEVKGEKGVETVNTKNILIATGSEVTPFPGVTFDEKQIITSTGALSLESVPKKMLVIGAGVIGLELGSVYQRLGADVTAIEFLGSIGGIGIDMEVSKDYRILAKQGMKFKLETKVLGVKKEGSTVKVEDVSIEGAKGGNKETMDCDVVLISIGRRPYTKDLGLDKVGIALDDRGRVPVNNKFQTTVPGIYAIGDVIHGPMLAHKAEDEGIVCVEGIKGMPVHFNYDAIPSVIYTSPEVGWVRKTEEDLKKEGKAYKVRKFPFLANSRAKTNGEPDGFVKVLSDKATDVILGTHIIGPGGGELINEAVLAQEYGAAAEDVARVCHAHPTCAEALREANLAAYCGKPINF

SEQ ID NO: 58002 - DNA, 1627 bp, Pisum sativum
  CDS (34)..(1539)
aaaaagttagcgttaagtgatcgaatcgaaaaaatggctatggcgaacttggctcgtcggaagggttactctcttctctcatcggagactctccgctactctttttctctcaggtcaagagctttcgcctccggatctgatgaaaacgacgtcgtcatcatcggtggtggtcccggcggttacgtcgccgccattaaagccgctcagcttggtttcaaaactacttgcatcgagaagcgtggcgccctcggtggtacttgtctcaacgttggatgcatcccttccaaggcacttttgcattcttcgcatatgtaccatgaggctaaacattcatttgccaaccatggtgttaaagtttcaaatgtggagattgacttggctgccatgatggggcaaaaagataaagctgtttctaatcttacccggggtattgaaggcctatttaagaagaataaggtaacctatgttaaaggatatggaaaatttgtttcgccgtctgaaatctctgtagacaccattgaaggtgaaaatactgtggttaagggaaagcatatcattattgctactggttcagatgtcaaatctctccccggtgtcactattgatgaaaagaaaattgtatcatcgactggggctctcgcattgtctgaaatccctaagaagcttgtagttattggggcaggttacattgggctggaaatgggctcagtgtggggccgaattgggtctgaggtaactgttgttgagtttgcatcagagattgttccaaccatggacgcagaaatccggaagcagtttcagcgttctcttgaaaagcaaggcatgaaattcaaactgaagaccaaggtggttggagttgatacttctggggatggtgtgaagctaaccgttgaaccatccgctggcggtgaacagaccataattgaagcagatgttgtccttgtttcggctggtagaactccattcacttctggacttaatttggataagataggagttgagactgacaagttaggacggattttggtaaatgaaagattttcaacaaatgtctctggtgtctatgcaatcggagatgtgattccaggtccaatgttggcacacaaggcagaagaagatggagttgcttgtgtcgagtacttagccggtaaggttggccatgtggactatgacaaagtaccaggtgttgtctatacaaaccctgaagttgcatctgtagggaagacagaggagcaggttaaggaaactggagttgaataccgtgttggaaagttccctttcatggctaatagcagggcaaaggcaattgataacgctgaaggactagtcaagataattgctgaaaaggagacagacaaaatattgggagtacatattatggcacctaatgcaggagaactcattcatgaagcagccatagcattgcagtatgatgcatcaagtgaggacatagcacgtgtgtgccatgcacatccaacaatgagcgaagctattaaagaagctgcaatggcaacatatgacaagcccattcacatttgaagagctggttgcttctttcttctcttgttttcatttttgtccaaggatttaccttgacttggagaagatactttgtgtgttaaactta

SEQ ID NO: 58003 - protein, 501 aa, Pisum sativum
MAMANLARRKGYSLLSSETLRYSFSLRSRAFASGSDENDVVIIGGGPGGYVAAIKAAQLGFKTTCIEKRGALGGTCLNVGCIPSKALLHSSHMYHEAKHSFANHGVKVSNVEIDLAAMMGQKDKAVSNLTRGIEGLFKKNKVTYVKGYGKFVSPSEISVDTIEGENTVVKGKHIIIATGSDVKSLPGVTIDEKKIVSSTGALALSEIPKKLVVIGAGYIGLEMGSVWGRIGSEVTVVEFASEIVPTMDAEIRKQFQRSLEKQGMKFKLKTKVVGVDTSGDGVKLTVEPSAGGEQTIIEADVVLVSAGRTPFTSGLNLDKIGVETDKLGRILVNERFSTNVSGVYAIGDVIPGPMLAHKAEEDGVACVEYLAGKVGHVDYDKVPGVVYTNPEVASVGKTEEQVKETGVEYRVGKFPFMANSRAKAIDNAEGLVKIIAEKETDKILGVHIMAPNAGELIHEAAIALQYDASSEDIARVCHAHPTMSEAIKEAAMATYDKPIHI

SEQ ID NO: 58004 - DNA, 1800 bp, Pseudomonas fluorescens
  CDS (99)..(1535): transl_table=11
gatccggctcgcctgctgctggacgtctgatttagcgtttctcttcacggcggccccctcgtggggccgtccggtttcacccgaataaggattgagatatgagccagaaattcgacgtggtagtgattggtgccggccccggcggttacgttgccgccatccgcgctgcccagctgggcctgaagaccgcctgcatcgagaagtacatcggcaaggaaggcaaggtggcgctcggcggtacctgcctgaacgttggctgcatcccgtccaaggcgctgctggacagctcctacaagtaccatgaggccaaagaagccttcaaagtccatggtatcgaagccaagggcgtcaccatcgacgttccggcgatggttgcgcgcaaggccaacatcgtcaagaacctgaccggcggcatcgctaccctgttcaaggccaacggcgtgacctccttcgaaggccacggcaagctgctggccaacaagcaggtggaagtgaccggtctggacggcaagacccaggtcctggaagccgagaacgtgatcatcgcttccggctcccgcccggtggagatcccgccggccccgctgagcgacgacatcatcgtcgactccaccggcgccctggaattccaggccgtgccgaagaagctgggtgtgatcggcgccggcgtcatcggcctggagctgggttcggtatgggcccgcctgggtgccgaggtgaccgtgctggaagccctggacaagttcctcccggctgccgacgagcagatcgccaaggaagccctgaaggtcctgaccaagcaaggcctgaacattcgcctgggcgcccgcgtgaccgcctcggaagtgaagaagaagcaggtcaccgtgaccttcaccgatgccaacggcgagcagaaggaaaccttcgacaagctgatcgtcgcggtcggccgtcgcccggtgaccaccgacctgctggccgccgacagcggcgtgaccctggacgagcgtggcttcatctacgtcgacgaccactgcaagaccagcgttccgggcgtcttcgccatcggtgacgtggttcgcggcgcgatgctcgcgcacaaggcctcggaagagggcgtgatggtcgccgagcgcatcgccggccacaaggcgcagatgaactacgacctgatcccgtcggtcatctacacccacccggaaatcgcctgggtcggcaagaccgagcagaccctcaaggccgagggcgtcgaagtcaacgtcggcaccttcccgttcgccgccagcggtcgtgcgatggctgccaacgacaccaccggcctggtcaaggtcatcgccgatgcgaagaccgaccgcgtcctgggcgtccacgtgatcggcccgagcgccgccgagctggtacagcaaggcgcgatcggcatggaattcggcaccagcgccgaagatctgggcatgatggtcttctcccacccgacgctgtccgaagccctgcacgaagctgccctggcggtgaatggccatgccatccacatcgccaaccgcaagaagcgctgagtgatccgacgccccggttcacgccaggggcgtcacagcgacgcgggacgcgtcgtccgtcaggccaggacaggttcctggccttgtcgggtccgggttctgtagaatccacggtttgccgcctgcgtcgggatgacgcaggcggcagactttcagaagaaccacggcgggtgagcgccggcgaccgttgcgaggtggccgcggcgtatgccgccggactgttttttcgcgagccgggtggttcgcgaagcgacggtcacaggtg

SEQ ID NO: 58005 - protein, 478 aa, Pseudomonas fluorescens
MSQKFDVVVIGAGPGGYVAAIRAAQLGLKTACIEKYIGKEGKVALGGTCLNVGCIPSKALLDSSYKYHEAKEAFKVHGIEAKGVTIDVPAMVARKANIVKNLTGGIATLFKANGVTSFEGHGKLLANKQVEVTGLDGKTQVLEAENVIIASGSRPVEIPPAPLSDDIIVDSTGALEFQAVPKKLGVIGAGVIGLELGSVWARLGAEVTVLEALDKFLPAADEQIAKEALKVLTKQGLNIRLGARVTASEVKKKQVTVTFTDANGEQKETFDKLIVAVGRRPVTTDLLAADSGVTLDERGFIYVDDHCKTSVPGVFAIGDVVRGAMLAHKASEEGVMVAERIAGHKAQMNYDLIPSVIYTHPEIAWVGKTEQTLKAEGVEVNVGTFPFAASGRAMAANDTTGLVKVIADAKTDRVLGVHVIGPSAAELVQQGAIGMEFGTSAEDLGMMVFSHPTLSEALHEAALAVNGHAIHIANRKKR

SEQ ID NO: 58006 - DNA, 1536 bp, Schizosaccharomyces pombe
  CDS (1)..(1536)
atgttgaactctgtgattaaaagatcggcactttgccggttcaaattcacgtgtttgcaggttagtgaatgcagaccggcacaaattgaaatttctaagcgattgtactctgcaaaagcctctggaaacggagaatacgatctttgcgttataggcggtggtcctggcggttatgttgctgccattcgtggtgcacaactaggtttgaagaccatttgcgttgaaaaaagaggtaccttgggaggcacttgcttaaatgttggttgcatcccttccaaggctttgttgaataactctcatatataccatactgttaaacatgataccaagcgacgtggcattgacgtttccggtgttagcgtcaatctttctcaaatgatgaaagccaaggacgattctgttaagtcattaacgtccggtattgaatatcttttcaaaaaaaataaggtagaatatgctaagggtacaggctctttcatcgatcctcaaactctctctgttaagggaattgatggtgctgcagatcaaactattaaagccaaaaacttcatcattgccactggaagtgaagttaagccattcccaggtgtaacaattgatgagaagaaaattgtttcttctacaggtgccttatctttatcagaggtcccaaaaaagatgaccgttcttggtggtggtatcattggattggagatgggcagtgtatggtcaagacttggtgcagaggttaccgtcgttgagtttttgccagctgttggaggtcctatggatgcagacatttccaaggctttatctcgtatcatttctaagcaaggtatcaaatttaagacatctaccaaattgcttagcgccaaggtgaatggtgacagcgttgaggttgaaattgagaatatgaagaataacaagcgtgaaacttatcagactgatgttttgttggttgctatcggccgtgttccatacactgagggtcttggcctcgataagcttggaatttctatggataaaagcaacagagtaattatggatagtgagtaccgtactaacatcccccatatccgtgtgattggtgacgctacccttggtcctatgttagctcacaaggcagaagatgagggtattgccgctgttgagtatatcgcaaagggtcagggacatgttaattacaactgtattcccgctgtaatgtacactcatcctgaagttgcttgggttggtattaccgaacaaaaggccaaagaaagcggtattaagtatagaattggcactttccccttttccgccaattcccgtgccaagaccaatatggatgccgatggtcttgttaaagtcattgtagatgcggaaaccgaccgtttacttggagtacacatgattggccctatggctggtgaattgattggtgaagcaactctcgctcttgaatatggagctagtgctgaagatgtcgctcgtgtttgccatgcccatcccactttgagtgaggctactaaggaagcaatgatggctgcctggtgtggaaagagtattcacttttag

SEQ ID NO: 58007 - protein, 511 aa, Schizosaccharomyces pombe
MLNSVIKRSALCRFKFTCLQVSECRPAQIEISKRLYSAKASGNGEYDLCVIGGGPGGYVAAIRGAQLGLKTICVEKRGTLGGTCLNVGCIPSKALLNNSHIYHTVKHDTKRRGIDVSGVSVNLSQMMKAKDDSVKSLTSGIEYLFKKNKVEYAKGTGSFIDPQTLSVKGIDGAADQTIKAKNFIIATGSEVKPFPGVTIDEKKIVSSTGALSLSEVPKKMTVLGGGIIGLEMGSVWSRLGAEVTVVEFLPAVGGPMDADISKALSRIISKQGIKFKTSTKLLSAKVNGDSVEVEIENMKNNKRETYQTDVLLVAIGRVPYTEGLGLDKLGISMDKSNRVIMDSEYRTNIPHIRVIGDATLGPMLAHKAEDEGIAAVEYIAKGQGHVNYNCIPAVMYTHPEVAWVGITEQKAKESGIKYRIGTFPFSANSRAKTNMDADGLVKVIVDAETDRLLGVHMIGPMAGELIGEATLALEYGASAEDVARVCHAHPTLSEATKEAMMAAWCGKSIHF

SEQ ID NO: 58008 - DNA, 1428 bp, Vibrio cholerae
  CDS (1)..(1428): transl_table=11
atgagcaaagaaattaaagcccaagtcgtggtgcttggtgccggtcctgctggttactccgccgcattccgctgtgcagacttaggtctggataccgtcatcatcgaacgttacaacacgctaggtggtgtgtgtctgaacgttggttgtattccttctaaagcactgctgcacgttgcaaaagtgattgaagaagctaaagcgctgactgagcacggtatcgtgtttggcgagccaaaaacagacatcgacaaagttcgtctgtggaaagaaaaagtgatcaatcagctgaccggtggtctggctggtatggcaaaaatgcgtaaagtgaacgtagtgaacggctacggtaaattcactggcccgaacaccattgaagtggacggtgaagagggcaaaactgtcgtaactttcgataacgcgatcgttgcagccggttctcgtccaatcaaactgccattcattccgcatgaagacccacgtatttgggattcaaccgatgcgctggaactgaaagaagtgcctggaaaactgcttatcatgggcggtggtatcatcggtctggaaatggcgaccgtttaccactcactgggttctaaaattgatgtggttgagatgtttgaccaacttatccctgctgcggataaagatatggttaaagtctataccaaacgcatcaaagataagttcaacctgatgctggaaaccaaagtgaccgccgttgaagcgaaagaagatggtatctacgtttcaatggaaggtaagagcgcaccagcacaagctgagcgttacgatgcggttctggttgcgattggccgtgtaccaaacggtaaactgctggatgctgagaaagcgggtctggaagtggacgagcgtggctttatccgtgtggataagcaaatgcgcactaatgttccgcacatcttcgcgatcggcgacatcgtgggtcaaccaatgttggcacacaaaggcgtgcatgaaggccacgtagcggcagaagtgatctctggtaagaagcactacttcgatccaaaagtgatcccatctatcgcttacactgagccagaagtggcttgggttggtaagacagaaaaagaagcgaaagcagaaggcatcaactatgaagtggcgactttcccatgggcagcttctggccgtgcgattgcttctgactgtgcagacggtatgactaagcttatcttcgataaagagactcaccgcgtgatcggtggtgctatcgtaggtactaacggtggtgaattgctgggtgaaatcggtctggcgatcgagatgggctgtgatgcagaagacatcgcactgaccattcatgctcacccaacgctgcatgagtctgtgggtctggcggctgaagtattcgaaggcaccatcactgacctgccaaacgccaaagcgaaaaagaaaaagtaa

SEQ ID NO: 58009 - protein, 475 aa, Vibrio cholerae
MSKEIKAQVVVLGAGPAGYSAAFRCADLGLDTVIIERYNTLGGVCLNVGCIPSKALLHVAKVIEEAKALTEHGIVFGEPKTDIDKVRLWKEKVINQLTGGLAGMAKMRKVNVVNGYGKFTGPNTIEVDGEEGKTVVTFDNAIVAAGSRPIKLPFIPHEDPRIWDSTDALELKEVPGKLLIMGGGIIGLEMATVYHSLGSKIDVVEMFDQLIPAADKDMVKVYTKRIKDKFNLMLETKVTAVEAKEDGIYVSMEGKSAPAQAERYDAVLVAIGRVPNGKLLDAEKAGLEVDERGFIRVDKQMRTNVPHIFAIGDIVGQPMLAHKGVHEGHVAAEVISGKKHYFDPKVIPSIAYTEPEVAWVGKTEKEAKAEGINYEVATFPWAASGRAIASDCADGMTKLIFDKETHRVIGGAIVGTNGGELLGEIGLAIEMGCDAEDIALTIHAHPTLHESVGLAAEVFEGTITDLPNAKAKKKK

SEQ ID NO: 58010 - DNA, 1500 bp, Saccharomyces cerevisiae
  CDS (1)..(1500)
atgttaagaatcagatcactcctaaataataagcgtgccttttcgtccacagtcaggacattgaccattaacaagtcacatgatgtagtcatcatcggtggtggccctgctggttacgtggctgctatcaaagctgctcaattgggatttaacactgcatgtgtagaaaaaagaggcaaattaggcggtacctgtcttaacgttggatgtatcccctccaaagcacttctaaataattctcatttattccaccaaatgcatacggaagcgcaaaagagaggtattgacgtcaacggtgatatcaaaattaacgtagcaaacttccaaaaggctaaggatgacgctgttaagcaattaactggaggtattgagcttctgttcaagaaaaataaggtcacctattataaaggtaatggttcattcgaagacgaaacgaagatcagagtaactcccgttgatgggttggaaggcactgtcaaggaagaccacatactagatgttaagaacatcatagtcgccacgggctctgaagttacacccttccccggtattgaaatagatgaggaaaaaattgtctcttcaacaggtgctctttcgttaaaggaaattcccaaaagattaaccatcattggtggaggaatcatcggattggaaatgggttcagtttactctagattaggctccaaggttactgtagtagaatttcaacctcaaattggtgcatctatggacggcgaggttgccaaagccacccaaaagttcttgaaaaagcaaggtttggacttcaaattaagcaccaaagttatttctgcaaagagaaacgacgacaagaacgtcgtcgaaattgttgtagaagatactaaaacgaataagcaagaaaatttggaagctgaagttttgctggttgctgttggtagaagaccttacattgctggcttaggggctgaaaagattggattagaagtagacaaaaggggacgcctagtcattgatgaccaatttaattccaagttcccacacattaaagtggtaggagatgttacatttggtccaatgctggctcacaaagccgaagaggaaggtattgcagctgtcgaaatgttgaaaactggtcacggtcatgtcaactataacaacattccttcggtcatgtattctcacccagaagtagcatgggttggtaaaaccgaagagcaattgaaagaagccggcattgactataaaattggtaagttcccctttgcggccaattcaagagccaagaccaaccaagacactgaaggtttcgtgaagattttgatcgattccaagaccgagcgtattttgggggctcacattatcggtccaaatgccggtgaaatgattgctgaagctggcttagccttagaatatggcgcttccgcagaagatgttgctagggtctgccatgctcatcctactttgtccgaagcatttaaggaagctaacatggctgcctatgataaagctattcattgttga

SEQ ID NO: 58011 - protein, 499 aa, Saccharomyces cerevisiae
MLRIRSLLNNKRAFSSTVRTLTINKSHDVVIIGGGPAGYVAAIKAAQLGFNTACVEKRGKLGGTCLNVGCIPSKALLNNSHLFHQMHTEAQKRGIDVNGDIKINVANFQKAKDDAVKQLTGGIELLFKKNKVTYYKGNGSFEDETKIRVTPVDGLEGTVKEDHILDVKNIIVATGSEVTPFPGIEIDEEKIVSSTGALSLKEIPKRLTIIGGGIIGLEMGSVYSRLGSKVTVVEFQPQIGASMDGEVAKATQKFLKKQGLDFKLSTKVISAKRNDDKNVVEIVVEDTKTNKQENLEAEVLLVAVGRRPYIAGLGAEKIGLEVDKRGRLVIDDQFNSKFPHIKVVGDVTFGPMLAHKAEEEGIAAVEMLKTGHGHVNYNNIPSVMYSHPEVAWVGKTEEQLKEAGIDYKIGKFPFAANSRAKTNQDTEGFVKILIDSKTERILGAHIIGPNAGEMIAEAGLALEYGASAEDVARVCHAHPTLSEAFKEANMAAYDKAIHC

SEQ ID NO: 58012 - DNA, 2029 bp, Pisum sativum
  CDS (82)..(1740)
cttgtattactccaccgagatatccggattatcaaggtggttggttactaagcaccaccgggaacagagagggaaactctaatgaaccaagcaatggctactccactttctctctcttgttgttctccaactctaactcgcagcactctcttcttcaccaaaacctttccattttctcgctccttctctacacctctccctctctccaccaaaaccctaatttccctctctccaccccatcgcaccttcgccgtccgcgctgaatcccaaaacggcgccgaccccgcccgccagtatgacttcgaccttttcaccatcggcgctggaagcggaggcgtccgtgcttcccgctttgcctccaatttcggcgcttcttctgctgtctgcgagctccctttctctactatctcctccgataccaccggtggtgtcggcggcacctgtgtaatacggggatgtgtccctaagaaattgctagtctatgcctcaaaattctctcatgaatttgaagaaagcaatggttttggatggagatatgacagtgaacctaagcatgactggagtagtttgattgctaataaaaacgccgagttgcagcggcttactggtatctataagaatactttgaaaaatgccggtgttaagttgattgaaggccgtggaaagattgtagatgctcacacagttgatgttgatgggaagttatattcagcgaaacacattttagtttcagttggaggtcgacccttcattcctgatattcctggaaaggaatatgcaatagattcagatgctgcccttgatttaccatcaaagcctcagaagatagctattgttggtgggggttacattgccttggagtttgctggtatctttaatggtttgaaaagtgaagttcatgtatttataagacaaaagaaggttttgcggggatttgatgaagagattagagattttgttgcagaaaatatggctctgagaggtattgaattccatactgaggagtctcctgtagctatcactaaggcagctgatggttcgctctctttaaagaccaacaaaggtactgaggaaggtttctctcatattatgtttgccactggacgctcacctaatactaaggatttgggcctggagtctgttggtgtgaaagtggctaaagatggatcaatagaggttgatgaatactctcaaacatcggttccttctatttgggcaattggagatgctacaaatagagtaaatctcactccagttgctttgatggagggagtggcattagcaaaaactttgtttcagaatgagccgacaaaacctgattatagggctataccttctgctgtgttttcccaaccaccaattggaggagttggtcttacagaggaacaggctgctgaacaatatggtgatattgacgttttcacagcaaattttaggccgatgaaggccaccctctctgggcttccagaccgggtttttatgaaactaatagtctctgcagaaacaaatgttgttcttggattgcacatgtgtggagaagatgctgctgaaattgcacaggggtttgcagttggtattaaagctggattaacaaaggcggactttgatgccacagtaggcattcatccaactgcagctgaggaatttgttaccatgaggactcccactaggaaggttcgaaagaaccaagcttcacaggggaagtcagattctaaagcaaaagctgtggctggatcttaagagtattaatttgcttcaattattatacccaaagaaacttgctgaggccttaaggcaggttattgagttttcgagtgatctctgtcaacggagctttcaagacaattcatgaaatagcctgcagagctcatctggaaaaggggagcagtggaattttgcgagctattatgtgcaatttgtaatttatttctcaccttttttaccaatttatttttcaccctaaccttacccatttgtacatattaagatgaaatttcgcgaggtactttgatgttaaataaaataatct

SEQ ID NO: 58013 - protein, 552 aa, Pisum sativum
MNQAMATPLSLSCCSPTLTRSTLFFTKTFPFSRSFSTPLPLSTKTLISLSPPHRTFAVRAESQNGADPARQYDFDLFTIGAGSGGVRASRFASNFGASSAVCELPFSTISSDTTGGVGGTCVIRGCVPKKLLVYASKFSHEFEESNGFGWRYDSEPKHDWSSLIANKNAELQRLTGIYKNTLKNAGVKLIEGRGKIVDAHTVDVDGKLYSAKHILVSVGGRPFIPDIPGKEYAIDSDAALDLPSKPQKIAIVGGGYIALEFAGIFNGLKSEVHVFIRQKKVLRGFDEEIRDFVAENMALRGIEFHTEESPVAITKAADGSLSLKTNKGTEEGFSHIMFATGRSPNTKDLGLESVGVKVAKDGSIEVDEYSQTSVPSIWAIGDATNRVNLTPVALMEGVALAKTLFQNEPTKPDYRAIPSAVFSQPPIGGVGLTEEQAAEQYGDIDVFTANFRPMKATLSGLPDRVFMKLIVSAETNVVLGLHMCGEDAAEIAQGFAVGIKAGLTKADFDATVGIHPTAAEEFVTMRTPTRKVRKNQASQGKSDSKAKAVAGS

SEQ ID NO: 58014 - DNA, 2081 bp, Glycine max
  CDS (59)..(1693)
ggaattcggcacgaggagcaagcaaaggcgggagaaagagaggcagcaaacaaaaacaatggcgacgtcgctctctgtttcgccatctctctctctcaacactctcttcatcgccaaagcgcttccactatctcgcccctcctttctctctctccctctccccaaatccctactctctctctccacgcgccgccgcaccttcatcgtccgcgccgaatcccaaaacggccgcgaccccgttcccgcccactacgacttcgacctcttcaccatcggcgcaggcagcggcggggtccgagcccgtcgcttcgccgccaactacggcgcttctgtcgccatctgcgagcttcctttctccactatctcctccgaaaccaccggagtcggcggaacctgtgtaatacgaggatgtgtgccgaagaagttgctggtttatgcatctaaattttctcatgaatttgaagaaagtaatggtttcggatggagatatgacagtgagcccaagcatgattggagtagtttcatagctaataaaaatgctgagttgcagcgtcttactggcatctacaagaatattttgaacaatgctggggtcaagctgattgaaggccatggaaagatgatagatcctcacacggttgatgttaatgggaagctatattcagccaaacacattttagttgcagttggaggtcgccccttcattcctgatatccctgggaaggaattagcaatagattcagatgctgcccttgatttaccaacaaaacctgtgaaaatagccattgttggtggtggttacattgccttggagtttgctggtatctttaatggtttgaaaagtgaggttcatgtatttatacggcaaaagaaggttttgcggggatttgatgaagagattagagattttgttgaagaacaaatgtctgtaagaggtattgaattccataccgaggagtctcctcaagctatcacgaagtcagcggatggctcattctctttaaagaccaacaaaggtacagtggacggtttctcacatattatgtttgctacaggacgcagacctaatactcagaacttaggcctggagtctgttggtgtgaaactagctaaagatggagctatagaggttgatgaatactctcaaacatcagtttattcaatttgggcagttggagatgttacaaacaggataaatctcaccccagttgctttgatggagggaggagcattagtaaaaacgctgtttcaggataacccaacaaaacctgattatagagctgttccttctgctgtattttctcaaccaccaattggacaagttggtcttactgaggaacaggctgtacaacaatatggagatattgacatcttcactgcaaattttaggccgctgaaagctactctctctgggcttccagaccgggtttttatgaaattagtagtctgtgcaaaaacaaatgaagttctaggtttgcatatgtgtggagaagatgctcctgaaattgtgcaggggtttgcagttgctcttaaagctcgcttgaccaaggctgactttgatgccactgtaggcattcacccaagtgcagctgaggaatttgttaccatgaggacacctactaggaagatacgaaagagtgaatcgtctgagggtaagtcgggctctcaagcaaaagctgcagcaggggtttaacaatatgactctgcttcaattgttatacttgaagaaaccagccggtgcctcaagggaagaaattcagaacgatcttcagctactgagttttcagagcaatacatggaatatctcattaaggtcgtgtgtcatacttctctggtcttgcaatgtaattatgacagttgggagcctggaagtcgagtgaaattcgtgccaatttttgccatttgtaatttaacttattttcccatgcatgtacaaaaaataagaggaaattccgtgtgggaatttgatttttacataatctctgcatcgaatttgaactagttggaattgagaccaacggcaatggtcagcatgaaaaatatttttcttttctaatatatataacgttgttcatctctgt

SEQ ID NO: 58015 - protein, 544 aa, Glycine max
MATSLSVSPSLSLNTLFIAKALPLSRPSFLSLPLPKSLLSLSTRRRTFIVRAESQNGRDPVPAHYDFDLFTIGAGSGGVRARRFAANYGASVAICELPFSTISSETTGVGGTCVIRGCVPKKLLVYASKFSHEFEESNGFGWRYDSEPKHDWSSFIANKNAELQRLTGIYKNILNNAGVKLIEGHGKMIDPHTVDVNGKLYSAKHILVAVGGRPFIPDIPGKELAIDSDAALDLPTKPVKIAIVGGGYIALEFAGIFNGLKSEVHVFIRQKKVLRGFDEEIRDFVEEQMSVRGIEFHTEESPQAITKSADGSFSLKTNKGTVDGFSHIMFATGRRPNTQNLGLESVGVKLAKDGAIEVDEYSQTSVYSIWAVGDVTNRINLTPVALMEGGALVKTLFQDNPTKPDYRAVPSAVFSQPPIGQVGLTEEQAVQQYGDIDIFTANFRPLKATLSGLPDRVFMKLVVCAKTNEVLGLHMCGEDAPEIVQGFAVALKARLTKADFDATVGIHPSAAEEFVTMRTPTRKIRKSESSEGKSGSQAKAAAGV

SEQ ID NO: 58016 - DNA, 1443 bp, Ashbya gossypii
  CDS (1)..(1443)
atgctacgttgcagagaagtatataacatttgcaaaggagcgatgtcgaacgaggtaaagcactacgattacttggttattggaggcggatccgggggcgtggcgtccagtcgcagggcggcgtcgtacggtgccaaaacggtgcttattgagggcaaggcactgggcgggacgtgcgtgaatgtggggtgtgtgccgaagaaggtgatgtggtatgcgtcggacttagcgcaccggctgctgcacgccagggactacgggttgctacaggaagtcgacatcagcaaggaaaagctgcacttcaactggaaggagttcgcggggaagcgtaacgcctatgtggagcggctgaacggcatctacgagcgcaatctcgcgaaggagggcgtggagtatgtacatgggtgggcgcggttcaacagcgagggccaggtcgaggtcacgcggccggaccagacgacggaaaagtacaccgcggaccacatcttgattgcaacgggcggagagccggtgttgccggagggcattcccggcgcggagtatggtgttgactcggacggcttcttccgcctggaggagcagcccaagaaggtggtgatctcgggcagtggctacatcgcgaccgagtttgccggtgtgttcaacggcctgggcaccgagacccacattgtgatcagaaaggaccatgttctgaccaagtttgacccgtccattcaagaaattgtcactgagcactacgagaaggagggtgtgaacattcacaagaaggagagcatccagcgcgtggagaaggacccgaacactggaaagctcactgtgcacttatcaggtaagatcatcgaggacgtggaccagcttgtgtgggccatcgggcggaagtctctactagggattgcccccgagaacgtgggtgtcaagttaggtgaaacggggcacgtcgtggtggatgagtaccagaacacctcgaccaagggcatatacgcgctcggcgatgttgtggggaacatggaactaactccagttgccattgcggcgggtcggaaactcgccaaccgactctttggacctgagcagatgagagctcagaaacaggactatgacaatgtcccaagcgttgtattctcccaccccgaggccggcagcattggcctgaccgagccacaggcgatcgaaaggtatggcaaggagaacataaagatttaccaaaccaagttcaccgcgatgtactatgctatgctggaggacaaatccccaactaagtacaagttgatctgcgctggaccagaagaaaaggttgtgggactgcacatcgtcggagatggttctgctgagatcttgcaaggtttcggtgttgccatcaagatgggcgccacgaaggccgattttgactcttgtgtcgctatccatcctacttctgcagaggagatcgtgacgcttaaataa

SEQ ID NO: 58017 - protein, 480 aa, Ashbya gossypii
MLRCREVYNICKGAMSNEVKHYDYLVIGGGSGGVASSRRAASYGAKTVLIEGKALGGTCVNVGCVPKKVMWYASDLAHRLLHARDYGLLQEVDISKEKLHFNWKEFAGKRNAYVERLNGIYERNLAKEGVEYVHGWARFNSEGQVEVTRPDQTTEKYTADHILIATGGEPVLPEGIPGAEYGVDSDGFFRLEEQPKKVVISGSGYIATEFAGVFNGLGTETHIVIRKDHVLTKFDPSIQEIVTEHYEKEGVNIHKKESIQRVEKDPNTGKLTVHLSGKIIEDVDQLVWAIGRKSLLGIAPENVGVKLGETGHVVVDEYQNTSTKGIYALGDVVGNMELTPVAIAAGRKLANRLFGPEQMRAQKQDYDNVPSVVFSHPEAGSIGLTEPQAIERYGKENIKIYQTKFTAMYYAMLEDKSPTKYKLICAGPEEKVVGLHIVGDGSAEILQGFGVAIKMGATKADFDSCVAIHPTSAEEIVTLK

SEQ ID NO: 58018 - DNA, 1413 bp, Yarrowia lipolytica
  CDS (1)..(1413)
atggcttctatcccccattatgactatctggttatcggcggaggctctggaggtgttgcttctgctcgtcgagccgcctcgtacggcgccaaaacactgctgatcgagggcaaggcgctgggaggcacctgcgtcaacgtgggctgtgtgcccaaaaaggtcatgtggaacgcgtccgatctggcgggccgaatccgacaggccaaggagtacggcttccccgacgtggaccccaagtacgccgacaactttgactggtccggattcaaggccaagcgagacgcttacgtcaagcgactcaatggaatctacgaacgaaacctccagaaggagggcgtcgagtacgtgtttggctgggccaccctctacaagcaggagggccaggagttccccctggtacatgtcaagagcgacgacggcaataccaagctgtattctgccaagaagattatgattgccaccggcggaaagccccgtctgcccgacgtgcctggagccgagtacggcattgactccgacggcttctttgctctcgagacccagcccaagcgagtggcggtggttggaggaggctacattggcgtggagctggctggtgtcttccacggactcaactccgagaccaccctcttctgccgaggccagacggtgctccgagcgttcgacatcatgatccaggacaccatcaccgactactacgtcaaggagggcatcaacgtgctcaagggctccggcgtcaagaagattgtcaagaaggacaatggcgagctgctcgtcacctacgagcaggatggcgccgagaaggatatcactcttgactcacttatttggaccattggacgagagcctctcaaggacaccctcaacctcggcgagtttggcatcaagaccaacaagcggggctacattgaggtcgacgagtaccagcgatcgtccgttgacaacatttactcgcttggagacgtttgcggcaaggtcgagctaacccccatggctattgctgccggacgaaagctgtccaaccggctgtttggtcccacagagttcaagaaccagaagcaggactacaccgatgttccttctgccgtcttttcccaccccgaggttggctccatcggtatcaccgaggctgccgccaaggagcagtatggcgaggagaacgtcaaggtctacacctccaagtttgtcgccatgtactacgccatgctcgaggagaaggctcccaccgcctacaagctggtgtgtgccggcaaggacgagaaggttgttggtctgcacattgttggcgctgactctgccgagattctgcagggtttcggcgtggccattcgaatgggagccaccaaggccgatttcgacaatgttgtggctatccatcccacttctgccgaggagctggtgaccatgagatag

SEQ ID NO: 58019 - protein, 470 aa, Yarrowia lipolytica
MASIPHYDYLVIGGGSGGVASARRAASYGAKTLLIEGKALGGTCVNVGCVPKKVMWNASDLAGRIRQAKEYGFPDVDPKYADNFDWSGFKAKRDAYVKRLNGIYERNLQKEGVEYVFGWATLYKQEGQEFPLVHVKSDDGNTKLYSAKKIMIATGGKPRLPDVPGAEYGIDSDGFFALETQPKRVAVVGGGYIGVELAGVFHGLNSETTLFCRGQTVLRAFDIMIQDTITDYYVKEGINVLKGSGVKKIVKKDNGELLVTYEQDGAEKDITLDSLIWTIGREPLKDTLNLGEFGIKTNKRGYIEVDEYQRSSVDNIYSLGDVCGKVELTPMAIAAGRKLSNRLFGPTEFKNQKQDYTDVPSAVFSHPEVGSIGITEAAAKEQYGEENVKVYTSKFVAMYYAMLEEKAPTAYKLVCAGKDEKVVGLHIVGADSAEILQGFGVAIRMGATKADFDNVVAIHPTSAEELVTMR

SEQ ID NO: 58020 - DNA, 1674 bp, Oryza sativa
  CDS (1)..(1674)
atgtactccacggctatctcgctctccgccgccgccaccgccgccgcggcggtcggcggcgcccggccaggcgcgatccggccggcggagctccgcttctgcggcctccgccgcgaggccctcgggctccgctcgctgcgggccccgccgcgagcggccgccacgccgcggaaggcggcggcggctactgggaatggtgcggccgggagcggcgggttcgactacgacctcgtgatcattggggcgggcgtcggcgggcacggcgcagctctccacgccgtcgagaagggtctgaaaactgccataattgagggggatgttgtaggtgggacttgtgtgaacagaggttgtgttccgtcgaaggcacttcttgctgtcagcggtcggatgagggaacttcaagatgaacaccacatgaaatcgttgggtctacaggtttcaacagctggatatgataggcaggctgttgcagatcatgcaaataatctggcctctaaaattcgtagcaacttgactaattcgatgaaagctttgggtgtggatatattgactggttttggcaccattgtgggaaaacaaaaagtgagatatggaaaagttggttttcctgacaatgaaatcactgccagaaatatcattattgcaacggggtctgttccttttgtccccaatggcatcgaaatagatggtaaaaccgtatttactagtgatcatgcactaaaacttgagtcagttcctgactggattgctatcgtgggaagcggttacattggactggaattcagtgatgtatacacggctctgggaagtgaggttacttttgttgaagcacttgatcagttgatgcctggttttgatcctgagattgcaaaattggcccaaaggattcttatcaatcctcgtaaaattgactatcatactggggtctttgcgagcaagattaccccagcaaaggatggtaaacccgtgttgattgagttaattgatgctaagacaaaggaacacaaggaaacacttgaggtggatgcagctctcatagctaccggaagggcaccgttcaccaaagggcttggcttggaaaatgtcaacgttgttacacaacgcggttttgttcctgttgatgagcggatgcaagttatggacgcagatggcaatgcggttccaaatttgtattgtattggagatgccaatggcaaactcatgctggctcatgctgccagtgcacaaggaatctcagttgttgagcgaatctctgggaaagacaacatcctaaatcatctaagcatcccggctgcctgtttcactcatccggagattagtatggttgggctaacagagccacaagcgagagaaaaggctgataaggaaggatttgagataagtgttgttaagaccagcttcaaggcaaacacgaaggctctggctgagaatgaaggagatggacttgctaagatgatttaccggcctgacactggagaaattcttggagttcacatattaggtttgcatgctgctgacctcatccacgaggcatcaaacgccattgccctcggaactcgtgtacaagtaagtgacgagcattttattgtttatgaatggattgcatttgctcaacgctgtttacatcccccaggacatcaagtttgctgttcatgcacacccaactttgtctga

SEQ ID NO: 58021 - protein, 557 aa, Oryza sativa
MYSTAISLSAAATAAAAVGGARPGAIRPAELRFCGLRREALGLRSLRAPPRAAATPRKAAAATGNGAAGSGGFDYDLVIIGAGVGGHGAALHAVEKGLKTAIIEGDVVGGTCVNRGCVPSKALLAVSGRMRELQDEHHMKSLGLQVSTAGYDRQAVADHANNLASKIRSNLTNSMKALGVDILTGFGTIVGKQKVRYGKVGFPDNEITARNIIIATGSVPFVPNGIEIDGKTVFTSDHALKLESVPDWIAIVGSGYIGLEFSDVYTALGSEVTFVEALDQLMPGFDPEIAKLAQRILINPRKIDYHTGVFASKITPAKDGKPVLIELIDAKTKEHKETLEVDAALIATGRAPFTKGLGLENVNVVTQRGFVPVDERMQVMDADGNAVPNLYCIGDANGKLMLAHAASAQGISVVERISGKDNILNHLSIPAACFTHPEISMVGLTEPQAREKADKEGFEISVVKTSFKANTKALAENEGDGLAKMIYRPDTGEILGVHILGLHAADLIHEASNAIALGTRVQVSDEHFIVYEWIAFAQRCLHPPGHQVCCSCTPNFV

SEQ ID NO: 58022 - DNA, 1491 bp, Oryza sativa
  CDS (1)..(1491)
atggctaggaagatgctcaaggacgaggaggtggaggtggccgtcaccgacggcgggagctacgactacgacctgttcgtgatcggcgccgggagcggcggcgtccggggctctcgcacctccgcgtccttcggggctaaggttgcgatttgcgagctcccgttccatcccatcagctcggattggcaaggagggcatggtgggacgtgtgtgatacgtggttgtgtgcctaaaaagatactggtgtatggttcatctttccgcggagaatttgaggatgcaaagaattttgggtgggaaatcaatggggacattaacttcaactggaaaaggctgctggaaaataagactcaagaaattgttagactaaatggagtataccagaggattcttggcaattctggtgtgacaatgattgaaggggcaggcagtttggttgatgctcatacagttgaagtcacaaagccagatggttcaaagcaaagatatacagcaaagcacatattgatagcaactggtagccgagctcaacgtgtcaacattcctgggaaggagttagctattacttcagatgaggccttaagtttggaggagctaccaaaacgtgctgtaatccttggtggcggatatattgctgttgaatttgcttctatatggaaagggatgggtgcgcacgtagacttgttttatcgaaaagagcttcctctaagaggtttcgatgatgagatgaggacggttgttgcaagtaaccttgagggaaggggaatcagattacatccagggacaaatctatctgagttgagtaaaacagccgatggcataaaagttgtcactgacaaaggagaggagatcattgcagatgttgttctgtttgctacaggtcgcacaccaaactcccagaggttgaacttggaagctgctggtgttgaagttgataatattggagctataaaggttgatgattattctcgtacatcagtcccaaatatatgggctgtgggtgatgtaacgaaccggataaatttaacacctgttgcactgatggaggctacctgcttttctaaaactgtgtttggtggccagccaactaaacctgattacagagatgtaccttgtgctgttttctccatcccaccactatcagtagtgggcttgagtgaacagcaggctttggaggaagccaagagcgatgttcttgtttacacttccagcttcaacccaatgaagaacagcatatccaaacggcaggagaagaccgtcatgaaactggtggttgattcagagactgataaagtacttggtgcatcaatgtgtggaccagatgcaccagagattatccagggtatggctgtagcgctgaagtgtggagccaccaaggcgacctttgacagcactgttggtattcacccgtctgctgctgaagagtttgtgacaatgcggaccttgaccaggcgcgtgagcccatcatccaagccaaagacaaacttgtag

SEQ ID NO: 58023 - protein, 496 aa, Oryza sativa
MARKMLKDEEVEVAVTDGGSYDYDLFVIGAGSGGVRGSRTSASFGAKVAICELPFHPISSDWQGGHGGTCVIRGCVPKKILVYGSSFRGEFEDAKNFGWEINGDINFNWKRLLENKTQEIVRLNGVYQRILGNSGVTMIEGAGSLVDAHTVEVTKPDGSKQRYTAKHILIATGSRAQRVNIPGKELAITSDEALSLEELPKRAVILGGGYIAVEFASIWKGMGAHVDLFYRKELPLRGFDDEMRTVVASNLEGRGIRLHPGTNLSELSKTADGIKVVTDKGEEIIADVVLFATGRTPNSQRLNLEAAGVEVDNIGAIKVDDYSRTSVPNIWAVGDVTNRINLTPVALMEATCFSKTVFGGQPTKPDYRDVPCAVFSIPPLSVVGLSEQQALEEAKSDVLVYTSSFNPMKNSISKRQEKTVMKLVVDSETDKVLGASMCGPDAPEIIQGMAVALKCGATKATFDSTVGIHPSAAEEFVTMRTLTRRVSPSSKPKTNL

SEQ ID NO: 58024 - DNA, 1668 bp, Oryza sativa
  CDS (1)..(1668)
atggcgacgaccgcgaccctccccttctcctgctcctccaccctccaaaccctaacccgcaccatccccctccgcctccgcctccaccgccgccgcttcctccaccacctcccctccctcgctgccctcccgaggctcccgctcccgcgacctcccctcctcccccacgcgcgccgccacgtctcggcgtccgcggcgcccaacggcgcgtcctccgagggggagtacgactacgacctcttcaccatcggcgccgggagcggcggggtccgggcctcgcgcttcgcctccacgctctacggcgcccgcgccgccgtctgcgagatgcccttcgccaccgtcgcctcggacgacctcggtggagtcggcggcacatgtgtgcttcgtgggtgtgttccaaagaaattattagtgtatggatccaagtactctcatgagtttgaagagtctcatggctttgggtgggtgtatgaaactgatccaaagcatgactggaacactctgattgccaacaaaaatacagagctgcagcgccttgttggcatttacaagaatattttaaacaactcaggagttactctaattgaaggccgtggaaagatagttgatccacatactgtaagtgtagatggaaagctctacactgctaggaacatacttatagctgttggtgggcgaccatcgatgccaaatatcccaggaatagagcatgttatagattctgatgctgcactggatctaccttcaaaacctgagaaaattgcaatagtgggaggtggatatattgctctggagtttgctggaattttcaatggcttaaaaagtgaggtacatgtgtttattcggcagaagaaagttttaagagggtttgatgaagaggtcagagatttcatcgctgaacagatgtctctaaggggcatcacatttcatactgaacagagtcctcaagctataaccaaatcaaatgatggtttgctatctctgaagacaaacaaagaaactattggtgggttctcacatgttatgttcgcaacaggtcgtaaaccaaacacaaagaaccttggactagaggaggttggggtgaaattggacaagaacggagcaataatggttgatgagtattctcgaacctcagttgattcaatttgggcagtgggagatgttactgatagggtcaacctgacaccagttgcacttatggaaggtggtgcatttgcaaaaacagtgtttggtgatgaacctaccaaaccagattacagagctgtaccatctgccgttttctcccaaccacccatcggacaagttggtcttactgaagagcaggctattgaggagtatggagatgttgatatctatacagcaaacttcaggccacttagggcaactctctctggattacctgatcgcattttcatgaaactcattgtgtgtgctacaacaaacaaagttgtaggagtacacatgtgtggtgaagacgcacctgagataattcagggagttgcaattgctgttaaagctgggctgacaaagcaagattttgatgccactattggcattcacccaacatctgcagaggaatttgtcacaatgagaaatgcaactagaaaagttcggagaagcacaacagatgaggtagaatctaaagataaggttgttactcagaactag

SEQ ID NO: 58025 - protein, 555 aa, Oryza sativa
MATTATLPFSCSSTLQTLTRTIPLRLRLHRRRFLHHLPSLAALPRLPLPRPPLLPHARRHVSASAAPNGASSEGEYDYDLFTIGAGSGGVRASRFASTLYGARAAVCEMPFATVASDDLGGVGGTCVLRGCVPKKLLVYGSKYSHEFEESHGFGWVYETDPKHDWNTLIANKNTELQRLVGIYKNILNNSGVTLIEGRGKIVDPHTVSVDGKLYTARNILIAVGGRPSMPNIPGIEHVIDSDAALDLPSKPEKIAIVGGGYIALEFAGIFNGLKSEVHVFIRQKKVLRGFDEEVRDFIAEQMSLRGITFHTEQSPQAITKSNDGLLSLKTNKETIGGFSHVMFATGRKPNTKNLGLEEVGVKLDKNGAIMVDEYSRTSVDSIWAVGDVTDRVNLTPVALMEGGAFAKTVFGDEPTKPDYRAVPSAVFSQPPIGQVGLTEEQAIEEYGDVDIYTANFRPLRATLSGLPDRIFMKLIVCATTNKVVGVHMCGEDAPEIIQGVAIAVKAGLTKQDFDATIGIHPTSAEEFVTMRNATRKVRRSTTDEVESKDKVVTQN

SEQ ID NO: 58026 - DNA, 1704 bp, Oryza sativa
  CDS (1)..(1704)
atgaactccgcggcggcggcggcggcgtgcgcctcggccccggcgtgggtggtcggcggcggcgccggcgggggagccagatccgcgcgggggccatgcgggatcagggtgtgcgggctcgggggcgaggcggtggcgctccgctcgctgcggatctcgcagggggcggcggtgaggcgggcggcggtggcggcgagggcggccgcggagaacggcgtggcggggagcggcgggttcgactacgacctcgtcatcatcggcgccggcgttggtgggcacggcgcggcgctccacgctgtcgaggagggtttgaaaactgcaattattgagggagatgttgtaggtgggacttgtgtaaacagaggttgtgtcccatcaaaagcacttcttgctgtcagcggtcgcatgagggagcttcatgatgaacatcacatgaagtcattgggtctacaggtttcatcccctggatatgacagacaagctgttgctgatcatgcaaacaatctcgcctctaaaatccgaagcaacttgactaattcaatgaaagctctgggagtggatatattgagtggttttggtgcaattgttggaaaacaaaaggtacggtatggaaaagttggttttccagacaaagaaatcactgcaaggaatatcatcattgctactggatcagttccttttgttcccaagggcatagaggttgatgggaaaactgtttttaccagtgatcatgcactaaaacttgagtctgtcccggactggatagcaatcgttggaagtggatacattgggcttgaattcagtgatgtatatacagctcttggaagtgaggttacttttgttgaagctcttgaccagctaatgcctggttttgatcctgaaattgcaaaattagcccagagagtccttatcaaccctcggaatatagactatcacactggtgtttttgcaagcaagattactccagcaaaggatggaaaacctgtgcagattgagctcattgatgcaaaaacaaaggaacacaaagaaaccctcgaggtggatgcagcccttatagccacaggacgggcaccattcacaaaaggacttggcttggaaaatatcaatgttgttacacagcgtggttttattcctgttgatgagcgaatgcgagtcatggatgcagatggcaatgtggttccgaacttatattgcattggagatgccaatggtaaactcatgcttgctcatgctgccagtgcacagggaatctctgttgtcgaacaaatctctgggagggaccacatcctaaatcatttaagcatccccgctgcttgcttcactcatccagagattagtatggttgggcttacagagccacaagccagagaaaaagctgataaagaaggatttgagataagtgttgttaagaccagctttaaggctaatacaaaagcattggcagaaaatgaaggagatggacttgctaagttgatttaccggcctgacactggagaaattcttggtgtgcacattttgggtttgcacgctgctgacctcatccacgaggcatcaaatgccattgccctaggaactcggttgcaagacatcaagtttgctgttcatgcacacccaacattgtccgaggtgctggacgaactctttaaagcagccaaggttaattcgggtgtttctcattctgtaaatgaaccagttgcagcctag

SEQ ID NO: 58027 - protein, 567 aa, Oryza sativa
MNSAAAAAACASAPAWVVGGGAGGGARSARGPCGIRVCGLGGEAVALRSLRISQGAAVRRAAVAARAAAENGVAGSGGFDYDLVIIGAGVGGHGAALHAVEEGLKTAIIEGDVVGGTCVNRGCVPSKALLAVSGRMRELHDEHHMKSLGLQVSSPGYDRQAVADHANNLASKIRSNLTNSMKALGVDILSGFGAIVGKQKVRYGKVGFPDKEITARNIIIATGSVPFVPKGIEVDGKTVFTSDHALKLESVPDWIAIVGSGYIGLEFSDVYTALGSEVTFVEALDQLMPGFDPEIAKLAQRVLINPRNIDYHTGVFASKITPAKDGKPVQIELIDAKTKEHKETLEVDAALIATGRAPFTKGLGLENINVVTQRGFIPVDERMRVMDADGNVVPNLYCIGDANGKLMLAHAASAQGISVVEQISGRDHILNHLSIPAACFTHPEISMVGLTEPQAREKADKEGFEISVVKTSFKANTKALAENEGDGLAKLIYRPDTGEILGVHILGLHAADLIHEASNAIALGTRLQDIKFAVHAHPTLSEVLDELFKAAKVNSGVSHSVNEPVAA

SEQ ID NO: 58028 - DNA, 1506 bp, Glycine max
  CDS (1)..(1506)
atggctaggaagatgcttatcgatggtgaagctgaattggctcaaggtggtggagaagaagtgtcgaattttgacttcgacttgtttattattggggctggaagtggtggcgttcgtgccgctagattttcatccaattttggagctaaggtggggatttgtgagcttccatttcatccaattagttcagaaacaattggaggagtcggtggaacgtgtgttattcgtggttgtgttcccaaaaagattttggtctatggagcatcttttggaggtgatcttgaggatgccaggaattatgggtgggagttgagtgagaaagttgacttcaattggaagaagctcttgcaaaagaagacagatgaaataaacagattaaatggactttacaagcggatgttatccaattggggggttaaattatttgaaggcgagggaaagatagttggtccaaatgaagttgaggtgacacaattggatggcactaaattgtcctacacagcaaagcacatattgattgcaactggcagcagggctcaacgtccaaatattcctggacaggagttgggtataacatcagacgaggcactaagtttagaggatcttccaaaacatgctgtggttcttggaggaggtcatattgcagttgagtttgcatctatatggcgtggcatgggttccacagttgatctagttttcagaaaggaacttccactgagaggttttgatgatgaaatgagagctgcagtggcaagaaatcttgaaggcaggggaattaatttgcatccaaggaccaatttgacacagttgatcaaaacagaggacggcattaaagttattacagatcatggtgaagagctgattgcggatgctgtactgtttgccactggtagggctcctaattctaagaggctgaatttagaaactgtaggtgttgagcttgacaacactggagcaataaaggtggatgagtattcccgcacaagcatacctagcatatgggctgtgggtgatgtcacaaaccgaatgaatctaactccggtggccttgatggaagcatcgtactttgctaaaactgtatttggtgggcaaacaatcaagccagactacagtaatattccctatgcagtgttcagcattccaccactttctgtagttggtctcagtgaggagcaggcaatagagcaaaccaatggggatctgttggtttttacatcaaccttcaatcctatgaaaaataccatctctgggcgacaagaaaaaactgttatgaagcttgttgttgatgctgagacagataaggttctcggagcctcaatgtgtgggcctgatgcacctgaaattatgcagggtattgctgttgcgttgaagtgtggagctaccaaggcacagtttgatagcacggtgggaatacacccatcggctgcagaagaatttgtaaccatgcggtcagtgacaaggcgcgtagctggaactggaagtgtcaaacccaagaccaatttgtaa

SEQ ID NO: 58029 - protein, 501 aa, Glycine max
MARKMLIDGEAELAQGGGEEVSNFDFDLFIIGAGSGGVRAARFSSNFGAKVGICELPFHPISSETIGGVGGTCVIRGCVPKKILVYGASFGGDLEDARNYGWELSEKVDFNWKKLLQKKTDEINRLNGLYKRMLSNWGVKLFEGEGKIVGPNEVEVTQLDGTKLSYTAKHILIATGSRAQRPNIPGQELGITSDEALSLEDLPKHAVVLGGGHIAVEFASIWRGMGSTVDLVFRKELPLRGFDDEMRAAVARNLEGRGINLHPRTNLTQLIKTEDGIKVITDHGEELIADAVLFATGRAPNSKRLNLETVGVELDNTGAIKVDEYSRTSIPSIWAVGDVTNRMNLTPVALMEASYFAKTVFGGQTIKPDYSNIPYAVFSIPPLSVVGLSEEQAIEQTNGDLLVFTSTFNPMKNTISGRQEKTVMKLVVDAETDKVLGASMCGPDAPEIMQGIAVALKCGATKAQFDSTVGIHPSAAEEFVTMRSVTRRVAGTGSVKPKTNL

SEQ ID NO: 58030 - DNA, 1488 bp, Zea mays
  CDS (1)..(1488)
atggcgaggaagatgctcatcgacggggaggtggcggccgtcgcggatggtgggcactatgactacgatctcttcgtcatcggggcgggcagcggcggcgttcgcggctctcgcaccgccgcctccttcggagctaaggttgcgatttgtgagctcccattccaccccatcagctcagagtggctaggaggacatggtgggacttgcgtgatacgtggttgcgtacctaaaaagatactcgtgtatggtgcatcattccgtggagaatttgaggattcgaagaattttgggtgggagattaacggagatattaacttcaattggaaaacgatattggaaaataagactaaagaaattgttagattaaatggtgtgtatcagaggatccttaccagtgccggtgtgacaatgattgaaggggcaggcagtctagttgatgctcatactgttgaagttagccagcccgatggttcaaagcaaaggtataccgcgaagcacattttgatcgcgactggtagccgtgctcaacgtgtcaacatacctggaaaggatctggctattacttctgatgaggccttgagcttggaggagcttccaaagcgcgctgtaatcctgggtggcggatatattgctgttgaatttgcttctatctggagggggatgggtgctgaagtagatttgttttatcgaaaagatcttcctttaagaggttttgatgatgagatgagagctattgttgcaagcaaccttgagggaaggggaatcaagttgcatccagggacaaatctctctgagttgagtaaaacggctgacggaataaaagttgtaactgataaaggagaagagctcattgcagatgttgtcctatttgcgacagggcgcacaccaaactcccagagactgaacttgcaagctgcaggcgttgagattgaccgggttggagccatcaaggttgacgaatattctcgtacttctgctcctagtgtatgggctgtgggtgatgtaacaaaccggattaatttaacacctgttgcattgatggaggcaacttgctttgctaaaactgtgtttggtggccagcaagttaagcctgatcacagagatgttccttgtgctgttttctccattccaccactatctgtagtgggcctcagcgaagaacaggccttggaggaagccaatggtgatattcttgttttcatctcatcattcaacccaatgaagaacagcatatccaagcgccaggagaagactatcatgaaactggtagttgatgctgaaactgacaaagtacttggtgcatccatgtgtggaccagacgcacctgaaattatccagggcatcgctattgcggttaaatgtggagccaccaaagcagacttcgacagcactgtcggaatccacccttccgctgctgaagagttcgtgaccatgcgcaccgtgacgaggcgcttgagcccgacatccaagccaaagacgaacttgtaa

SEQ ID NO: 58031 - protein, 495 aa, Zea mays
MARKMLIDGEVAAVADGGHYDYDLFVIGAGSGGVRGSRTAASFGAKVAICELPFHPISSEWLGGHGGTCVIRGCVPKKILVYGASFRGEFEDSKNFGWEINGDINFNWKTILENKTKEIVRLNGVYQRILTSAGVTMIEGAGSLVDAHTVEVSQPDGSKQRYTAKHILIATGSRAQRVNIPGKDLAITSDEALSLEELPKRAVILGGGYIAVEFASIWRGMGAEVDLFYRKDLPLRGFDDEMRAIVASNLEGRGIKLHPGTNLSELSKTADGIKVVTDKGEELIADVVLFATGRTPNSQRLNLQAAGVEIDRVGAIKVDEYSRTSAPSVWAVGDVTNRINLTPVALMEATCFAKTVFGGQQVKPDHRDVPCAVFSIPPLSVVGLSEEQALEEANGDILVFISSFNPMKNSISKRQEKTIMKLVVDAETDKVLGASMCGPDAPEIIQGIAIAVKCGATKADFDSTVGIHPSAAEEFVTMRTVTRRLSPTSKPKTNL

SEQ ID NO: 58032 - DNA, 1524 bp, Brassica napus
  CDS (1)..(1524)
atggcgatggcgaatttagcaagaaggaaggcttattttctcaccagaaacgtaactagctctcacactgacgctcttaaattctccttttccctctcccgtggcttcgcgtcatcgggatctgatgagaacgacgtggtcgtcatcggcggcggtcccggcggttacgtggcggcgatcaaggcggctcagcttggtctcaaaaccacgtgtatcgagaagcgcggcgcgctcggtggcacttgtctcaacgtcgggtgtattccctcgaaggcacttcttcactcttcacatatgtaccatgaggcgaaacacgcttttgctcaccatggtatcaagttggcttctgttgaggttgatcttcctgctatgttggctcagaaagataatgccgtcaagaacctcactcgtggcattgagggtttgttcaagaagaacaaagtcacctatgtcaaggggtatggtaagtttctttcccccaatgaagtctctgtggagactatcgatggaggaaacaccgttgtgaagggcaaacacatcattgttgctaccggctctgacgtgaaatctctgcctggtattacaatcgatgagaagaagattgtttcctcgactggagccttgtctttgtctgaagtcccgaagaaactgattgtgattggtgctggttatattgggctggagatgggttctgtttggggaaggcttggatcagaggtcacggtggttgagtttgctgccgatatcgttccttctatggatggtgaaatccgtaagcagtttcagcgttctcttgagaagcaaaagatgaagttcatgctcaagactaaagttgtatccgtggacgcctctggagacggtgtgaagctcacagtggaaccatctgaaggtggagaccagaccacactcgaagccgatgttgtccttgtctcagcggggagaacacccttcacatctggacttgacctggagaaaatcggagtggaaaccgacaaaggtgggagaattctggtgaacgagaggttcttgaccaatgtctcaggcgtgtatgcgattggagatgtgattccaggaccaatgcttgctcacaaagctgaagaagacggtgttgcttgtgtggagttcatagcaggcaaacacggccatgtggattacgacaaggttcctggtgttgtctacactcatcccgaggtggcttcggtcggtaaaaccgaagaacagttgaagaaagacggtgtgagctaccgtgttgggaagttcccgtttatggccaatagtagagctaaggccatagataatgccgaaggattggtcaagattttggctgataaagagacggacaagatcttgggagttcacattatgtcaccaaacgcgggagagctgatccacgaggcggttctggcgattaactacgatgcggcgagtgaagacattgctagagtctgtcacgctcatccccccatgagtgaggctatcaaggaagctgctatggctacctacgacaagcctattcacatgtag

SEQ ID NO: 58033 - protein, 507 aa, Brassica napus
MAMANLARRKAYFLTRNVTSSHTDALKFSFSLSRGFASSGSDENDVVVIGGGPGGYVAAIKAAQLGLKTTCIEKRGALGGTCLNVGCIPSKALLHSSHMYHEAKHAFAHHGIKLASVEVDLPAMLAQKDNAVKNLTRGIEGLFKKNKVTYVKGYGKFLSPNEVSVETIDGGNTVVKGKHIIVATGSDVKSLPGITIDEKKIVSSTGALSLSEVPKKLIVIGAGYIGLEMGSVWGRLGSEVTVVEFAADIVPSMDGEIRKQFQRSLEKQKMKFMLKTKVVSVDASGDGVKLTVEPSEGGDQTTLEADVVLVSAGRTPFTSGLDLEKIGVETDKGGRILVNERFLTNVSGVYAIGDVIPGPMLAHKAEEDGVACVEFIAGKHGHVDYDKVPGVVYTHPEVASVGKTEEQLKKDGVSYRVGKFPFMANSRAKAIDNAEGLVKILADKETDKILGVHIMSPNAGELIHEAVLAINYDAASEDIARVCHAHPPMSEAIKEAAMATYDKPIHM

SEQ ID NO: 58034 - DNA, 1503 bp, Glycine max
  CDS (1)..(1503)
atggcgatggcaaacttggctcgacggaagggttacgccgtcgttttgtcgtcgaggtcgtcgctttgtctgacaaggtggagggggttcgcgtccggatctgacgaaaacgacgtcgtggtcatcggcggcggtcccggcggctacgtggcggccattaaagcggcgcagctgggtctgaaaaccacttgcatcgaaaaacgtggcactctcggcggtacctgcctcaacgtcggatgcatcccttccaaggcacttttgcattcttcccacatgtatcatgaggctaaacatgcatttgccaaccatggggtcaagttttcatctgtcgaggttgatttgccagccatgatggcccaaaaagataaagcagtttctaatcttaccaagggtattgaaggtctattcaagaaaaacaaggtaaactatgtcaaaggttatggcaaattagtttcaccatctgaagtctctgtggacaccactgaaggtggaaatactgttgtgaaaggcaagcatattataattgccactggctcggatgtgaaatcactgcctggcgtcactattgatgaaaagaaagtcgtttcatcaacgggggctcttgctttgactgaaatccccaagagactcgtagtcattggggcaggctacattgggctggaaatgggctccgtatggggccgtcttggcaccgagataacagttgttgaatttgcatcggagattgttccaaccatggatgcagaggtccggaagcagtttcagcgttctcttgagaagcaaggcatgaaattcaagctgaagacaaaggtggttggagttgatacttctggggatggtgtgaagctaactcttgaaccagctgctggtggtgatcaaactacacttgaagcagatgttgtcctggtatctgctggtaggactccattcactgctggacttggattggacaagataggagttgaaactgacaagattggacggattttggtaaatgaaagatttgccacaaatgtctctggtgtttatgcaattggagatgtaattccaggcccaatgttggcacacaaggcagaagaagacggtgttgcttgtgttgagtacatagctggtaaggtgggccatgtggattatgacaaagtccccggtgttgtctatacaatgcccgaggttgcatctgttgggaagacagaggagcaggtgaaggaacttggagttgaataccgtgttggcaagttcccgttcatggctaatagcagagctaaggcaattgacaatgctgaaggactggtgaagatattggctgaaaaggagacagacaagatattgggagtgcacattatggcgcccaatgcaggagagcttattcatgaagctgcaatagcactacagtatgatgcatctagtgaggacattgcacgtgtgtgccatgcacatccaacaatgagcgaggctgtgaaagaagccgcaatggccacttatgacaagcccattcacatctaa

SEQ ID NO: 58035 - protein, 500 aa, Glycine max
MAMANLARRKGYAVVLSSRSSLCLTRWRGFASGSDENDVVVIGGGPGGYVAAIKAAQLGLKTTCIEKRGTLGGTCLNVGCIPSKALLHSSHMYHEAKHAFANHGVKFSSVEVDLPAMMAQKDKAVSNLTKGIEGLFKKNKVNYVKGYGKLVSPSEVSVDTTEGGNTVVKGKHIIIATGSDVKSLPGVTIDEKKVVSSTGALALTEIPKRLVVIGAGYIGLEMGSVWGRLGTEITVVEFASEIVPTMDAEVRKQFQRSLEKQGMKFKLKTKVVGVDTSGDGVKLTLEPAAGGDQTTLEADVVLVSAGRTPFTAGLGLDKIGVETDKIGRILVNERFATNVSGVYAIGDVIPGPMLAHKAEEDGVACVEYIAGKVGHVDYDKVPGVVYTMPEVASVGKTEEQVKELGVEYRVGKFPFMANSRAKAIDNAEGLVKILAEKETDKILGVHIMAPNAGELIHEAAIALQYDASSEDIARVCHAHPTMSEAVKEAAMATYDKPIHI

SEQ ID NO: 58036 - DNA, 1638 bp, Glycine max
  CDS (1)..(1638)
atggcgacgtcgctctctgtttcgccatctctctctctcaacactctcttcatcgccaaagcgcttccactatctcgcccctcctttctctctctccctctccccaaatccctactctctctctccacgcgccgccgcaccttcatcgtccgcgccgaatcccaaaacggcgccgaccccgttcccgcccactacgacttcgacctcttcaccatcggcgcaggcagcggcggggtccgagccgctcgcttcgccgccaactacggcgcttctgtcgccatctgcgagcttcctttctccactatctcctccgaaaccaccggaggtgtcggcggaacctgtgtaatacgaggatgtgtgccgaagaagttgctggtttatgcatctaaattttctcatgaatttgaagaaagtaatggtttcggatggagatatgacagtgagcccaagcatgattggagtagtttcatagctaataaaaatgctgagttgcagcgtcttactggcatctacaagaatattttgaacaatgctggggtcaagctgattgaaggccatggaaagattatagatcctcacacggttgatgttaatgggaagctatattcagccaaacacattttagttgcagttggaggtcgccccttcattcctgatatccctgggaaggaatatgcaatagattcagatgctgcccttgatttaccaacaaaacctgtgaaaatagccattgttggtggtggttacattgccttggagtttgctggtatctttaatggtttgaaaagtgaggttcatgtatttatacggcaaaagaaggttttgcggggatttgatgaagagattagagattttgttgaagaacaaatgtctgtaagaggtattgaattccataccgaggagtctcctcaagctatcacgaagtcagcggatggctcattctctttaaagaccaacaaaggtacagtggacggtttctcacatattatgtttgctacaggacgcagacctaatactcagaacttaggcctggagtctgttggtgtgaaactagctaaagatggagctatagaggttgatgaatactctcaaacatcagtttcttcaatttgggcagttggagatgttacaaacaggataaatctcaccccagttgctttgatggagggaggagcattagtaaaaacgctgtttcaggataacccaacaaaacctgattatagagctgttccttctgctgtattttctcaaccaccaattggacaagttggtcttactgaggaacaggctgtacaacaatatggagatattgacatcttcactgcaaattttaggccgctgaaagctactctctctgggcttccagaccgggtttttatgaaattagtagtctgtgcaaaaacaaatgaagttctaggtttgcatatgtgtggagaagatgctcctgaaattgtgcaggggtttgcagttgctcttaaagctcgcttgaccaaggctgactttgatgccactgtaggcattcacccaagtgcagctgaggaatttgttaccatgaggacacctactaggaagatacgaaagagtgaatcgtctgagggtaagtcgggctctcaagcaaaagctgcagcaggggtttaa

SEQ ID NO: 58037 - protein, 545 aa, Glycine max
MATSLSVSPSLSLNTLFIAKALPLSRPSFLSLPLPKSLLSLSTRRRTFIVRAESQNGADPVPAHYDFDLFTIGAGSGGVRAARFAANYGASVAICELPFSTISSETTGGVGGTCVIRGCVPKKLLVYASKFSHEFEESNGFGWRYDSEPKHDWSSFIANKNAELQRLTGIYKNILNNAGVKLIEGHGKIIDPHTVDVNGKLYSAKHILVAVGGRPFIPDIPGKEYAIDSDAALDLPTKPVKIAIVGGGYIALEFAGIFNGLKSEVHVFIRQKKVLRGFDEEIRDFVEEQMSVRGIEFHTEESPQAITKSADGSFSLKTNKGTVDGFSHIMFATGRRPNTQNLGLESVGVKLAKDGAIEVDEYSQTSVSSIWAVGDVTNRINLTPVALMEGGALVKTLFQDNPTKPDYRAVPSAVFSQPPIGQVGLTEEQAVQQYGDIDIFTANFRPLKATLSGLPDRVFMKLVVCAKTNEVLGLHMCGEDAPEIVQGFAVALKARLTKADFDATVGIHPSAAEEFVTMRTPTRKIRKSESSEGKSGSQAKAAAGV

SEQ ID NO: 58038 - DNA, 1692 bp, Brassica napus
  CDS (1)..(1692)
atgcaatcagctttctctctctccttctcacagtcctctcttactctacccaatcgtccgctcagttcaccgaatgccgcaccgaggaatctccggttctgcggtctccggcgggaggcgtttggtttctctccgccgaagcagttaaactcttgccgtttccaagtcaaaaatagaaggatcgaagtctccgccgctgctggtggcaatggagctccttcgaataagtccttcgattatgatttggtcataatcggagctggagttggtggccacggagctgcattgcacgccgttgagaagggactcaaaactgcaatcattgagggagatgttgttggagggacttgtgttaacagaggatgtgtgccttcgaaagctcttcttgctgttagtggtcggatgagggaacttcagaacgaacatcacatgaagtcctttggtctgcaggtttcagctgcgggttatgaccgtcagggtgtggctgaccatgccagtaacctggctaccaaaattaggaataatctcaccaattctatgaaggcgcttggtgttgacatattgacagggtttggctctgttctggggccacaaaaggttaaatatggaaaggacaatgttattaccgccaaagatataatcattgctaccggatctgtaccttttgtccccaaaggaatagaagttgatggaaagactgttatcacaagtgaccatgcattgaagttggagtctgttcctgactggattgcgatagtaggaagtggttatatcggtcttgagttcagtgatgtttacaccgcccttggcagtgaggtaacatttattgaggcgctggatcagctgatgcctggatttgatcctgagatcagtaagctggctcaaagggttctgataaatccaagaaagattgactatcatactggagtgtttgcaagcaaaatcactccagcaaaagatggaagaccagtgatgattgagctgattgatgctaaaaccaaggaacacaaggatactttggaggtggacgctgctcttattgctacaggaagagctccattcaccaatggtcttggccttgaaaacatcaatgtagcgacacagagaggtttcataccagttgatgagcgaatgcgtgttatcgacggaaacggaaagctggttccaaacctgtactgcatcggtgatgccaatggtaaactgatgctcgctcatgcagccagtgcccaaggaatttctgtggtggagcaagtcacaggtagagatcatgtgctgaatcatcttagcatcccagctgcttgtttcactcatcctgaaatcagcatggtgggattaacagagcctcaagcgagagagaaagctgagaaagaaggatttaaagtaagtattgccaagacaagtttcaaggcaaacacaaaggctctagccgaaaatgaaggagaaggactcgctaagatgatatacagacctgacaatggtgaaatcctaggagttcatatcttcgggttgcacgcagctgatcttatccatgaagcatccaacgctatcgcattaggaacacgcattcaggacataaaacttgcggttcatgcacatccaactctgtctgaggttgtagacgaactgtttaaagcagctaaggtcgaaagtccagcttcaacaacgccacaaagtgtaaaagctgctgtataa

SEQ ID NO: 58039 - protein, 563 aa, Brassica napus
MQSAFSLSFSQSSLTLPNRPLSSPNAAPRNLRFCGLRREAFGFSPPKQLNSCRFQVKNRRIEVSAAAGGNGAPSNKSFDYDLVIIGAGVGGHGAALHAVEKGLKTAIIEGDVVGGTCVNRGCVPSKALLAVSGRMRELQNEHHMKSFGLQVSAAGYDRQGVADHASNLATKIRNNLTNSMKALGVDILTGFGSVLGPQKVKYGKDNVITAKDIIIATGSVPFVPKGIEVDGKTVITSDHALKLESVPDWIAIVGSGYIGLEFSDVYTALGSEVTFIEALDQLMPGFDPEISKLAQRVLINPRKIDYHTGVFASKITPAKDGRPVMIELIDAKTKEHKDTLEVDAALIATGRAPFTNGLGLENINVATQRGFIPVDERMRVIDGNGKLVPNLYCIGDANGKLMLAHAASAQGISVVEQVTGRDHVLNHLSIPAACFTHPEISMVGLTEPQAREKAEKEGFKVSIAKTSFKANTKALAENEGEGLAKMIYRPDNGEILGVHIFGLHAADLIHEASNAIALGTRIQDIKLAVHAHPTLSEVVDELFKAAKVESPASTTPQSVKAAV

SEQ ID NO: 58040 - DNA, 1689 bp, Zea mays
  CDS (1)..(1689)
atgcacctcacggtcatgtccctctcggcggcggttgccaacggcgccgctgcctacaggtacgacacgatccagccggttgcgaggctccgcttctgcggcctcaggcgcaaggcccaccggctccactcgccccggtactcgcggcacttggtggccgctaggcggagcgtggtggttgcggcgacggctggcaatggcgcggccgcgagcggcacgttcgactacgacctcgtgatcatcggagctggcgtcggcggccacggcgccgccctccatgcagtcgagaagggtttgaaaactgccataattgagggagacgtcgtgggtggaacttgtgtcaacagaggctgtgttccgtcaaaggctctccttgctgtaagtggtaggatgcgagaacttcaagatgaacatcacatgaaatcactgggcctacaggtctcatcaccaggatatgacaggcaggttgttgctgaccatgcaaataatcttgcatctaaaatccgcagcaacttgactaattcaatgaaagctctgggtgtggatatactcactggtattggcaccattgtggggaagcaaaaagtgagatatgggaaagttggtttcccagacaatgaaatcactgctagaaacatcataattgccactggatctgttccttttgtccccaagggcattgaaatagatggtaaaactgtatttactagtgatcatgcactaaaacttgagtcagtccctgaatggattgctattgttggaagtggttacattggacttgaattcagtgatgtatacacagctctaggaagtgaggttacttttgttgaagctcttgatcaattaatgcctgggtttgatcccgagattgcaaaattggcgcagaggattcttattagtcctcgtaaaattgactatcacactggtgtttttgcaagcaagattaccccagcaaaggatggtaagcctgttttgattgagctgattgatgctaaaacaaaagaacacaaggagacacttgaggtggatgcagcactcatagctactggaagggcacccttcaccaaaggacttggcttggaaaatatcaatgtcgttacacaacaagggtttgttcctgttgatgagcggatgcaagttatggatgcaactggcaatgtggttcctaatttatattgtatcggagatgccaatggtaagctcatgcttgctcatgcagccagcgcacaaggaatctcagttgtggagcaaatcagtgggagggacaacattttaaatcacctaagcatcccagctgcttgtttcactcaccctgagatcagtatggttggcttgacagagccacaggctagggagaaggctgacaaggaaggatttgaaataagtgttgtaaagaccagttttaaggctaacacaaaggccctggcagagaatgaaggagatggacttgctaagatgatttatcgccctgacaccggagaaattcttggagttcatattttgggcttgcatgctgctgatctcatccatgaggcatcaaatgccattgcccttggaacccatgtgcaggacatcaagtttgctgttcatgcacacccaacgttgtctgaagttctggatgaactcttcaaggctgccaaggttaacacagctggttcgcattctatgaatgagccagttgcggtgtag

SEQ ID NO: 58041 - protein, 562 aa, Zea mays
MHLTVMSLSAAVANGAAAYRYDTIQPVARLRFCGLRRKAHRLHSPRYSRHLVAARRSVVVAATAGNGAAASGTFDYDLVIIGAGVGGHGAALHAVEKGLKTAIIEGDVVGGTCVNRGCVPSKALLAVSGRMRELQDEHHMKSLGLQVSSPGYDRQVVADHANNLASKIRSNLTNSMKALGVDILTGIGTIVGKQKVRYGKVGFPDNEITARNIIIATGSVPFVPKGIEIDGKTVFTSDHALKLESVPEWIAIVGSGYIGLEFSDVYTALGSEVTFVEALDQLMPGFDPEIAKLAQRILISPRKIDYHTGVFASKITPAKDGKPVLIELIDAKTKEHKETLEVDAALIATGRAPFTKGLGLENINVVTQQGFVPVDERMQVMDATGNVVPNLYCIGDANGKLMLAHAASAQGISVVEQISGRDNILNHLSIPAACFTHPEISMVGLTEPQAREKADKEGFEISVVKTSFKANTKALAENEGDGLAKMIYRPDTGEILGVHILGLHAADLIHEASNAIALGTHVQDIKFAVHAHPTLSEVLDELFKAAKVNTAGSHSMNEPVAV

SEQ ID NO: 58042 - DNA, 1512 bp, Zea mays
  CDS (1)..(1512)
atgatgctggcgatcctagcgaggcggcgtgccgcggaggccgtgctgcggcggccgcaggcggcggcgggggcggccgtgtccgcctggagggcgtacgcggcggcgggcgaggagagcgatgtggtggtggtgggtggcgggcccggagggtacgtggcggcgatcaaggccgcgcagctggggctcaagaccacctgcatcgagaagaggggcaccctcggcgggacctgtctcaacgtcggatgcattccatccaaggctcttctgcattcatcacatatgtaccatgaagcaaagagttcttttgcacatcatggagttaagttttcaaatctggaagtggacctcccagccatgatggctcagaaagacaaagctgtggcaggactaacaaaaggaattgaagggctctttaaaaagaacaaggtgacttatgttaaaggctttggaaaattgtcatccccctcagaagtgtcagttgacttgattgatggtggtagcactgttgtcaaaggcaaaaacataataattgcaactgggtctgatgtaaaatcacttccaggaataacaattgatgagaagaaagttgtttcatctactggtgcactgtgcttgtcagagatcccgaaaaaactggtggtaatcggagcaggttatattggccttgagatgggttcagtctggaaccgccttggttcagaggtcactgttgttgaatttgccccggatatagtaccatcaatggatggcgaggtcaggaagcagttccaacgcatgctagaaaaacagaaattcaagttcatgctcaagacaaaggttgttgggtgtgataccagtggagatggcgtaaagctgacactggagcctgcagctggtggtgagcagaccatccttgaagcagatgttgttcttgtctctgctggcagaagcccatttacttctgggattgggcttgaaactcttggtgttgagacagacaaggctggcaggatccttgttgataagcgcttcatgaccaatgtgaagggagtctatgcaattggggatgcgatccctggtcccatgcttgcccataaagctgaagaggatggtgtcgcttgcgtagagttcattgctggaaaggaaggccatgttgactatgacacagttcctggtgtggtttatacgcatccagaagttgcatctgttggcaagactgaggagcaggtgacggctctaggaattccctatcgtgtgggcaagtttccacttttggctaacagtcgtgcgaaggccattgatgatgctgaaggggtagttaaggtgatcgcggagaaggaaaccgataagattctaggtgtgcacataatggcacccaatgctggtgaaatcatccatgaagctgtcatcgccttgcagtatggagcatccagtgaggatgttgctcgaacatgccacgcacaccctaccgtgagcgaggccctcaaggaggcttgcttgcaaaccttcgataaagcaatccacatataa

SEQ ID NO: 58043 - protein, 503 aa, Zea mays
MMLAILARRRAAEAVLRRPQAAAGAAVSAWRAYAAAGEESDVVVVGGGPGGYVAAIKAAQLGLKTTCIEKRGTLGGTCLNVGCIPSKALLHSSHMYHEAKSSFAHHGVKFSNLEVDLPAMMAQKDKAVAGLTKGIEGLFKKNKVTYVKGFGKLSSPSEVSVDLIDGGSTVVKGKNIIIATGSDVKSLPGITIDEKKVVSSTGALCLSEIPKKLVVIGAGYIGLEMGSVWNRLGSEVTVVEFAPDIVPSMDGEVRKQFQRMLEKQKFKFMLKTKVVGCDTSGDGVKLTLEPAAGGEQTILEADVVLVSAGRSPFTSGIGLETLGVETDKAGRILVDKRFMTNVKGVYAIGDAIPGPMLAHKAEEDGVACVEFIAGKEGHVDYDTVPGVVYTHPEVASVGKTEEQVTALGIPYRVGKFPLLANSRAKAIDDAEGVVKVIAEKETDKILGVHIMAPNAGEIIHEAVIALQYGASSEDVARTCHAHPTVSEALKEACLQTFDKAIHI

SEQ ID NO: 58044 - DNA, 1653 bp, Zea mays
  CDS (1)..(1653)
atggcggcgcacgcgacgctccccttctcctgctcctccacgctgcagaccctgacccgcaccctctcctcgcgcggggcccaccagctccgcgggggcttcctccgcctcccctccctcgcggcgctcccgaggctggcccacccctaccgccgccacgtctcggcgtccgctgcggcggcgcccaatggcgcctccgttgagggggagtacgactacgacctcttcaccatcggcgccgggagcggcggcgtccgcgcgtcgcgcttcgcctccgcgctctacggctcgcgcgtcgccatctgcgagatgcccttcgccacgatcgcctcggacgagctcggtggcctcggcggcacatgcgtgcttcgtggatgtgttccaaagaaattgctagtgtacgcatccaagtactctcacgagtttgaagagtctcgtggatttggatggacatatgagactgatccgaagcatgactggagcactctcatagccaataaaaatacagagctgcagcgcctggttggcatttacaggaatattttaaacaatgcaggagtcactctgatcgaaggtcgtggaaagatagtcgatcctcatactgtcagtgtgaatggtaagctctacactgctaagcacatactagttagtgttggtggccgaccatcgatgccagatatccctggtatagagcatgttatagattcggatgctgcgctggatttgccttcaaaacctgagaaaattgcaatagtgggaggtgggtatattgctttggagtttgctggcattttcaatggcttaaagagtgaagtccatgtgtttattcgtcagaagaaagttttaagaggatttgatgaagaggttagagattttgtcgctgaacaaatgtctttaaggggcatcacgtttcatacagaacagagccctcaagctataactaaatcaaatgatggtctgttatctttgaagaccaataaagaaaattttggtgggttctcacatgtaatgtttgcaacaggtcgcagaccaaattcaaagaaccttggactggaagcggtgggggttgaaatggataagaacggtgcaatagtggttgatgagtattcacgtacctcagttgattccatttgggctgttggagatgttaccaatagggtcaacctgacaccagttgcactgatggagggtggggcatttgcgaaaactgtctttggcaatgaacctaccaaaccagattacagagctataccttctgctgtgttctcccaaccaccaataggacaagttggtcttactgaggagcaggcaattgaagagtatggagatgttgatgtcttcgttgccaacttcaggcccctcaaggccactctgtctggactacctgatcgtgtattgatgaagattcttgtgtgcgctacgtcaaacaaagttgtaggagtgcacatgtgtggtgatgatgcacctgagataattcagggaattgcaattgctgttaaagctggattgacgaagcaagattttgatgccaccattggcattcaccccacatccgctgaggaattcgtcacaatgaggagcccgactagaaaaattcgaaaaagttctacagatcaggtagaatctaaagatgaggttgtaagtaagcagtag

SEQ ID NO: 58045 - protein, 550 aa, Zea mays
MAAHATLPFSCSSTLQTLTRTLSSRGAHQLRGGFLRLPSLAALPRLAHPYRRHVSASAAAAPNGASVEGEYDYDLFTIGAGSGGVRASRFASALYGSRVAICEMPFATIASDELGGLGGTCVLRGCVPKKLLVYASKYSHEFEESRGFGWTYETDPKHDWSTLIANKNTELQRLVGIYRNILNNAGVTLIEGRGKIVDPHTVSVNGKLYTAKHILVSVGGRPSMPDIPGIEHVIDSDAALDLPSKPEKIAIVGGGYIALEFAGIFNGLKSEVHVFIRQKKVLRGFDEEVRDFVAEQMSLRGITFHTEQSPQAITKSNDGLLSLKTNKENFGGFSHVMFATGRRPNSKNLGLEAVGVEMDKNGAIVVDEYSRTSVDSIWAVGDVTNRVNLTPVALMEGGAFAKTVFGNEPTKPDYRAIPSAVFSQPPIGQVGLTEEQAIEEYGDVDVFVANFRPLKATLSGLPDRVLMKILVCATSNKVVGVHMCGDDAPEIIQGIAIAVKAGLTKQDFDATIGIHPTSAEEFVTMRSPTRKIRKSSTDQVESKDEVVSKQ

SEQ ID NO: 58046 - DNA, 1698 bp, Zea mays
  CDS (1)..(1698)
atggggtccacagcggccgtctccgtctccgcctcggcgatcgcgtcccgcggctgcgccagatccgaggctgcgcggcggccaggtggaatccgggtctgcggactccggagcgaggccctcacgtgtcactcgcttcggatctcgcaggcgcccgcgaggctgacggtggcgaggccgccgccgccggcggcggcgaccaatggcgcggcggcggggacctgcgggttcgactacgatctcgtcatcatcggcgcgggcgtcgggggtcacggcgccgcgctgcacgccgttgaagagggcttaaaaacagcaataattgagggagatgttgtgggtgggacttgtgtaaacagaggctgtgtcccatcgaaagcgcttcttgctgtcagcggtcgaatgcgggagcttcatgatgaacatcatatgaagtctttgggtctacaggtttcctctcctggatatgacagacaagctgttgctgatcatgcaaacaatcttgcctcgaaaatccgtatcaacttgactaactcaatgaaagctctaggagtggatatattgacaggtgttggcactattgtgggaaagcaaaaagtacgatatggaaaagctggtttcccagataaagaaatcactgccaggaacatcataattgccactggttcagttccttttgttccgaaagggattgagattgatgggaaaactgtatttactagtgatcatgcactgaaacttgagtcagttccagactggatagctattgttggaagtgggtacattggacttgagttcagtgatgtatacacagctcttggaagtgaggttacttttgttgaagctcttgaccagctgatgcctggatttgatcctgaaattgcaaaattagcccagagagttcttatcaatcctcggaaaattgactatcacactggtgtttttgcaagcaagattactcctgcaaaggatggaaaacctgtgctcatcgagcttattgatgcaaagacaaaggagcacaaagaaacccttgaggttgacgcagcccttatagctacaggaagggcgccattcaccaaagggcttggcttggaaaacatcaatgttgttacacaacgtggttttgtgcctgttgatgaacggatgcgagtcatggatgcagatggcaatgtggtacccaatttatattgcattggagatgccaatggcaagctcatgcttgcccatgctgccagtgcacaaggaatttcagttgttgaacaaatctctggaaaggatcacatcctaaatcatttaagcatcccagcagcatgtttcacccatccagagattagtatggttggactgacagagccacaagccagagagaaggcagataaagaaggatttgaggtaaatgttgtgaagactagctttaaggctaacactaaagctttggcagaaaatgaaggagatgggattgctaagttgatttaccgacctgacacgggtgaaattcttggggttcacattttgggtttgcatgctgctgatctcattcacgaggcatcaaatgccatcgccctaggaactcgtgtgcaagacatcaagtttgctgttcacgcacaccctacattgtctgaggtcctggatgaactcttcaaagcagccaaggttaattccggtgtttctcattctgtaaatgaaccagttgcagcctag

SEQ ID NO: 58047 - protein, 565 aa, Zea mays
MGSTAAVSVSASAIASRGCARSEAARRPGGIRVCGLRSEALTCHSLRISQAPARLTVARPPPPAAATNGAAAGTCGFDYDLVIIGAGVGGHGAALHAVEEGLKTAIIEGDVVGGTCVNRGCVPSKALLAVSGRMRELHDEHHMKSLGLQVSSPGYDRQAVADHANNLASKIRINLTNSMKALGVDILTGVGTIVGKQKVRYGKAGFPDKEITARNIIIATGSVPFVPKGIEIDGKTVFTSDHALKLESVPDWIAIVGSGYIGLEFSDVYTALGSEVTFVEALDQLMPGFDPEIAKLAQRVLINPRKIDYHTGVFASKITPAKDGKPVLIELIDAKTKEHKETLEVDAALIATGRAPFTKGLGLENINVVTQRGFVPVDERMRVMDADGNVVPNLYCIGDANGKLMLAHAASAQGISVVEQISGKDHILNHLSIPAACFTHPEISMVGLTEPQAREKADKEGFEVNVVKTSFKANTKALAENEGDGIAKLIYRPDTGEILGVHILGLHAADLIHEASNAIALGTRVQDIKFAVHAHPTLSEVLDELFKAAKVNSGVSHSVNEPVAA

SEQ ID NO: 58048 - DNA, 1653 bp, Zea mays
  CDS (1)..(1653)
atggcggcgcacgcgacgctccccttctcctgctcctccacgctgcagaccctgacccgcaccctctcctcgcgcggggctcaccagctccgcgggggcttcctccgcctcccctccctcgcggcgctcccgaggctggcccacccctgccgccgccacgtctcggcgtccgctgcggcggcgcccaatggcgcctccgttgagggggagtacgactacgacctcttcaccatcggtgccgggagcggcggcgtccgcgcgtcgcgcttcgcctccgcgctctacggctcgcgcgtcgccatctgcgagatgcccttcgccacgatcgcctcggacgagctcggtggcctcggcggcacatgcgtgcttcgtggatgtgttccaaagaaattgctagtgtacgcatccaagtactctcacgagtttgaagagtctcgtggatttggatggacatatgagactgatccgaagcatgattggagcactctcatagccaataaaaatacagagctgcagcgcctggttggcatttacaggaatattttaaacaatgcaggagtcactctgatcgaaggtcgtggaaagatagtcgatcctcatactgtcagtgtgaatggtaagctctacactgctaagcacatactagttagtgttggtggccgaccatcgatgccagatatccctggtatagagcatgttatagattcggatgctgcgctggatttgccttcaaaacctgagaaaattgcaatagtgggaggtgggtatattgctttggagtttgctggcattttcaatggcttaaagagtgaagtccatgtgtttattcgtcagaagaaagttttaagaggatttgatgaagaggttagagattttgtcgctgaacaaatgtctttaaggggcatcacgtttcatacagaacagagccctcaagctataactaaatcaaatgatggtctgttatctttgaagaccaataaagaaaattttggtgggttctcacatgtaatgtttgcaacaggtcgcagaccaaattcaaagaaccttggactggaagcggtcggggttgaaatggataagaacggtgcaatagtggttgatgagtattcacgtacatcagttgattccatttgggctgttggagatgttaccaatagggtcaacctgacaccagttgcactgatggagggtggggcatttgcgaaaactgtctttggcaatgaacctaccaaaccagattacagagctataccttctgctgtgttctcccaaccaccaataggacaagttggtcttactgaggagcaggcaattgaagagtatggagatgttgatgtcttcgttgccaacttcaggcccctcaaggccactctgtctggactacctgatcgtgtattgatgaagattcttgtgtgcgctacgtcaaacaaagttgtaggagtgcacatgtgtggtgatgatgcacctgagataattcagggaattgcaattgctgttaaagctggattgacgaagcaagattttgatgccaccattggcattcaccccacatccgctgaggaattcgtcacaatgaggagcccgactagaaaaattcgaaaaagttctacagatcaggtagaatctaaagatgaggttgtaagtaagcagtag

SEQ ID NO: 58049 - protein, 550 aa, Zea mays
MAAHATLPFSCSSTLQTLTRTLSSRGAHQLRGGFLRLPSLAALPRLAHPCRRHVSASAAAAPNGASVEGEYDYDLFTIGAGSGGVRASRFASALYGSRVAICEMPFATIASDELGGLGGTCVLRGCVPKKLLVYASKYSHEFEESRGFGWTYETDPKHDWSTLIANKNTELQRLVGIYRNILNNAGVTLIEGRGKIVDPHTVSVNGKLYTAKHILVSVGGRPSMPDIPGIEHVIDSDAALDLPSKPEKIAIVGGGYIALEFAGIFNGLKSEVHVFIRQKKVLRGFDEEVRDFVAEQMSLRGITFHTEQSPQAITKSNDGLLSLKTNKENFGGFSHVMFATGRRPNSKNLGLEAVGVEMDKNGAIVVDEYSRTSVDSIWAVGDVTNRVNLTPVALMEGGAFAKTVFGNEPTKPDYRAIPSAVFSQPPIGQVGLTEEQAIEEYGDVDVFVANFRPLKATLSGLPDRVLMKILVCATSNKVVGVHMCGDDAPEIIQGIAIAVKAGLTKQDFDATIGIHPTSAEEFVTMRSPTRKIRKSSTDQVESKDEVVSKQ

SEQ ID NO: 58050 - DNA, 21 bp, Artificial sequence
  primer
atgcaagcaacgatgagtcag

SEQ ID NO: 58051 - DNA, 20 bp, Artificial sequence
  primer
ttaaaccgcccgtttatacg

SEQ ID NO: 58052 - protein, 515 aa, Artificial sequence
  consensus sequence
  Variant (2)..(4): Xaa in position 2 to 4 is any amino acid
  Variant (7)..(7): Xaa in position 7 is any amino acid
  Variant (9)..(9): Xaa in position 9 is any amino acid
  Variant (12)..(13): Xaa in position 12 to 13 is any amino acid
  Variant (16)..(17): Xaa in position 16 to 17 is any amino acid
  Variant (19)..(21): Xaa in position 19 to 21 is any amino acid
  Variant (22)..(22): Xaa in position 22 is any or no amino acid
  Variant (24)..(29): Xaa in position 24 to 29 is any amino acid
  Variant (31)..(34): Xaa in position 31 to 34 is any amino acid
  Variant (35)..(44): Xaa in position 35 to 44 is any or no amino acid
  Variant (49)..(49): Xaa in position 49 is any amino acid
  Variant (51)..(51): Xaa in position 51 is any amino acid
  Variant (54)..(54): Xaa in position 54 is any amino acid
  Variant (56)..(56): Xaa in position 56 is any amino acid
  Variant (61)..(75): Xaa in position 61 to 75 is any amino acid
  Variant (76)..(78): Xaa in position 76 to 78 is any or no amino acid
  Variant (80)..(119): Xaa in position 80 to 119 is any amino acid
  Variant (120)..(127): Xaa in position 120 to 127 is any or no amino acid
  Variant (129)..(152): Xaa in position 129 to 152 is any amino acid
  Variant (153)..(177): Xaa in position 153 to 177 is any or no amino acid
  Variant (179)..(179): Xaa in position 179 is any amino acid
  Variant (182)..(196): Xaa in position 182 to 196 is any amino acid
  Variant (197)..(202): Xaa in position 197 to 202 is any or no amino acid
  Variant (204)..(205): Xaa in position 204 to 205 is any amino acid
  Variant (208)..(208): Xaa in position 208 is any amino acid
  Variant (210)..(212): Xaa in position 210 to 212 is any amino acid
  Variant (213)..(213): Xaa in position 213 is any or no amino acid
  Variant (215)..(219): Xaa in position 215 to 219 is any amino acid
  Variant (220)..(220): Xaa in position 220 is any or no amino acid
  Variant (222)..(222): Xaa in position 222 is any amino acid
  Variant (224)..(224): Xaa in position 224 is any amino acid
  Variant (227)..(227): Xaa in position 227 is any amino acid
  Variant (229)..(236): Xaa in position 229 to 236 is any amino acid
  Variant (238)..(239): Xaa in position 238 to 239 is any amino acid
  Variant (242)..(243): Xaa in position 242 to 243 is any amino acid
  Variant (245)..(299): Xaa in position 245 to 299 is any amino acid
  Variant (300)..(309): Xaa in position 300 to 309 is any or no amino acid
  Variant (311)..(316): Xaa in position 311 to 316 is any amino acid
  Variant (319)..(319): Xaa in position 319 is any amino acid
  Variant (321)..(323): Xaa in position 321 to 323 is any amino acid
  Variant (324)..(324): Xaa in position 324 is any or no amino acid
  Variant (326)..(328): Xaa in position 326 to 328 is any amino acid
  Variant (329)..(330): Xaa in position 329 to 330 is any or no amino acid
  Variant (332)..(336): Xaa in position 332 to 336 is any amino acid
  Variant (337)..(337): Xaa in position 337 is any or no amino acid
  Variant (339)..(353): Xaa in position 339 to 353 is any amino acid
  Variant (354)..(360): Xaa in position 354 to 360 is any or no amino acid
  Variant (362)..(362): Xaa in position 362 is any amino acid
  Variant (365)..(370): Xaa in position 365 to 370 is any amino acid
  Variant (371)..(371): Xaa in position 371 is any or no amino acid
  Variant (375)..(375): Xaa in position 375 is any amino acid
  Variant (377)..(379): Xaa in position 377 to 379 is any amino acid
  Variant (381)..(398): Xaa in position 381 to 398 is any amino acid
  Variant (399)..(404): Xaa in position 399 to 404 is any or no amino acid
  Variant (406)..(409): Xaa in position 406 to 409 is any amino acid
  Variant (410)..(411): Xaa in position 410 to 411 is any or no amino acid
  Variant (413)..(413): Xaa in position 413 is any amino acid
  Variant (416)..(418): Xaa in position 416 to 418 is any amino acid
  Variant (421)..(422): Xaa in position 421 to 422 is any amino acid
  Variant (424)..(444): Xaa in position 424 to 444 is any amino acid
  Variant (445)..(449): Xaa in position 445 to 449 is any or no amino acid
  Variant (451)..(456): Xaa in position 451 to 456 is any amino acid
  Variant (457)..(457): Xaa in position 457 is any or no amino acid
  Variant (459)..(460): Xaa in position 459 to 460 is any amino acid
  Variant (462)..(470): Xaa in position 462 to 470 is any amino acid
  Variant (471)..(471): Xaa in position 471 is any or no amino acid
  Variant (474)..(474): Xaa in position 474 is any amino acid
  Variant (476)..(477): Xaa in position 476 to 477 is any amino acid
  Variant (479)..(486): Xaa in position 479 to 486 is any amino acid
  Variant (488)..(490): Xaa in position 488 to 490 is any amino acid
  Variant (492)..(505): Xaa in position 492 to 505 is any amino acid
  Variant (506)..(507): Xaa in position 506 to 507 is any or no amino acid
  Variant (509)..(509): Xaa in position 509 is any amino acid
  Variant (513)..(514): Xaa in position 513 to 514 is any amino acid
DXXXIGXGXGGXXAAXXAXXXXGXXXXXXEXXXXXXXXXXXXXXGGTCXNXGCXPXKALLXXXXXXXXXXXXXXXXXXGXXXXXXXXXXXXXXXXXXXXXXXXXXXXXXXXXXXXXXXXXXXXXXXXGXXXXXXXXXXXXXXXXXXXXXXXXXXXXXXXXXXXXXXXXXXXXXXXXXAXGSXXXXXXXXXXXXXXXXXXXXXSXXALXLXXXXPXXXXXXGXGXIGXEXXXXXXXXGXXVTXXEXXXXXXXXXXXXXXXXXXXXXXXXXXXXXXXXXXXXXXXXXXXXXXXXXXXXXXXXXXXXXXXXXDXXXXXXGRXPXXXXLXXXXXGXXXXXXGXXXXXXXXXXXXXXXXXXXXXXAXGDXXXXXXXLAHXAXXXGXXXXXXXXXXXXXXXXXXXXXXXXPXXXXXXTXPEXXXVGXXEXXXXXXXXXXXXXXXXXXXXXXXXXXAXXXXXXXGXXKXXXXXXXXXXLGXHXXGXXXXXXXXEXXXAXXXXXXXXXXXXXXXXHXHPTXXE

SEQ ID NO: 58053 - protein, 32 aa, Artificial sequence
  protein pattern
  Variant (2)..(3): Xaa in position 2 to 3 is any amino acid
  Variant (4)..(4): Xaa in position 4 is Ile, Leu, Met or Val
  Variant (5)..(5): Xaa in position 5 is any amino acid
  Variant (6)..(6): Xaa in position 6 is Ile, Leu or Val
  Variant (7)..(7): Xaa in position 7 is Ile, Leu, Met or Val
  Variant (9)..(9): Xaa in position 9 is Ala, Gly or Ser
  Variant (11)..(11): Xaa in position 11 is any or no amino acid
  Variant (13)..(13): Xaa in position 13 is any or no amino acid
  Variant (15)..(15): Xaa in position 15 is any amino acid
  Variant (17)..(17): Xaa in position 17 is any amino acid
  Variant (18)..(18): Xaa in position 18 is Ala, Gly or Ser
  Variant (19)..(24): Xaa in position 19 to 24 is any amino acid
  Variant (26)..(26): Xaa in position 26 is Ala, Cys, Ser, Thr or Val
  Variant (27)..(27): Xaa in position 27 is any amino acid
  Variant (28)..(28): Xaa in position 28 is Ile or Val
  Variant (29)..(30): Xaa in position 29 to 30 is any amino acid
  Variant (31)..(31): Xaa in position 31 is Phe, Ile, Leu or Val
PXXXXXXGXGXIXGXEXXXXXXXXGXXXXXXE

SEQ ID NO: 58054 - protein, 19 aa, Artificial sequence
  protein pattern
  Variant (5)..(5): Xaa in position 5 is Leu or Val
  Variant (6)..(7): Xaa in position 6 to 7 is any amino acid
  Variant (10)..(10): Xaa in position 10 is Ile, Met or Val
  Variant (12)..(12): Xaa in position 12 is any amino acid
  Variant (14)..(14): Xaa in position 14 is any amino acid
  Variant (15)..(15): Xaa in position 15 is any or no amino acid
  Variant (17)..(18): Xaa in position 17 to 18 is any amino acid
  Variant (19)..(19): Xaa in position 19 is Ala, Gly, Asn, Ser or Val
GGTCXXXGCXPXKXXLXXX

SEQ ID NO: 58055 - protein, 17 aa, Artificial sequence
  protein pattern
  Variant (2)..(2): Xaa in position 2 is any amino acid
  Variant (3)..(3): Xaa in position 3 is Ala, Ile or Val
  Variant (4)..(4): Xaa in position 4 is any amino acid
  Variant (5)..(5): Xaa in position 5 is Phe or Tyr
  Variant (6)..(6): Xaa in position 6 is Cys, Ser or Thr
  Variant (7)..(7): Xaa in position 7 is any amino acid
  Variant (9)..(9): Xaa in position 9 is Glu or Pro
  Variant (10)..(10): Xaa in position 10 is any amino acid
  Variant (11)..(11): Xaa in position 11 is Ala, Gly or Ser
  Variant (12)..(12): Xaa in position 12 is any amino acid
  Variant (15)..(16): Xaa in position 15 to 16 is any amino acid
PXXXXXXPXXXXVGXXE

SEQ ID NO: 58056 - protein, 19 aa, Artificial sequence
  protein pattern
  Variant (2)..(2): Xaa in position 2 is any amino acid
  Variant (3)..(3): Xaa in position 3 is Phe, Ile, Leu or Val
  Variant (4)..(4): Xaa in position 4 is any amino acid
  Variant (5)..(5): Xaa in position 5 is Ile, Leu or Val
  Variant (7)..(7): Xaa in position 7 is Ala, Cys, Gly, Ser or Thr
  Variant (9)..(9): Xaa in position 9 is any amino acid
  Variant (12)..(13): Xaa in position 12 to 13 is any amino acid
  Variant (14)..(14): Xaa in position 14 is any or no amino acid
  Variant (16)..(18): Xaa in position 16 to 18 is any or no amino acid
DXXXXGXGXGGXXXAXXXA

SEQ ID NO: 58057 - protein, 18 aa, Artificial sequence
  protein pattern
  Variant (2)..(3): Xaa in position 2 to 3 is any amino acid
  Variant (4)..(4): Xaa in position 4 is any or no amino acid
  Variant (8)..(8): Xaa in position 8 is any amino acid
  Variant (9)..(9): Xaa in position 9 is Ala or Gly
  Variant (10)..(11): Xaa in position 10 to 11 is any amino acid
  Variant (12)..(12): Xaa in position 12 is Asp, Glu or Gln
  Variant (13)..(13): Xaa in position 13 is Ala or Gly
  Variant (14)..(16): Xaa in position 14 to 16 is any amino acid
  Variant (17)..(17): Xaa in position 17 is Ala, Ile or Val
  Variant (18)..(18): Xaa in position 18 is Asp, Glu or Lys
GXXXLAHXXXXXXXXXXX

SEQ ID NO: 58058 - DNA, 1557 bp, Synechocystis sp.
  CDS (1)..(1557): transl_table=11
atggcgggtaaaaccactggggttgtggcggcgggccatgcccaaacggcagaagcgggcaaatgtatgctcgaagaagggggcaatgccttcgatgcggcgatcgcctcggtgttggcggcctgcgtagtggaatcgagtttaacttccctggggggagggggttttctgctggcccagacggcggcgaagaagagttacctgttcgattttttctgccaaacaccccaagttaacccaggggaaaaagcagtggacttctaccccgttgccctcaattttggtggagcttggcaaacttttcacattggtaaaggggcgatcgccgtgccggggatggtggcgggattatttgcggcccataggaaactggggcagctacctttcaaagtattgattgaaccagcggtggcatatgcccgccagggatttaccctcaaccgtttcaatgactttaccaatggtctgctggagccaattctgacccaacaagaggaaggcagaaagttttacgctccccaaggaaaaattctccgccaaggggaaaaggcctatctgccccagtttgcggacgtgctggaacaattggctcgccatggcccggattggttttaccggggagagttaaccgagtgggtgctggaatctttgggggaagccagtgctctgaccgccaaggactgggccgactatcaggtggaaattcgtctacccctgcgggcccaatatcgccaacggcaactgttaaccaatcctccccccagtgccggaggcattctcattgcttttgctttgcagttgctagaaaaatacgatttgagccaatatcccctgggcagtgcggcacaaattcagctttttagccaagtgatggccctgagtaaccaagcccgtcggcaatatttagatggcaatctccactgtggggacattgaagcaaaatttctcggcggcgatcgcctggcctcggaactaggacaatcaaaatttatcaataaattgggtagcaccacccacatcagtgttttagacggagagggcaatgccgccagcttaaccagttccaatggggaggggtctgggcattttattcccggcacgggcattatgctgaacaacatgttgggggaagaagacctcaatccccagggcttttaccaatggccaccggggcaacgcctatcatcgatgatggcccccactatacttttagaccaggaacaaccccggctagttttggggtcagggggatcaaatcgcattcgtagtgccattttgcaggtggtctgtcatcacctagattaccaattacccttagccgaagcggtggggcgggaacgtattcattgggaggcccataaattagatttggagccaacctctgtagctgatattctggcccagttgcgatttgacgacggcacccagggtaccctttggacggaacaaaatatgttttttgggggagttcatggggttgccaccaccactgcggggaccatggaaggggttggagatccccggcgatcgggggccgtggcctacagtctggaataa

SEQ ID NO: 58059 - protein, 518 aa, Synechocystis sp.
MAGKTTGVVAAGHAQTAEAGKCMLEEGGNAFDAAIASVLAACVVESSLTSLGGGGFLLAQTAAKKSYLFDFFCQTPQVNPGEKAVDFYPVALNFGGAWQTFHIGKGAIAVPGMVAGLFAAHRKLGQLPFKVLIEPAVAYARQGFTLNRFNDFTNGLLEPILTQQEEGRKFYAPQGKILRQGEKAYLPQFADVLEQLARHGPDWFYRGELTEWVLESLGEASALTAKDWADYQVEIRLPLRAQYRQRQLLTNPPPSAGGILIAFALQLLEKYDLSQYPLGSAAQIQLFSQVMALSNQARRQYLDGNLHCGDIEAKFLGGDRLASELGQSKFINKLGSTTHISVLDGEGNAASLTSSNGEGSGHFIPGTGIMLNNMLGEEDLNPQGFYQWPPGQRLSSMMAPTILLDQEQPRLVLGSGGSNRIRSAILQVVCHHLDYQLPLAEAVGRERIHWEAHKLDLEPTSVADILAQLRFDDGTQGTLWTEQNMFFGGVHGVATTTAGTMEGVGDPRRSGAVAYSLE

SEQ ID NO: 58060 - DNA, 1725 bp, Oryza sativa Japonica Group
  CDS (1)..(1725)
atgaacgctcgacgccttcacaaatgggcgggcaccgcgcggctggtgctcctcctcttagccgctgctgcggcggcggcggcggcggcggtggggcgcagggaggtggtgacctcgccgcacggcgccgtggcggcggacgacgggcggtgctcgaggatcgggcgcgacgcgctccgcgacggcggtaacgccgtggacgccgccgtcgccgcgtcgctctgcctcggcgtcgtcagcccggcgtccagcggggtcggcggcggcgccttcatgctcgtccggctcgccgacggcaccgccctcgcgtacgactcccgcgagaccgcccccctcgccgcctcccaggatatgtatggtggcaacgaaacgctgaaagcaaggggagctctatccatagcagttccaggggaaattgcaggtctgtatgaggcatggaagcgccatggcaagcttccttggaagaggttagtgatgccagcagcaaagcttgcccgtgcattcagagtgtcaccttatctgaggaagcagatggaggcaaccagagatggaattctccaaaataagggaataagtggagtgtacacctcaaatggagatatccttaatgttggagatgtatgccgcaacattaggcttgcaagaacactggtggctgtcgcggagaaagggccggatgtgttctacaaaggcgcagttggtgatcagctggcgaaggatattcaggaagttggagggatcataacaatggaagatctgaagaaataccaagttaagatacgtcggccacttttagagaatgtattgggactgacagtattaagcatgcctcctccttcagctggtggtgctgggctaatgcttgttctgaatatccttactcagtatggcctccctgctggtttttctggctcacttgggatccatcgtctaattgagtccttgaagcattactttgcaataaggatgaaccttggcgaccctgagtttgtaaatgttaacgaagtcgtctctgatatgatgtcccctaaatttgctgctgacctgaagaaaaccatctatgataacatgacatttgaccctaaacactatggtggcaggtggaacatccttcaggaccatggaacaagccacctgtccatcgtcgacagcgagaggaacgccgtttcgatgaccaccactgtcaacgcgtactttggatccctgatcctgtctccgagcacaggcattttgctcaacaacgagatggacgacttctccatgccggcgaacacgtcggccaactctccgccgcctgcccccgccaatttcgttaggcctctgaaacggcctctctcctcgatgactccgacgataatactcaaggatggcaatctgaaggctgcggttggagctagtggtgggagcatgatccctgctggaaccatggaagtgctcctcaaccatttcgtcaagaacatggacccgttgtcctctgtcatggcgccaagagtgtatcaccagctgatcccgaacgtggtccagtacgagaactggacgacggtgaccggcgaccacttcgagctggacgccgcgacgagagccgacctgcggaggaaaggccacgtcttggagccgctcgccggagggaccatcagccagctcgtcgtggacgacgtcgagcgccacggcggtctgaccgccgtcagcgaccccaggaaaggcggcttcccggccggctattag

SEQ ID NO: 58061 - protein, 574 aa, Oryza sativa Japonica Group
MNARRLHKWAGTARLVLLLLAAAAAAAAAAVGRREVVTSPHGAVAADDGRCSRIGRDALRDGGNAVDAAVAASLCLGVVSPASSGVGGGAFMLVRLADGTALAYDSRETAPLAASQDMYGGNETLKARGALSIAVPGEIAGLYEAWKRHGKLPWKRLVMPAAKLARAFRVSPYLRKQMEATRDGILQNKGISGVYTSNGDILNVGDVCRNIRLARTLVAVAEKGPDVFYKGAVGDQLAKDIQEVGGIITMEDLKKYQVKIRRPLLENVLGLTVLSMPPPSAGGAGLMLVLNILTQYGLPAGFSGSLGIHRLIESLKHYFAIRMNLGDPEFVNVNEVVSDMMSPKFAADLKKTIYDNMTFDPKHYGGRWNILQDHGTSHLSIVDSERNAVSMTTTVNAYFGSLILSPSTGILLNNEMDDFSMPANTSANSPPPAPANFVRPLKRPLSSMTPTIILKDGNLKAAVGASGGSMIPAGTMEVLLNHFVKNMDPLSSVMAPRVYHQLIPNVVQYENWTTVTGDHFELDAATRADLRRKGHVLEPLAGGTISQLVVDDVERHGGLTAVSDPRKGGFPAGY

SEQ ID NO: 58062 - DNA, 1740 bp, Mesorhizobium loti MAFF303099
  CDS (1)..(1740): transl_table=11
atgcacgtcacccgtcggacactgatcgccgccagtctttccatcacctttgccctggcgccattgaccagcgtcttcgccgcgtcgccggcgccggccaagggcgagcacggcatggtggtcacggcccagcacctggcgtcggaagtcggcgtcgaggtcttgaagaagggcggcaatgccgtcgatgcggcggtcgccgtcggctatgcgctggccgtcgtctaccccaatgccggcaatatcggcggcggcggcttcatgaccatccggttcgccgatggcaaatcgaccttcctcgattttcgagagcgcgcgccgctggccgcgaccaagaccatgtatctcgacaaggatggcaatccggtgaagggcgccagcctcgacggctatctcgccgtcggcgtgccgggctcggtggccggtttcgaaatagcgcgcgagaaatatggcacactctcaaggcaagacctgatggcgccggcgatcggctatgccaaggatgggttcatcctcaatcagggcgatgccgcctcgttcgccggcagcgcggatcggctggcgaagaacgcggccgcggccgcagccttcctgaaacccgatggcaagccctacggcatcggcgagcggctcacccaaccggaccttgccgcctcgctttcggcgatatccgagaaaggtcccgacgccttctacaagggcgccatcgccgacgccatcgtcaaggcgagtggcgccaagggcggcatcctggccaagcaggatttcgagcaatatgcggtgcgtgaactgaaaccggtcacttgctcctatcgcggctatgagatcacttcctcgccgccgccaagctccggtggcgtcatcatctgcgaaatcctcaacgtgctggaaggctacccgctgtcttatctcggcgccggttcggccgagacggtgcatgtcatggtcgaggcgatgcgccatgcctatgtcgaccgcaactccgcgctcggcgatcccgatttcgtcgacaatccggtctcgaaattgctggataaagcctacgccaagggcatccgcgacaagatcgacccgttccgggccggcgtgtcgcaggacctgatgccgaagggtttcggcgagtcgaaggagacgacgcactattcgatcatcgacaaggatggcaacgcggtcgcggtcacctacacgctgaacggctccttcggcgccggcgtcgtcgccgacggcaccggcatcctactcaacaacgagatggacgatttcacccagaagccgggcgtgcctaacctctatgggttggtccagggcgaggccaatgccattcagccgaagaagacgccgctgtcatcgatgagcccgaccatcgtggccagggacggcaagccgttcatggtcatcggcagcccgggcggctcgcgcatcatcaccatcacgcttgaagcgatcgtcaacgtcatcgaccatggcatgaacatccaggaagcgatcgacgcgccgcgcatccaccatcaatggctgcccgataaggtctatgtcgagccgttcggcctgtcgccggacaccgaaaggctgttggccggcatgggctaccaccttgatctcggcgaccagacctggggccaggcggccggcatcttggtcggcggcaaaagcctcgcggagatcgagaaaggcggcggcgcgcgctacaatggcgccatcgacagccgggcggcctctggcgaggcgctcggatattga

SEQ ID NO: 58063 - protein, 579 aa, Mesorhizobium loti MAFF303099
MHVTRRTLIAASLSITFALAPLTSVFAASPAPAKGEHGMVVTAQHLASEVGVEVLKKGGNAVDAAVAVGYALAVVYPNAGNIGGGGFMTIRFADGKSTFLDFRERAPLAATKTMYLDKDGNPVKGASLDGYLAVGVPGSVAGFEIAREKYGTLSRQDLMAPAIGYAKDGFILNQGDAASFAGSADRLAKNAAAAAAFLKPDGKPYGIGERLTQPDLAASLSAISEKGPDAFYKGAIADAIVKASGAKGGILAKQDFEQYAVRELKPVTCSYRGYEITSSPPPSSGGVIICEILNVLEGYPLSYLGAGSAETVHVMVEAMRHAYVDRNSALGDPDFVDNPVSKLLDKAYAKGIRDKIDPFRAGVSQDLMPKGFGESKETTHYSIIDKDGNAVAVTYTLNGSFGAGVVADGTGILLNNEMDDFTQKPGVPNLYGLVQGEANAIQPKKTPLSSMSPTIVARDGKPFMVIGSPGGSRIITITLEAIVNVIDHGMNIQEAIDAPRIHHQWLPDKVYVEPFGLSPDTERLLAGMGYHLDLGDQTWGQAAGILVGGKSLAEIEKGGGARYNGAIDSRAASGEALGY

SEQ ID NO: 58064 - DNA, 1719 bp, Arabidopsis thaliana
  CDS (1)..(1719)
atgtcgctggttcgaacagtgacgatcgttctttttataatcgcgtttctgcaaaacgctgcggctcagaaaagacagcaaagtattgttaagtctcgcggtgcggttgcgacagatgatggacggtgttctgttatcgggatgcgtgttcttcgtgaaggaggaaacgcgattgatgcgtctgtggctgctgctctgtgtttgggcgttgtaagtcccgcgtctagcggtataggcggtggagcgtttacagtggttaagatagctggtgggaaagaaattgcttatgattctagagaaaccgctcctctaagagccactgagaatatgtatggaggtaatgttgacctaaagaagaaaggagccttatcagtaggcgttcccggggaagttgcaggtctattcacggcttggaaacaacatgggaagctaccgtggaagcggttagtgactcctgcagagaaacttgcagagggattcaagatttccaagtatctttatatgcagatgaacgcgactagaagcgatatcttagcagacaaaggtctctctgacctatttgtttcaaatggagagctcaagaaaccagggacgatttgccataacccaaaattggctttaaccttgaagctaattggagagtacggtccaaaagcattttacaatggcacagttggggttaacctagcgagagatatcaaaaaatctggaggaataataactttgaaagatctgcaaagttatagagttaagattaaagaaccgttgtctgcagacattcttggatatagagtccttggtatgcctcctccttcatctggtggcgctgcaatgatgcttgttttgaacattctttctcaatatgggattccatcaggtgtttcaggccctctcggtgttcatcgactaatcgaggctctgaaacatgcattcgcagttagaatgaacctcggggatccagatttcactgatgttaccaaggttgtttcggatatgttgtcgccaaagtttgcaaaagacttgaagagcaagataaacgaccaaaaaacttttgatccaaaatattacgggggcatgtggaatcagatcgacgaccacgggacaagtcatttatcgatcatagaccgcgagaggaacgctgtgtctatgactagtacaataaatggttactttggggcattgatgctatctccgagcacaggaatagttctgaacaacgaaatggacgatttctcaatccctatgaaatctaacggtaacttagatgttccaccaccagcaccagctaacttcatccgtcctggaaaacgacctttgtcctctatgtcacccaccattgtactcaaggacggtaaagtgaaagccgctgtgggtgcgagcggaggagccaacattattgccgggacaacggaagtttacttgaatcattttttcctcaagatggatcctctttcttccgtcttagctccaagaatctaccatcagctgataccaaacagagcttcgtacgagaactggacaacagtattcaatgatcatttcgagattcctaaagcaacaagagttgtgttggagaagaaaggtcatgtcctatctcctattgccggagggacgattgctcagttcatagttcaagaatccggtgagaactccggtggaagaagtgagcttgtggcagttagtgatcctcgaaaaggagggttcccttcaggatattga

SEQ ID NO: 58065 - protein, 572 aa, Arabidopsis thaliana
MSLVRTVTIVLFIIAFLQNAAAQKRQQSIVKSRGAVATDDGRCSVIGMRVLREGGNAIDASVAAALCLGVVSPASSGIGGGAFTVVKIAGGKEIAYDSRETAPLRATENMYGGNVDLKKKGALSVGVPGEVAGLFTAWKQHGKLPWKRLVTPAEKLAEGFKISKYLYMQMNATRSDILADKGLSDLFVSNGELKKPGTICHNPKLALTLKLIGEYGPKAFYNGTVGVNLARDIKKSGGIITLKDLQSYRVKIKEPLSADILGYRVLGMPPPSSGGAAMMLVLNILSQYGIPSGVSGPLGVHRLIEALKHAFAVRMNLGDPDFTDVTKVVSDMLSPKFAKDLKSKINDQKTFDPKYYGGMWNQIDDHGTSHLSIIDRERNAVSMTSTINGYFGALMLSPSTGIVLNNEMDDFSIPMKSNGNLDVPPPAPANFIRPGKRPLSSMSPTIVLKDGKVKAAVGASGGANIIAGTTEVYLNHFFLKMDPLSSVLAPRIYHQLIPNRASYENWTTVFNDHFEIPKATRVVLEKKGHVLSPIAGGTIAQFIVQESGENSGGRSELVAVSDPRKGGFPSGY

SEQ ID NO: 58066 - DNA, 1737 bp, Arabidopsis thaliana
  CDS (1)..(1737)
atgaattcatttatgtcgctcgttcgtactgcgacgatcgctcttcttctaatcgcgtttctgcaaaacgctaacgctgtgaaaaatctgcaaagtattgttgcgtatcacggtgcggttgcgacagacgatggacggtgttctgcaatagggacgaatgttcttcgtcaaggaggaaacgcgattgatgcgtcggtggctgctgctctttgtttgggcgttgtcagtcccgcatctagcggtataggcggtggagcgtttacaatgattaagctagctaatggcacggaagttgcttatgattccagagaaaccgctcctctaagcgccactgaggatatgtatggtgataatcctgagcgaaagaagaaaggatccttgtcagtaggcgttcccggggaagtcgcgggtctatacacggcttggacacaacacgggaagttaccgtggaagcagttagtagaacctgctgagaaacttgcagctgaaggattcaagatttcaaaatatctctatatgcagatgaatgcgactagaagcgatatcttagcggacaaaggtctctctgagctatttgtttcaaatggagagctcaagaaaccaggggcgatttgccgtaacccgaaattggctgatacactaagccaaatcgctgaatacggtccaaaagcgttttacaatggcacggttgggtttaacctagtgagtgatatacaaaaagccggagggataataactttgaaagatttgcagaattacaacgttaaggttaaagaaccattatctacggagattcttggataccgattactcggcatgcctcctccttcatctggtggccctgcaatgatgcttattttgaacattcttgctcaatatggtattccatcgggtgtttccggccccctcggtgttcatcgactagttgaggctctcaaacatgcattcgcagttagaatgaacctcggggatccagattttgtccctgaagttactaatgttgttgcagatatgttatctccaaagtttgcacaagacttgaagagcaagataaacgatgagaagacctttgatccaaaatattacggtggcaaatggggtcagatcaaggatcatgggacgagccatttatcgataatagattctgagagaaatgctgtttcaatgactagtacaatcaacggatactttggggcaataatgctgtctccgagcaccggaatcgttctaaacaacgaaatggacgatttctcgatcccgacgaaatccggaggtgacccagatgtgcccccaccagcaccggctaacttcatccgaccggggaaacgacctttgtcctctatgactcccaccattgtactcaaggacggtaaagtgaaagcagcattgggtgcgagtggaggaatgtacatcatcgccggtacaacacaagtttacttaaatcatttcttcctcaacatggatcctctctcttccgttgttgctccaagaatctaccaccagctgataccgaacaaagcttcgtatgagaattggacgacagtgtatagtgaccatttcgagattcctgaagagataagacttgtgttggagaagaaaggtcaagtcctaacgccgatcgccggagggacgatttctcagctcatagttgaacaatccgatggaaaatccggtggaattagtaagcttgtggcggttagtgatccaaggaaaggagggttcccttcaggatattga

SEQ ID NO: 58067 - protein, 578 aa, Arabidopsis thaliana
MNSFMSLVRTATIALLLIAFLQNANAVKNLQSIVAYHGAVATDDGRCSAIGTNVLRQGGNAIDASVAAALCLGVVSPASSGIGGGAFTMIKLANGTEVAYDSRETAPLSATEDMYGDNPERKKKGSLSVGVPGEVAGLYTAWTQHGKLPWKQLVEPAEKLAAEGFKISKYLYMQMNATRSDILADKGLSELFVSNGELKKPGAICRNPKLADTLSQIAEYGPKAFYNGTVGFNLVSDIQKAGGIITLKDLQNYNVKVKEPLSTEILGYRLLGMPPPSSGGPAMMLILNILAQYGIPSGVSGPLGVHRLVEALKHAFAVRMNLGDPDFVPEVTNVVADMLSPKFAQDLKSKINDEKTFDPKYYGGKWGQIKDHGTSHLSIIDSERNAVSMTSTINGYFGAIMLSPSTGIVLNNEMDDFSIPTKSGGDPDVPPPAPANFIRPGKRPLSSMTPTIVLKDGKVKAALGASGGMYIIAGTTQVYLNHFFLNMDPLSSVVAPRIYHQLIPNKASYENWTTVYSDHFEIPEEIRLVLEKKGQVLTPIAGGTISQLIVEQSDGKSGGISKLVAVSDPRKGGFPSGY

SEQ ID NO: 58068 - DNA, 1734 bp, Pseudomonas aeruginosa PAO1
  CDS (1)..(1734): transl_table=11
atgtccttcctgaacctgcccgtccgtaccctggtcgccgcctgcggcctgtccctgctcagcctcgcggcgcatgccgacagctttcgcggcgacgcccacgcaccgcagcaggccgccgtcgccacgccacatccggccgcgaccgtcgccggcctggaaaccctggccaatggcggcaacgccttcgacgctgcggcggccatcgccgctgccctggcggtagccgagccttacggctcgggactcggcggcggtggattcttccttctgcgccaggccggtgcgcagccgacctatcgcttcctcgacgcccgcgagcgcgcgccgaaggccgcctacgccgacatgtaccggcgcaatggcaaggtcgaccccaggctgtccgtcgacggcccgctggcggcggcgatccccggcctgccggcggcgctggtcgaattgagcagccgctacggacgcaagcccctggccgacaatctggtgccggcgatccgcctggcggtggatggcgtatccgtcgaccggatctaccgtgaccgcgccgccatgcgcctggaagcgatgcgcaaggacccggaaaccgcgcggatcttcctcgacaagggcggaatccccgacgaatggaacctgctccgccaaccgcagttggcacgtaccctggaacgcctcgggcgctacgggcggatcggtttctacgaaggcgagacagcggacaagctgctcaccggggtccgcgccggcggcggcatctggagcgcggccgacctgcgcgactaccgggtgatcgaacgccgcccgctggaggtgaagctggccaacggccgcgaactgatcagcgcaccgccgccctcggccggcggcgtcgccctggcgcagagcctgcagatgctggaacagctgccgtggcagaaggccgagccggtacagcgcgcccattacgtgctggaggtcctgcgccgtgcctaccgcgatcgaggcctgctcggcgacccggacttcgtcgccaacccgctgcccagtttgctggcgccggactacctgaagcgccttgccgccggcatcgacccgcgccgcgccacgcccagctcggcgctgccggaggcgccggcttggcgcgaaggcgaccacaccacccacttcgcggtgatcgatgcccagggcaacgcggtggccgccaccctctcggtgaacctgccgttcggcgccgccttcaccgttcccgataccggcgtggtgctgaacaacgagatggacgatttcgccgccgacacccagggcgccaacagctacggcctggccggcagccaggcgaacgcggtggcggccggcaagcgcccgctgtcgagcatgagtccgagcttcctggaaagcccgaccgacttcgccgccttcggcacccctggcggcagccgcatcccgagcatggttctgatctccatgctgcagtacttcgacggtcgcccggtcggccaatgggtcgccgcgccgcgctaccaccaccagtacaagccggacgtcgtcgagtacgaaccgcgcgccttcagcgatgccgaggccgccgaactgcgccggcgcggctatcagctcaaacgcctggagcgcagctacggcaaccagcaggtgctctactgggacaagcgcagcggccgcgtcgacgccgccagcgacccgcgcgggatcggctactcgtctctgtccctggaggcgcaagcgcagcctcggccgcactga

SEQ ID NO: 58069 - protein, 577 aa, Pseudomonas aeruginosa PAO1
MSFLNLPVRTLVAACGLSLLSLAAHADSFRGDAHAPQQAAVATPHPAATVAGLETLANGGNAFDAAAAIAAALAVAEPYGSGLGGGGFFLLRQAGAQPTYRFLDARERAPKAAYADMYRRNGKVDPRLSVDGPLAAAIPGLPAALVELSSRYGRKPLADNLVPAIRLAVDGVSVDRIYRDRAAMRLEAMRKDPETARIFLDKGGIPDEWNLLRQPQLARTLERLGRYGRIGFYEGETADKLLTGVRAGGGIWSAADLRDYRVIERRPLEVKLANGRELISAPPPSAGGVALAQSLQMLEQLPWQKAEPVQRAHYVLEVLRRAYRDRGLLGDPDFVANPLPSLLAPDYLKRLAAGIDPRRATPSSALPEAPAWREGDHTTHFAVIDAQGNAVAATLSVNLPFGAAFTVPDTGVVLNNEMDDFAADTQGANSYGLAGSQANAVAAGKRPLSSMSPSFLESPTDFAAFGTPGGSRIPSMVLISMLQYFDGRPVGQWVAAPRYHHQYKPDVVEYEPRAFSDAEAAELRRRGYQLKRLERSYGNQQVLYWDKRSGRVDAASDPRGIGYSSLSLEAQAQPRPH

SEQ ID NO: 58070 - DNA, 1746 bp, Escherichia coli O157:H7 EDL933
  CDS (1)..(1746): transl_table=11
atgataaaaccgacgtttttacgccgggtggccattgctgctctgttcacaggaagttgttttagtacggtagccgcgccacctgcgccgtctcctgtttcttacggcgtggaggaagatgtctttcatccggtacgcgcgaaacaggggatggtggcatctgtagatgctactgccactcaggtgggggtggatatcctcaaggagggcgggaatgccgttgatgccgccgtggctgtgggctacgcgctggcggtaacgcatccgcaggcagggaatctgggcggtggtggttttatgctgatccgctcgaaaaatggcaataccaccgctatcgatttccgcgaaatggcacccgccaaagcgacccgcgatatgttccttgatgaccagggcaacccggacagcaaaaaatcactcacttcgcatctggcttccggcacgcccggtacggtcgctggtttctcgctggcgttggataaatacggcacaatgccgttgaacaaagtggtgcagccagcgtttaaactggcacgcgatggttttatcgttaacgacgagctggctgacgatctcaaaacctacgggagcgaagtgctgccgaatcacgaaaacagcaaggctatcttctggaaagagggcgagccgctgaaaaagggcgacaagctggtgcaggcgaacctggcaaagagcctggagatgattgccgaaaacggcccggacgaattctacaaaggcacgatagcggaacagattgcccaggagatgcagaaaaacggtggcctgatcactaaagaagatttagcggcgtataaagcggtcgaacgcacaccgataagcggcgattatcgcgggtatcaggtttactccatgccaccgccatcctccggcgggatccatatcgtacaaatcctcaatattctggaaaacttcgatatgaagaaatacggttttggcagcgccgacgcgatgcagatcatggcagaagcggagaaatatgcctacgctgaccgctcggaatatcttggcgacccggattttgtgaaagtcccgtggcaggcgctgaccaataaagcctatgccaaatctattgccgagcaaatcgatatcaataaagcgaaaccgtccagcgagattcgccccggcaagcttgcgccttatgagagtaatcaaactacccattattcggtggtggataaagacggtaacgcggtggcggtgacctatacgctgaacaccaccttcggtacgggtattgtcgcgggcgagagcggtattttgctcaataaccaaatggatgatttctctgccaaaccgggcgtaccgaacgtttacgggctggtgggcggtgatgccaacgccgtcgggccgaacaaacgcccgctgtcatcgatgtcaccaaccattgtggtgaaagacggtaaaacctggctggtcaccggtagccctggcgggagcctgatcatcactacagtgcttcaaatggtggtgaatagcatcgattatggcatgaacgtcgccgaagcgaccaatgcgccgcgtttccaccatcagtggttgccggacgagctgcgtgtcgaaaaagggtttagcccggatacgctcaagctgctggaagcaaaaggtcagaaagtggcgctgaaagaggcgatgggcagtacacaaagcattatggttgggccggacggtgagttgtacggcgcatccgacccgcgctcggtggatgatttaacggcggggtactaa

SEQ ID NO: 58071 - protein, 581 aa, Escherichia coli O157:H7 EDL933
MIKPTFLRRVAIAALFTGSCFSTVAAPPAPSPVSYGVEEDVFHPVRAKQGMVASVDATATQVGVDILKEGGNAVDAAVAVGYALAVTHPQAGNLGGGGFMLIRSKNGNTTAIDFREMAPAKATRDMFLDDQGNPDSKKSLTSHLASGTPGTVAGFSLALDKYGTMPLNKVVQPAFKLARDGFIVNDELADDLKTYGSEVLPNHENSKAIFWKEGEPLKKGDKLVQANLAKSLEMIAENGPDEFYKGTIAEQIAQEMQKNGGLITKEDLAAYKAVERTPISGDYRGYQVYSMPPPSSGGIHIVQILNILENFDMKKYGFGSADAMQIMAEAEKYAYADRSEYLGDPDFVKVPWQALTNKAYAKSIAEQIDINKAKPSSEIRPGKLAPYESNQTTHYSVVDKDGNAVAVTYTLNTTFGTGIVAGESGILLNNQMDDFSAKPGVPNVYGLVGGDANAVGPNKRPLSSMSPTIVVKDGKTWLVTGSPGGSLIITTVLQMVVNSIDYGMNVAEATNAPRFHHQWLPDELRVEKGFSPDTLKLLEAKGQKVALKEAMGSTQSIMVGPDGELYGASDPRSVDDLTAGY

SEQ ID NO: 58072 - DNA, 1932 bp, Mycobacterium tuberculosis CDC1551
  CDS (1)..(1932): transl_table=11
atgagtgtttggttgcgagcgggcgccttggtggctgcagtgatgctgtcgctgagcggatgtggcggcttccacgcgggtgcgccaagcacggccggtccgtgcgagatcgtccccaatggcacgccggcgcccaagacacccccggctaccgtgccttcgtcgcgcaacctcgcgaccaaccccgagatcgccaccggctaccgccgggacatgaccgtggtgcggaccgcccactatgcggcagccaccgccaatccgctggccactcaggtggcctgccgagtattgcgcgacggtggtaccgccgccgatgccgtcgtggccgcccaggcggtgctggggttggtcgaaccgcaatcctccgggatcggcggcggcggatatctggtgtacttcgacgcccgcacgggctcagtgcaggcctacgacggccgtgaggtggccccagcggccgccaccgagaactaccttcgctgggtcagcgacgtcgaccgcagcgcgcccaggcccaacgcccgagcctcgggacggtcgatcggagtaccgggcatcctgcgaatgctggagatggtgcacaacgagcacgggcgcacaccctggcgcgacctcttcggccccgcggtaacgctggccgatggcggttttgacatcagcgccaggatgggcgcggccatctccgacgctgcgccgcaactgcgagacgacccggaggctcgcaagtatttcctcaatcccgacggcagcccgaaacccgcgggaacccggctgacgaaccccgcgtactcaaaaaccctgtccgccatcgcctccgccggcgccaacgccttctattccggcgacattgcccacgacatcgtggcggcggcgagcgacacatcgaatggccgcacgccgggcctgttgaccattgaggacctggcgggttacctcgccaagagacgccaaccgttgtgcacgacctatcgcggccgggagatctgcggcatgccatcgtcgggtggcgtcgccgtggccgcaaccttgggcatcctcgagcacttcccgatgagcgactacgcgcccagcaaggtcgacctcaacggcggtcgcccgaccgtgatgggggttcacctgatagcggaggccgaacggctggcctatgccgaccgcgaccaatatatcgctgacgtcgattttgtccggctgcccggcggctcgctcaccacgctggttgacccgggctacttggcagcacgcgccgcgctaatctcgccgcaacacagcatgggcagcgccagaccgggggacttcggcgcaccgacggccgtcgccccgccagtgcctgagcatggcaccagccacctcagcgtcgtcgattcgtacggcaatgcggccacgttgacgacgacggtggaatcttcgttcggctcctaccacctggtggacggattcatcctcaacaaccagctgagcgatttcagcgccgagccacacgctactgacggatcaccggtggctaaccgggtcgagcctgggaagcgaccgcgcagttcgatggcaccgacgttggtgttcgatcactcgtcggcggggcgcggtgcgctgtacgcggtgctcggttctccgggcggctccatgatcatccagttcgtcgtgaaaacacttgtggcgatgctggattggggtctgaatccgcagcaggcggtttccctggtcgatttcggcgccgcgaactcgccgcacactaacctcggcggtgagaatcccgagatcaacacttccgacgatggtgatcatgacccgctggtgcaaggcctgcgcgcgctggggcatcgagttaatcttgccgagcaatccagtgggctctcggcgatcacccgcagcgaggcgggttgggccggcggcgccgacccacgccgcgaaggcgcggtcatgggcgacgatgcctga

SEQ ID NO: 58073 - protein, 643 aa, Mycobacterium tuberculosis CDC1551
MSVWLRAGALVAAVMLSLSGCGGFHAGAPSTAGPCEIVPNGTPAPKTPPATVPSSRNLATNPEIATGYRRDMTVVRTAHYAAATANPLATQVACRVLRDGGTAADAVVAAQAVLGLVEPQSSGIGGGGYLVYFDARTGSVQAYDGREVAPAAATENYLRWVSDVDRSAPRPNARASGRSIGVPGILRMLEMVHNEHGRTPWRDLFGPAVTLADGGFDISARMGAAISDAAPQLRDDPEARKYFLNPDGSPKPAGTRLTNPAYSKTLSAIASAGANAFYSGDIAHDIVAAASDTSNGRTPGLLTIEDLAGYLAKRRQPLCTTYRGREICGMPSSGGVAVAATLGILEHFPMSDYAPSKVDLNGGRPTVMGVHLIAEAERLAYADRDQYIADVDFVRLPGGSLTTLVDPGYLAARAALISPQHSMGSARPGDFGAPTAVAPPVPEHGTSHLSVVDSYGNAATLTTTVESSFGSYHLVDGFILNNQLSDFSAEPHATDGSPVANRVEPGKRPRSSMAPTLVFDHSSAGRGALYAVLGSPGGSMIIQFVVKTLVAMLDWGLNPQQAVSLVDFGAANSPHTNLGGENPEINTSDDGDHDPLVQGLRALGHRVNLAEQSSGLSAITRSEAGWAGGADPRREGAVMGDDA

SEQ ID NO: 58074 - DNA, 1740 bp, Drosophila melanogaster
  CDS (1)..(1740)
atgaggattgtgtggagtaagaagctcttgctatggctactgctggctgccctcatggtgacggcgttgactctgggcttggtcttcggtctgaagaatcgggacacgctgtacatcagcggagccgtggtgtccaatggcatcggatgtgctgcggtcggcggtgaaatgctgaccgatggcggttccgccgtggatgcagccattgctacgctgctgtgcgagggcctgctattgccgcactcaatgggcattggcggtggcttcgtggccaccatatatacgcgaagtagccgcaaggtggagacggtgattgccagggaatcggcaccggcggccgcgcacaaggacatgttcgtgggcgagacgtcgattacgggcgccaaatcgggtgcggtgcccggcgagattcttggctactgggagatgcatcgtcgctatggcatcctgccctggaaacgcctcttcgagccgtccattaagctggcccgcgagggtcatgttgtttcgcgctatctggccgccgccatccaatccaagctggataacattaaggcagatcccgggctctcggccgtgttcctcaacgcaaccggtgatccccacttggagggcgattacatgaagcgtcccgcgctggccgacacgctggagcggattgccgagaatggagccaaggagttctacgatggcggcgagacgggtcgcaagttcgtcgaggatatccagaagatgggcggcatcattacggagcaggacctgcgcgattacacggtgcgctgggagagcgatggacacgtgtcggcccatgtgagtggcacgtacacgctctattccacgcccatgcccagcagcggacccgttctggccttcatcctcaacctgatggccgatctctatacggacaatgagccgatctattggcagcgcgtggtggaggcctttaaacacgcctatggccagcgcaccaatctgggtgatatgtatgccgatcccgtgagcgccgcgtccatcaatgccaccctggaggagatgctcaagccggagttcctggagagcgtaaggaagctgatccacgacaatagcacttcggaggactacctctactatggcgccaacttcaccgtggaggaggaccatggcaccgcccacatgaatgtcttggccaccaatggagacgccgtgtccatcaccagtaccatcaataactatttcggctccaaggtggcttccacccagacgggaatcattctgaacgacgagatggacgacttctccacgccgggcgtgatcaatggcttcggtgtgcccgcctcgccggccaactacatttatcccggcaagcgtcccatgtcctcgatgagtccgtgcattattgttgaccaggaaggcaatgtacgtttgctggtcggagcagcaggtggcactcgcatcaccaccagcgtggcagctgtgatcatgaagtacctgctacgcaaggagagcctcaccgcggccgtgaacaatggccgcctccatcatcagttggctcccatgcgcgtgagctatgagcaggaggtggacagcagcgttaccgactacctgaagcaggtgggccacgagatgtacgaggagcccgtcggctccagctttgcagcagtgaccgccattggggcgctggagcagccggagccattctatgatcgccgtcgcatcggcagcgccctcactctggccaaaaccaacaagatgcagcattag

SEQ ID NO: 58075 - protein, 579 aa, Drosophila melanogaster
MRIVWSKKLLLWLLLAALMVTALTLGLVFGLKNRDTLYISGAVVSNGIGCAAVGGEMLTDGGSAVDAAIATLLCEGLLLPHSMGIGGGFVATIYTRSSRKVETVIARESAPAAAHKDMFVGETSITGAKSGAVPGEILGYWEMHRRYGILPWKRLFEPSIKLAREGHVVSRYLAAAIQSKLDNIKADPGLSAVFLNATGDPHLEGDYMKRPALADTLERIAENGAKEFYDGGETGRKFVEDIQKMGGIITEQDLRDYTVRWESDGHVSAHVSGTYTLYSTPMPSSGPVLAFILNLMADLYTDNEPIYWQRVVEAFKHAYGQRTNLGDMYADPVSAASINATLEEMLKPEFLESVRKLIHDNSTSEDYLYYGANFTVEEDHGTAHMNVLATNGDAVSITSTINNYFGSKVASTQTGIILNDEMDDFSTPGVINGFGVPASPANYIYPGKRPMSSMSPCIIVDQEGNVRLLVGAAGGTRITTSVAAVIMKYLLRKESLTAAVNNGRLHHQLAPMRVSYEQEVDSSVTDYLKQVGHEMYEEPVGSSFAAVTAIGALEQPEPFYDRRRIGSALTLAKTNKMQH

SEQ ID NO: 58076 - DNA, 1812 bp, Streptomyces coelicolor A3(2)
  CDS (1)..(1812): transl_table=11
atgcgtcgccctgtcgcacggaatctgacggtcctggcggtctcggccgccgtggtggtgtcggtgggagcggccgcgccgcccacggcccggcaccaccggcccgctccgaagaccccggtcgccgtcgggtacgggggcgcggtctccagcgtcgaccgggacgcgtccgccgccggtgtcgaggtgctccgcaagggcggcaacgccgtcgacgcggccgtggccaccgccgcggcgctgggcgtcaccgagccctactccgccggggtcgggggcggcggctacttcgtctactacgacgccgagtcccgcaccgtgcgcaccatcgacggccgcgagaccgcgccgctgaccgccgacgagaagctcttcacggaggacggcaagccgctcgccttcgccgacgccgtcaccagcggcctgtccgtgggcacgccgggcaccccggccacctggcagaccgccctggaccggtggggcagccgcaagctcgcctcggtcctgaagcccgccgagcggctggcccggcacggcttcaccgtcgacgagaccttccgctcccagaccgccgccaacgagcagcggttccgctacttcccggacaccgccgagctgttcctgcccggcggtgaactcccggccgtcggctccacgttcaagaacccggacctggcccgcacgtaccaggagctgggccgcgagggcgtcggcgcgatctaccgcggcgcgctcggcgaggacatcgtcgacaccgtcaacaagccgcccgtcgacccggactcgggctggaacgcgcgtcccggcgacctgtccgccaaggacctcgcggcctacgaggccaagctccaggcgccgacgaggacctcgtaccgcggcctgaacgtgtactccatcgccccctcctcctccggcggcaccacggtcggcgaggccctcaacatcctggagcgcaccgacctgtccaccgcggacaaggccggttacctgcaccgctacatcgaggccagccgcatcgcgttcgcggaccgcgggcgctgggtcggcgaccccgccttcgaggacgtaccggcgaaggagctgctgtcccagcggcacgccgactcccgtgcgtgcctgatcaaggacgacgcggtgctcaccagccccctcgcccccggcgacccgcggcacccggccccctgcgcgggcggcgggacggcggcgccgacgacgtacgagggcgagaacaccacgcacctcacggtggccgacaagtggggcaacgtcgtcgcctacacgctcaccatcgagcagaccggcggcagcggcatcaccgtgccggggcgcggcttcctgctcaacaacgagctgacggacttctccttcgccccggccaacccggccgtgcacgacccgaacctgcccggacccggcaagcgcccccgttcctcgatcgccccgacgatcgtgctggaccggcaccacgagccggtggtggccctcggctcgcccggcggcgccaccatcatcaccaccgtgctccagaccctcaccggcttcctcgaccgcggactcccgctcgtcgacgccatcgccgcgccgcgcgccagccagcgcaacgccgcgcagaccgaactcgaacccggcctctacgacagcggcgtacgggccgaactggaggccctcgggcactccttcaagctcaaccccgagatcggcgccgcgaccgccgtgcagcggctgccgcacggcaagtggctggccgccgcggagaaggtgcggcgcggcggcggctcggcgatggtggtcgaaccggtgcggcggaggtag

SEQ ID NO: 58077 - protein, 603 aa, Streptomyces coelicolor A3(2)
MRRPVARNLTVLAVSAAVVVSVGAAAPPTARHHRPAPKTPVAVGYGGAVSSVDRDASAAGVEVLRKGGNAVDAAVATAAALGVTEPYSAGVGGGGYFVYYDAESRTVRTIDGRETAPLTADEKLFTEDGKPLAFADAVTSGLSVGTPGTPATWQTALDRWGSRKLASVLKPAERLARHGFTVDETFRSQTAANEQRFRYFPDTAELFLPGGELPAVGSTFKNPDLARTYQELGREGVGAIYRGALGEDIVDTVNKPPVDPDSGWNARPGDLSAKDLAAYEAKLQAPTRTSYRGLNVYSIAPSSSGGTTVGEALNILERTDLSTADKAGYLHRYIEASRIAFADRGRWVGDPAFEDVPAKELLSQRHADSRACLIKDDAVLTSPLAPGDPRHPAPCAGGGTAAPTTYEGENTTHLTVADKWGNVVAYTLTIEQTGGSGITVPGRGFLLNNELTDFSFAPANPAVHDPNLPGPGKRPRSSIAPTIVLDRHHEPVVALGSPGGATIITTVLQTLTGFLDRGLPLVDAIAAPRASQRNAAQTELEPGLYDSGVRAELEALGHSFKLNPEIGAATAVQRLPHGKWLAAAEKVRRGGGSAMVVEPVRRR

SEQ ID NO: 58078 - DNA, 1782 bp, Xanthomonas campestris pv. campestris str. ATCC 33913
  CDS (1)..(1782): transl_table=11
atgatcacttccccccgacgcttgttcccgagtggcctgttgttgctggccttcgtggtcgccccagccgcgtggtcggcccagcccgacgccgcagcggccacgccgccgcccgccggcaccgccacgcatccgccgggtgcggcggtggccagtggccatgcgctggccaccgatgccgggctgcagatcctgcgcgaaggcggcaatgccttcgatgcggcgatcgcggtgtcgtccacgctggcggtggtcgagccaatcagctcggggctgggcggcggcgggttcttcctgttgcacgacgccaagaccggcaaggacgtgatgctggacgcgcgcgagtacgcgccggagtccgccacttccgcacagtttttggacaagaacggcgggctggaccgcgaccgctcggtcaacggcccgtggtcggccggcatccccggtttgccagcggcgcttgtggaactggcggccaagcacggccggctgccgctcacccaatcgctggcaccggcgatccgcatcgctaccgagggcttcccggtgtatgcgcgcatggccaagggctacgcctcgcggcgcgaagtgatggagcgctaccccggcacgcgcgaggtttacttgcgcggcggaaaacccattgccgaaggcgacatcttcaagcagcccgagctcgcgcacaccctgacgctgctgggcgagaagggctttgacggtttctacaagggcgagaccgccaagaaactgctggccggcgtcaagcaggccggtgggcgctggaccgctgccgaactggccgggtatcaggtcaaggagcgcacgccgatccagttcgattaccgcggctggaaggtcaccaccgcgccgccgccttcttccggtggtattgcactcgcggcgatgctgcagatcctggaaggctgggacttgaacacgctcgacgacgcgcaccgcactcatttggtggtggaagcgatgcgccgcgcctaccgtgaccgcacctttttcctgggcgacccggactttgtcgacgtaccgcagcgcgtgctgaccagcaaggattacgcgcagggcctgcgtgccaccatcaatccggacaaggccacgccgagcaacctgctgtcgggcaacccgacgccgctggaagacgacgagaccacgcacttttccatcatcgatggcgaaggcaaccgcgtgggcgccacccagacggtgaacctgctgtacggctccgggctgatccccaagggcactggcgtgctgctcaacgacgagatggatgactttgcgctcaagcccggcaccccgaacgcgtttggcgtgatgggctatgccgccaacgcgcccaagccgggcaagcgcatgctcagctcgatgacgcccaccttcatggagtcggccgacaaggtcgccgtgctcggcaccccgggcggcagccgcatcatcaccatggtgctgctcggcatcctggggtacgacgccggactggacgcgcagcaggtcagtgccttgccgcggtatcaccaccagtggttgccggacgtcatcgaggccgagagcaatgcgttctcgccgcaaaccgccaaggcgctggaagcaatgggccacgcgctcaagttgccgggcgacaccgctgagggcggccgcggttccagccacgtctggggtaatttccagaccgtggaatgggacaagcgccgcaatgtgctcagcggtggtagtgacccgcgcaatccggtgggcaaggccgcagtgcagctggcaacgccggcacggtga

SEQ ID NO: 58079 - protein, 593 aa, Xanthomonas campestris pv. campestris str. ATCC 33913
MITSPRRLFPSGLLLLAFVVAPAAWSAQPDAAAATPPPAGTATHPPGAAVASGHALATDAGLQILREGGNAFDAAIAVSSTLAVVEPISSGLGGGGFFLLHDAKTGKDVMLDAREYAPESATSAQFLDKNGGLDRDRSVNGPWSAGIPGLPAALVELAAKHGRLPLTQSLAPAIRIATEGFPVYARMAKGYASRREVMERYPGTREVYLRGGKPIAEGDIFKQPELAHTLTLLGEKGFDGFYKGETAKKLLAGVKQAGGRWTAAELAGYQVKERTPIQFDYRGWKVTTAPPPSSGGIALAAMLQILEGWDLNTLDDAHRTHLVVEAMRRAYRDRTFFLGDPDFVDVPQRVLTSKDYAQGLRATINPDKATPSNLLSGNPTPLEDDETTHFSIIDGEGNRVGATQTVNLLYGSGLIPKGTGVLLNDEMDDFALKPGTPNAFGVMGYAANAPKPGKRMLSSMTPTFMESADKVAVLGTPGGSRIITMVLLGILGYDAGLDAQQVSALPRYHHQWLPDVIEAESNAFSPQTAKALEAMGHALKLPGDTAEGGRGSSHVWGNFQTVEWDKRRNVLSGGSDPRNPVGKAAVQLATPAR

SEQ ID NO: 58080 - DNA, 1614 bp, Oceanobacillus iheyensis HTE831
  CDS (1)..(1614): transl_table=11
atgaatttttttcataccgaaacatatccttatacaaatccaaggcatgcaacctatgcaaaaaatggaatggtggcaacatcgcagccacttgcatcagaagccggactgtcgattctaaaaaaaggtggtaatgcgattgacgctgcaattgctacagcggcatgtttaacagttgtcgaaccgacttcgaatgggattggcggtgacgcttttgcgttagtatggacaaaaggtaaactgcatggacttaatgcaagtggccgttcaccgcaatccatctccattgacaaagtgaaagaaacaggaaaggatcacatcccaaaatatggttggattccagttacggtacctggagcaccaagtgcttgggcagcattatccaagaggtttggcaagctatcgttacaagaagtattgcaaccagcgattaattacgcacgagacgggtatcctttgtcaccaacgttaagtaagttttggaaaaaggcatatacggtttttaaaaaggaattatcggatgatatgtttcatgaatggtttgagacctttgctccaaacggtcgtgctccagaaacaggagagatgtggcgctcgcctaatcatgcaaacacactacaagaaattgccgatacagacggggaatcattttaccgtggagaattggcggcgaaaataagtgcattctctgaagcgaatgacggatttttaacagcagaggacctggcagctcatcaaccagagtgggtggacccgattaaagtaaattaccgtggctatgatgtgtgggaaataccgccaaacggacaagggatcatcgctttacaagcattaaatatcttaaaaggatatacatttgatacgaaagaagtaactgacacgtatcataagcaaatggaagcaattaaacttgcttttgctgatgggcaggaacatgtgacagaaaaagatcatatgaagcattcggtggaagaattattgagtgattcctatggagagtatcgaagaggtctgattggagatgaagcgattcaaccaaaagcaggcgaaccagcgctaagcggtaccgtatatttagcaacggcagacaatgaggggaatatggtttcctttattcaaagtaattatatgggatttggttctggccttgtggttcctggcacgggaattgctctgcaaaatcgcgggcataatttttcgatggatccgaatcatgtcaatgcattagctggaaataagcgaacatatcatacgattattcctggatttttaacaaaagacgcagaaccaatcggtccttttggcgtgatgggaggatttatgcagcctcaaggtcatgtacaagtaattatgaataccattgattttcagttaaatccgcaagcagctttagatgcaccaaggtggcaatggatgaaagacaaacaagtcgaagtggaaaacactttcccgcaccacatcgcaatggatttagcgaagaaaggtcacaacatacgtattcaattagaaccgaacagttttgggcgcgggcagatcatttggagaaatcccgaaacaggcgtactggttggcggcacggaatcccgtacagatggtacggtagccgcttggtaa

SEQ ID NO: 58081 - protein, 537 aa, Oceanobacillus iheyensis HTE831
MNFFHTETYPYTNPRHATYAKNGMVATSQPLASEAGLSILKKGGNAIDAAIATAACLTVVEPTSNGIGGDAFALVWTKGKLHGLNASGRSPQSISIDKVKETGKDHIPKYGWIPVTVPGAPSAWAALSKRFGKLSLQEVLQPAINYARDGYPLSPTLSKFWKKAYTVFKKELSDDMFHEWFETFAPNGRAPETGEMWRSPNHANTLQEIADTDGESFYRGELAAKISAFSEANDGFLTAEDLAAHQPEWVDPIKVNYRGYDVWEIPPNGQGIIALQALNILKGYTFDTKEVTDTYHKQMEAIKLAFADGQEHVTEKDHMKHSVEELLSDSYGEYRRGLIGDEAIQPKAGEPALSGTVYLATADNEGNMVSFIQSNYMGFGSGLVVPGTGIALQNRGHNFSMDPNHVNALAGNKRTYHTIIPGFLTKDAEPIGPFGVMGGFMQPQGHVQVIMNTIDFQLNPQAALDAPRWQWMKDKQVEVENTFPHHIAMDLAKKGHNIRIQLEPNSFGRGQIIWRNPETGVLVGGTESRTDGTVAAW

SEQ ID NO: 58082 - DNA, 2064 bp, Corynebacterium efficiens YS-314
  CDS (1)..(2064): transl_table=11
atgaatgtgatacggaacacaccacataggattgtggctgcgttgtccgcagccaccctggcactcacactgagctcctgtgtcaacgaggatggctccagcgccgtcaccgaagcagctgacaccacccaaacccaggacaccgcgacctctgtgaccaccggcgacacctccgccaccacgtccgcggagacctccatagcaaccgtcaccgaaaccacaaccggaagcgctcccccgcccatggaaccctgcgaactgcccgaggatgccaaccgggaggaggggacggacggcacccattccggtgaggacatctcggtcgccccggagatctccaccggttaccggtccggcatggaaccggtcaccacccgcaactacgcggtctccaccgccaacccccacgcatcacgggccgcgtgtgagatcctgcgcgagggcggaacagctgcggatgccctggtcaccgcccagttcgtcctcgggctcaccgaaccccagtcctccggtatcggtggtggcggctacatcctctactatgacgccggcacccaccaggtcaccgccatcgacggccgcgaaaccgcaccggtggccgccgatgagaactacctgatccgggtatcagccgaggacgagtccgcgcccgtcccggatgcccgtcgttccggccgctccatcggtgtgccgggtatcgtcgccgccctcggacacctccacgagtcgcagggacgcaccgagtggtcagggctgctggaggaggcccagacgctggccaccgacggcttcgagatcagcccccgcatgtccgcctccatcgccaactccgcggaggatctcgcgcgtgatcccgaggctgcggcctacttcctcgacgcggacggcgaggccaagtccccgggcacgctgctgcgtaaccctgagtacgccgacaccctgcgcctgatcgccgaggggggccccgatgccttctacaccggcgacatcgccgccgacatcgtcgaacgtgccacccgggaggttgagggtgtcaccccgtcgctgctgagcaccgctgatctggccgcctacacccccgtgacccacgacgcgctgtgcgccccctaccgggaccgggtggtgtgtggcatgccgccgtcctcctccggtggctccacggtgctgggcacactcggcatcctcaaccacttcgacctgggacagtacgcgcccaccggcgccggccccgacggtggactccccgaccccgaggccgtccacatcatcgccgaggcccagcgcctggcctacgccgaccgcaacgcctacatcgccgaccccgccttcgtggacgtgccgggtggcggcgtcgaggagctgatcagccgggagtacacgcagcggcgtgccgagcttatcgacgaaaagacctccatgggcacagccgaggccggtctggatgatgtccccgtcggggccccggtccccgagagcggcaccagccatgtctccatcatcgactcctacggcaatgccgcctccctgaccaccagtgtcgaggccgccttcgggtccttccacttcacccgcggtttcatcctcaacaaccagctgacggacttctccgccgaaccggtggatgagaacggtgaaccggtggccaaccgcgtggaatcagcgaaacgaccacgttcctccatggcccccaccctggtcttcgccaccggcgacaatggtgacatcggtgaactcgagatggtcctcggctcccccggcggcgccctgatcatccagtatgtggtgaagaccctggtcaacatcatcgactggggcatgaacccccagcaggctgtctccgcaccgaacttcggtgccatgaaccagcccgccaccggcatcggcattgaacacccgctcatggctgaacacgaagccgagttgatcgacgccctggaggacctgggtcacgaggtcaacccgaccgaacaatccagtggtctgtccgccctgatgcgcggaacgggcaactccatcatcggtggcgccgacccccgccgcgagggggtggtgttgggcggctga

SEQ ID NO: 58083 - protein, 687 aa, Corynebacterium efficiens YS-314
MNVIRNTPHRIVAALSAATLALTLSSCVNEDGSSAVTEAADTTQTQDTATSVTTGDTSATTSAETSIATVTETTTGSAPPPMEPCELPEDANREEGTDGTHSGEDISVAPEISTGYRSGMEPVTTRNYAVSTANPHASRAACEILREGGTAADALVTAQFVLGLTEPQSSGIGGGGYILYYDAGTHQVTAIDGRETAPVAADENYLIRVSAEDESAPVPDARRSGRSIGVPGIVAALGHLHESQGRTEWSGLLEEAQTLATDGFEISPRMSASIANSAEDLARDPEAAAYFLDADGEAKSPGTLLRNPEYADTLRLIAEGGPDAFYTGDIAADIVERATREVEGVTPSLLSTADLAAYTPVTHDALCAPYRDRVVCGMPPSSSGGSTVLGTLGILNHFDLGQYAPTGAGPDGGLPDPEAVHIIAEAQRLAYADRNAYIADPAFVDVPGGGVEELISREYTQRRAELIDEKTSMGTAEAGLDDVPVGAPVPESGTSHVSIIDSYGNAASLTTSVEAAFGSFHFTRGFILNNQLTDFSAEPVDENGEPVANRVESAKRPRSSMAPTLVFATGDNGDIGELEMVLGSPGGALIIQYVVKTLVNIIDWGMNPQQAVSAPNFGAMNQPATGIGIEHPLMAEHEAELIDALEDLGHEVNPTEQSSGLSALMRGTGNSIIGGADPRREGVVLGG

SEQ ID NO: 58084 - DNA, 1791 bp, Pseudomonas putida KT2440
  CDS (1)..(1791): transl_table=11
atgaagttctctatcccactgatcagaacgctgtgcctaatggccatcagcggctcggtcggtgccgaccaggtattgcccacgccaccggaactggcctccggctaccgcagcggtttgcagccggtgcacgccagccggcacatggtcgccgcagccaacccgctggccagtgaagcggggcgggcgatgttgcgtgccggcggcagtgcgattgacgccgccatcgccatgcagatggtgctgacactggtcgagccacagtccagtgggatcggcggcggggcgttcatcctgtactgggatggcaagcgcgtgcaggcattcgacgggcgtgaggcagcacctgcggcggtgacggaaaagctgttcctgcaagccgatggcacacccatgccgttccgggtggcgcagatcggtgggcggtcggtgggcgtgcccggggtgctgcgtgccctgaagcaggcccacgagcagcacggcaagttgccctggcacgccctgttcgccccggccatcgccttggcacgcaacggcttcgcggtttccgagcgcctgcacacactactggccggggacccctacattgcccgctcacccgcaatggcccgttacttcctggatgaacagggcaggccgctggccgtgggtacaatcctgcgcaaccctgagttggcacagaccttggagcagatcgccgcacaggggcccgaggtgttctacagcggtgaaattgccgaagccattgtcgccaaggtgcgtggccatgccaatgccgggtatctgtcgttgcaggacttgcagcagtaccaggccaaggagcgcgagccgttgtgcggcccctacaaggcctggcagatctgcggcatgccgccaccttcatcgggtggggtgaccgtgctacagaccttgggcctgctcgacgccgtgcagcgcaccgcgccgcaacgcgacctggcagcgctgcgaccgctggccacctcgtccccggcccgcctggaagccccgccgttggccgtgcacctgatcgccgaggccgagcgcctggcctacgccgatcgcgctcagtacctggccgacaacgactacgtgcccgtcccggtcaaggccctgaccgattctgcttacctggccagccgcgcggcgctgatcggcgagcacagcatgaagcgcgcccgtccgggccagccgcaaggagcggacctggcgcttgcgcccgaccgctcgccactgcgcatctccacctctcacctcagtgcggtggatgacaacggccaggccctggccatgaccacctcggtggaggccgcatttggctcgcacctgatggtcaagggcttcctgctcaacaatcagctgaccgacttctcgttcatcccccacgagcacggcaagcctgtggccaatcgggtgcagccgggcaaacggccgctgtcggccatggcgccgacgttggtgttctcgcgtgccacgggcgagtttgtcgcgagcctcggttcgccgggtggttcgcagatcatcggttacgtgaacaaggcactggtcggcctgctggattggcggctcgacccgcagcaggccgccgacctgcccaacttcggcagccgcaatgccggcaccgaagtggaagcagggctgagcagcccggcgctgatccgccagttggcagcctggggccatgaggtgacaccgatgaccatgaccagcggcatgcagatcatccagcgcagcggcgagggttggtcaggcggtgccgatccccggcgggaaggagtggccctcggtgactag

SEQ ID NO: 58085 - protein, 596 aa, Pseudomonas putida KT2440
MKFSIPLIRTLCLMAISGSVGADQVLPTPPELASGYRSGLQPVHASRHMVAAANPLASEAGRAMLRAGGSAIDAAIAMQMVLTLVEPQSSGIGGGAFILYWDGKRVQAFDGREAAPAAVTEKLFLQADGTPMPFRVAQIGGRSVGVPGVLRALKQAHEQHGKLPWHALFAPAIALARNGFAVSERLHTLLAGDPYIARSPAMARYFLDEQGRPLAVGTILRNPELAQTLEQIAAQGPEVFYSGEIAEAIVAKVRGHANAGYLSLQDLQQYQAKEREPLCGPYKAWQICGMPPPSSGGVTVLQTLGLLDAVQRTAPQRDLAALRPLATSSPARLEAPPLAVHLIAEAERLAYADRAQYLADNDYVPVPVKALTDSAYLASRAALIGEHSMKRARPGQPQGADLALAPDRSPLRISTSHLSAVDDNGQALAMTTSVEAAFGSHLMVKGFLLNNQLTDFSFIPHEHGKPVANRVQPGKRPLSAMAPTLVFSRATGEFVASLGSPGGSQIIGYVNKALVGLLDWRLDPQQAADLPNFGSRNAGTEVEAGLSSPALIRQLAAWGHEVTPMTMTSGMQIIQRSGEGWSGGADPRREGVALGD

SEQ ID NO: 58086 - DNA, 1668 bp, Pseudomonas putida KT2440
  CDS (1)..(1668): transl_table=11
atgcgtattgtcccgttccagtacctggctctcgcagccgcgatcctgagctgttcctcggtttacgccgccaccctggagggcggcgcggtggccgcccccgatcaatatggtgcacaggtggccgccgatattctgaaaaagggcggcaacgcggtggacgcggcagttgcgaccgccttcaccctggcggtgacgtacccagaggccggtaatatcggcggtggcggcttcatgaccctgttcgtcgatggcaagccttacttcctcgactaccgcgaagtcgcgcccaaggccgccacgcgcaacatgtacctggacgacaagggcgaggtcatcgagaacctcagcctggtcggggcacgcgccgcaggcgtacccggtacggtaatgggcctgtgggaggcgcaccagaagttcggcaagctgccctggagcgagttgctgaccccggccatcggctatgcgaaaaacggcttcaaggtggcggaaaagcagtaccagtaccgcaacgatgcccaaggcatgttcaagacggcgaccaacttcaacgattactttggcaacatgaaggtcggcgagctgttcaagcagccggaaatggcccagaccctggagcgtatagccgacaagggcgtgagcgagttctatcaaggcaagaccgccgatttgctggtggcgcagatgcaggctgacaaaggcctgattaccaaagaagacctgaaggattacaaggcggtatggcgtgaaccgatggccgtgagctggcgtggcaatgtggtgtataccgcgccaccgccgagctcgggcggtgtggcgctggcccagttgctgggcatcaaggaagaccgcgcggccgacttcaaaggggtggcgcataactcggcgcagtacatccacctgttggccgagatcgaaaagcgggtgttcgccgaccgcgccgattacctgggcgacccggccttcaccaaggtgccggtggaccagctggtggccaaggattacctggccaagcgcgcagcccaggtcaacccgaaggccatttccgacaccgacaaggtcaagccgggccttgaaccgcaccagaccacgcatttctcgatcgtcgacaagcagggcaacgcggtcagcaatacctacaccctcaacctcgactacggcagtggcgtcgtggtgaagggtgccggtttcctgctcaacgacgagatggatgacttcagcgccaagccgggggcggcgaacgcctttggcgtggtcggcggtgatgccaacgcgatcgaaccgggcaagcgcatgctgtcgtcgatgagccccagcctgatgacccgcgatggcaaggtcgagctggtaatcggtaccccgggtggttcacggatctttacctcgatcttccaggtgatgaacaacctgtacgactacggcatgccgctggacaaggcggtggcggcgcagcgcgtgcaccatcagttgctgcccaaggacaccatttacttcgacagctatgcgccactgaccgggccggtagctgatgagctgaagaagatgggctatgtgctggaggaccagggctgggagatgggcgacatccaggcgatccgcgtcgatggggcgaagcttgagactgcttccgacccacgtgggcgtggggtagggatgatcgtcaagtag

SEQ ID NO: 58087 - protein, 555 aa, Pseudomonas putida KT2440
MRIVPFQYLALAAAILSCSSVYAATLEGGAVAAPDQYGAQVAADILKKGGNAVDAAVATAFTLAVTYPEAGNIGGGGFMTLFVDGKPYFLDYREVAPKAATRNMYLDDKGEVIENLSLVGARAAGVPGTVMGLWEAHQKFGKLPWSELLTPAIGYAKNGFKVAEKQYQYRNDAQGMFKTATNFNDYFGNMKVGELFKQPEMAQTLERIADKGVSEFYQGKTADLLVAQMQADKGLITKEDLKDYKAVWREPMAVSWRGNVVYTAPPPSSGGVALAQLLGIKEDRAADFKGVAHNSAQYIHLLAEIEKRVFADRADYLGDPAFTKVPVDQLVAKDYLAKRAAQVNPKAISDTDKVKPGLEPHQTTHFSIVDKQGNAVSNTYTLNLDYGSGVVVKGAGFLLNDEMDDFSAKPGAANAFGVVGGDANAIEPGKRMLSSMSPSLMTRDGKVELVIGTPGGSRIFTSIFQVMNNLYDYGMPLDKAVAAQRVHHQLLPKDTIYFDSYAPLTGPVADELKKMGYVLEDQGWEMGDIQAIRVDGAKLETASDPRGRGVGMIVK

SEQ ID NO: 58088 - DNA, 1752 bp, Bradyrhizobium japonicum USDA 110
  CDS (1)..(1752): transl_table=11
atgccgatggccgcgtgtatatgcgatatcatcaaaacaagattcccgaagaactcggaaaggtcttttcccggcggcacgtcgagggcgcctgctggttggacgatttgcccgaaggctgagatcgaaatgcgcgcgatgctgatgcccaacttggagcgcgtggagctcgacggccctgccgcttccgtagggcagcgccacgaggctgtggtgacggctttcccgaacgctaccgaagccggggtggaaatcctgcgcgccggcggaaacgcgatcgacgccgctgtggccgccgcctgggcgctttgcgtgtgcgaacccagtgcatcgggtctgggcgggcagaccgtgttgctcgtccgttttgcggatgatcgaattcggatcatcgacggacattcccgtgcgcccgcagccgcttcgctcgacacgatcaaagcgggccagcagcggcgcgggtatcgctcctgcacgattccatcgactcccgcgacgctggactgggcgcacaggaaatacggcgtgctcagccgcgaaactgtgatggcgccagcgatccgcattgcggaagaaggctatccgatcacgccattgcagcaccgacaagcccgatgggtggccgatgatctgcgagcatcgccggccggtgagctgtttctccaagacggtctgccaccggaaatcggccacatgtttcgacaaccggagctcgcgggcacgcttcgccggttggccgatttcggcaccgaggacttctatcacggcggaattgcccggcagatcgcagccgatatgcgagcggccggcggtctcatcaccgaagaagatctagcaagctgcggtccgcccgcacaggtggagccggtttcgacgtcctatcgcggccatcggattctcagcatcccgccgcctagcggcggactgcaactcttgtttgcacttaacatcatcgcgcagatatcagcgacaaactcggagtcatccgacgatagctggcacgaagcgatcgcgctcgcgtcatccgccgtctttcgcgagcgggagctccgcccgttgctgcccgatgatctcattccgcaatcgcgtcaagggcggttgagcgaagattacgcgcggcaagtcgcagatagcatcctggcgccgcaaagtaccaaagagctcgcgaccgacagtgccgaagaaccgggcgatacgacccatctttcggtctgcgatcgagatggcatcattgtagtgctgacacagtctatccaatcggtgttcggcgccaaggtggcacaccgggatctgggtttcctctacaacaattatctgtgcacgtgtccccgcctttctcacccctatgagctcggaccaggttgtcgaccgcgctcgaacatggccccaacgctggtgttacagggcgccaccggccgcccgctcctggcactgggcgccgccggcagtcgacggatcatttcggcaattctccatgtcctaagtggagtcatcgacttgggcttggatatcacggacgctgtggcggcgcctcgcgtacatggactggtcggtcgcaaagtctggatcgagcggccggcagccagcaatgccctgttggcaagattgcgcgcccgtaaccgcatcccaatcgtcaaatcacgactcaattttgcgatgggttcggtcaacgcgctccaactcatgactgacggaagcgcgaaaggcgctgccgatccccggcgtgatggcctggtggaggtgctctcttga

SEQ ID NO: 58089 - protein, 583 aa, Bradyrhizobium japonicum USDA 110
MPMAACICDIIKTRFPKNSERSFPGGTSRAPAGWTICPKAEIEMRAMLMPNLERVELDGPAASVGQRHEAVVTAFPNATEAGVEILRAGGNAIDAAVAAAWALCVCEPSASGLGGQTVLLVRFADDRIRIIDGHSRAPAAASLDTIKAGQQRRGYRSCTIPSTPATLDWAHRKYGVLSRETVMAPAIRIAEEGYPITPLQHRQARWVADDLRASPAGELFLQDGLPPEIGHMFRQPELAGTLRRLADFGTEDFYHGGIARQIAADMRAAGGLITEEDLASCGPPAQVEPVSTSYRGHRILSIPPPSGGLQLLFALNIIAQISATNSESSDDSWHEAIALASSAVFRERELRPLLPDDLIPQSRQGRLSEDYARQVADSILAPQSTKELATDSAEEPGDTTHLSVCDRDGIIVVLTQSIQSVFGAKVAHRDLGFLYNNYLCTCPRLSHPYELGPGCRPRSNMAPTLVLQGATGRPLLALGAAGSRRIISAILHVLSGVIDLGLDITDAVAAPRVHGLVGRKVWIERPAASNALLARLRARNRIPIVKSRLNFAMGSVNALQLMTDGSAKGAADPRRDGLVEVLS

SEQ ID NO: 58090 - DNA, 1812 bp, Xylella fastidiosa Temecula1
  CDS (1)..(1812): transl_table=11
atgagtttatttcctcgttgtttcttgttgctctgtgtttttttctcgcacgtctctgcagagcagacagaggtagcactgttacgggagggagtcgccagagtcccgcctggtgcagtgattgctagtagtcattatttggcgacggatgctgggctgcagattctgaagcagggtgggaatgctttcgatgctgcagtggcggtgtcttccacgttgtcggtggttgaacccattagttctggtttgggcggcggtggcttttttctgcttcatgatgccaagacggggcgtgatgtcatgctggatgcgcgggaatacgcgccggcgtcggttaatctgggtacgtttctaaacaaggatggtcaactggatcatgaccgttcgatcaacgggccttggtcggcaggtatcccggggttaccggcagcacttgttgaactagctgagcattatggcaagttgccattgagacaaacattggcaccggctatccgcattgcgtctgcggggtttcctgtgtacaggcgtatggtggaggggtatcagtcgcgccgtgaagtgatggagcgttatccggggacacgtgaagtctatctccgtggcggtaagccgatggatgagggtgatattttcaaacagccggaattggcgcggactttgtcgttattggccaataagggctttgatggtttttataggggcgagaccgcgaagcggttgctggctggggtgaatcaggcgggtggacgttggactgctgaggatttggccggttatcgggtcaagtcgcgtgttcccatcacgttcgattatcgagggtggaagatcaccactgcgccgccgccgtcttctggcggtatcgcgttggcggaaatgttacagatcttggaaggttgggatctggctcggctagatgacgtgcatcgcgttcatttggtggtagaagcgatgcgccgtgcgtatcgggatcgtactttttttctcggtgatcccgattttgtgtcgattccgcagcgtgtgttgacgagtcaggactatgcgcgtggtttgcgtgcggggattaaccctgagaaggcaacgcctagcgtgttgttatcaggtcatccaacgccattggaggatgaggagacgacgcacttttcaatcattgatgcggagggaaaccgagtgggtgcgacgcaaacggttaatttgctatacggttcggggctgattccgaagggaaccggtgtgttgcttaacaatgagatggatgattttgcactccagccaggcgtgccaaatgtgtttggggtgatgggctatgaggcgaatgcccccaaaccagggaagcgcatgctcagctcaatgacgccgactttccttgaatctgccgataaagtggcggtgattggcacgcctggcggcagtcgtattatcacaatggtgctgttggggatcttgggttacgacgctggattggacgcgcaacaggttgctgcgttgccgcggtatcaccaccaatggttgccggacgtcattgagacggaggcggctacgtttccggcagaggtgatcaagggattggagacgatggggcatacgatcaagcagccaagcgatacggttgccggtgggcgtggttctagccacgtttggggcaatgtgcagacggttgaatgggatcgtcgttctaatgtgctcattggcggtcatgatccgcgtcatgttgtgggcaaagcggccgtttggctcactgataaagcggttgttctgccgcctatggaccatttacctacgccgtgcttgcaggattgccatgctcaatga

SEQ ID NO: 58091 - protein, 603 aa, Xylella fastidiosa Temecula1
MSLFPRCFLLLCVFFSHVSAEQTEVALLREGVARVPPGAVIASSHYLATDAGLQILKQGGNAFDAAVAVSSTLSVVEPISSGLGGGGFFLLHDAKTGRDVMLDAREYAPASVNLGTFLNKDGQLDHDRSINGPWSAGIPGLPAALVELAEHYGKLPLRQTLAPAIRIASAGFPVYRRMVEGYQSRREVMERYPGTREVYLRGGKPMDEGDIFKQPELARTLSLLANKGFDGFYRGETAKRLLAGVNQAGGRWTAEDLAGYRVKSRVPITFDYRGWKITTAPPPSSGGIALAEMLQILEGWDLARLDDVHRVHLVVEAMRRAYRDRTFFLGDPDFVSIPQRVLTSQDYARGLRAGINPEKATPSVLLSGHPTPLEDEETTHFSIIDAEGNRVGATQTVNLLYGSGLIPKGTGVLLNNEMDDFALQPGVPNVFGVMGYEANAPKPGKRMLSSMTPTFLESADKVAVIGTPGGSRIITMVLLGILGYDAGLDAQQVAALPRYHHQWLPDVIETEAATFPAEVIKGLETMGHTIKQPSDTVAGGRGSSHVWGNVQTVEWDRRSNVLIGGHDPRHVVGKAAVWLTDKAVVLPPMDHLPTPCLQDCHAQ

SEQ ID NO: 58092 - DNA, 1761 bp, Vibrio parahaemolyticus RIMD 2210633
  CDS (1)..(1761): transl_table=11
atgcaatggacgttcaaccgactcgtgtctacgggtctttttcttagtgcctctatcacccacaccgcgtttgcaaaccaagccaccgatgcgattgccccagagcaaagtactgggcttgagcacaaacaactggtcaaagccaaagactatatggtgacagcagcgaacccaatggctacccaagcaggtgctgatgtactggagcaaggcggcaatgccattgatgctatggtggcggtacaactgatgcttggcttagtcgaaccacagtcttccggtattggtggcggcgcatttttggtgtattgggatggcgaacaacaaaagctcaccacttatgatggtcgagaaaccgccccccttgccgcaaccccaacactgtttttggacgaccaaggccaaccgctgcaattttatgatgcggttgtgggcggacgatctgtcgcgacgccgggcaccgtcaaactgttgtgggatacccaccaaaaatacggcaagctggaatggaaaaagatcattcagccagtgatcaacttggctgaggaaggttttgccgtcagtcctcgtctcgccagtttgattgccaacgacgccgagcgtttatcacgttttccgaccacaaaagcgtatttctttaacgccgatggctcaccaaaatccgaaggcacacgattaaagaatccagaatacgcgcaaaccttgaaagccattgccaggcaaggtgctcaagccttctatcaaggtgatattgccaaagacattatcgcaaccgtgcaaactgcagtgggtaacccgggcgtattggcacaacgagattttgatacttaccgcatcaaacagagagagcccgtttgtgcggcttatcaaagctacgacatctgtggtatggggccaccaagctcaggcgcgctaactgtcgggcagatcttggctatcaccgagcaatacgatctcaaaggctggggaccagacagcaccaaatcttggcaggtcattgcggacgcatctggtctcgcgtttgctgatcgcggtaagtacatggccgatcaagactatgtacccatgccaaccgaaggtttgttggacaaagactatctcaaacaacgtgccgaactgattcaggtcggcaaagcactgacgaaagtggaagccggtaacccaccgtggtcacatgcaatgaatctcagtatggatgaatcgatagaacttccttccaccagccatttcaacatcgtcgataagcaaggcaatgtggtttcaatgaccaccaccatcgagaacgcctttggctcgcgcttaatggttcgcggcttcctgctcaataacgagctaacagacttttctttccgcactcatcaaaatggcgtgccaatcgccaaccgattagaaccgggcaaacgtccgcgctcctccatggcaccgaccatcatcatgaaagataatcaaccatacatggcaattggttctccgggtggcagtcgcattatcggctacgtggcacaagccatcattgctcatactcaatgggacatggacattcagcaagcgatcaaccaaccaagagtgttaaaccgttttggcactgtcgacctcgagcaagatagcgcagcaactcagttgcaaccggcactcgaaaagatgggctttaagaccgaaattcgcgatttgaattccggtttacacgccattcgcatcactgtaaatggcttagaaggtgctgccgatccgcgtcgagaaggtgcagccatcggaaaatag

SEQ ID NO: 58093 - protein, 586 aa, Vibrio parahaemolyticus RIMD 2210633
MQWTFNRLVSTGLFLSASITHTAFANQATDAIAPEQSTGLEHKQLVKAKDYMVTAANPMATQAGADVLEQGGNAIDAMVAVQLMLGLVEPQSSGIGGGAFLVYWDGEQQKLTTYDGRETAPLAATPTLFLDDQGQPLQFYDAVVGGRSVATPGTVKLLWDTHQKYGKLEWKKIIQPVINLAEEGFAVSPRLASLIANDAERLSRFPTTKAYFFNADGSPKSEGTRLKNPEYAQTLKAIARQGAQAFYQGDIAKDIIATVQTAVGNPGVLAQRDFDTYRIKQREPVCAAYQSYDICGMGPPSSGALTVGQILAITEQYDLKGWGPDSTKSWQVIADASGLAFADRGKYMADQDYVPMPTEGLLDKDYLKQRAELIQVGKALTKVEAGNPPWSHAMNLSMDESIELPSTSHFNIVDKQGNVVSMTTTIENAFGSRLMVRGFLLNNELTDFSFRTHQNGVPIANRLEPGKRPRSSMAPTIIMKDNQPYMAIGSPGGSRIIGYVAQAIIAHTQWDMDIQQAINQPRVLNRFGTVDLEQDSAATQLQPALEKMGFKTEIRDLNSGLHAIRITVNGLEGAADPRREGAAIGK

SEQ ID NO: 58094 - DNA, 1596 bp, Bordetella parapertussis 12822
  CDS (1)..(1596): transl_table=11
atgtcacttcctttcgattggtccttcccctacgccagccgcaaaatgcccgtgctggcatccaatgcggtagccaccagccagcctctggcggcgcaggccggcctgcgcatgctgctggccggcggcaacgcggtggacagcgccatcgccacggccattgcgctgaccgtggtcgagccggtcatgaacggcatcggcggcgatctgttcgcgctggtctggcatggcggccgcctgcacggcctgaactccagcggctgcgcgccggccgcctggacgccggagtatttcgccggccgcgagaccatgccgcccaccggctggggcgcggtcaccgtgccgggccaggtggcgggctggaaggccctgtcggagcgcttcggcaagctgccgttcgccgccttgttcgagccggccatcgcctatgccgagcagggtttcccggtctcgcccaccatcgcgcgccagtgggccacgcaggcccccaagctggccggcgagccgggcttcgccgacgccttcctgccgcaagggcaggcgccgcaggccggccagtggtggcgcttcccggcccaggcgcgcaccttgcgcgagatcgccgagacgggcggcgccagcttctaccagggcgaactggcccgccgcatcgccgacttcgcgcgccagaccggcggcgcgctgcgcgagcaggacctggccgagcaccgcccggaatgggtcgagccgatttcgcagtcgttccgcgactacgaactgcacgagatcccgtccaacggccagggcatcgcggccctgatggcgctgggcatgctggagcagttcgacctggaagccatgggccacgacagcgcggactattaccacgtcagcatcgaggccatgaagctggccttcgccgacctgcaccagcatgtgaccgacccgcgccacatgcgcgtgaacgccgccgccctgctcgaccccgcctacctggccgagcgcgcgcgcctgatctcgatggaccgcagcagcgtcccggccgccggggcgccggccacgggcggcacggtctacctgaccgcggccgacgccgacggcaccatggtgtcgttcatccagtccaactaccacggcttcggctccggcgtggtggtgcccgacaccggcatcagcctgcacaaccgcggcatgaacttcgtgctcacgccgggccacgtcaaccaggtggcgccgcgcaagaagcccatgcacaccatcattcccgccttcatgacgcgcaagggccagccggccatgtcgttcggcgtgatgggcggatcgatgcaggcgcagggccacctgcagatggcgacccgcctggccgccttcggccagaacccgcaggccatgagcgacgcgccgcgcttccgggtcgagaacgggccggtggtcaacgtcgaggcacacctgcccgccgacgtggtgcagacgctgcgcgaccgcggccacaatgtggcggtggcgccggccgacagcctggagttcggttcggcccagctgatctgccgcctgcccgaaggcggctacctggccgcctccgactcgcgccgcgacggccaggcggtcggcttctaa

SEQ ID NO: 58095 - protein, 531 aa, Bordetella parapertussis 12822
MSLPFDWSFPYASRKMPVLASNAVATSQPLAAQAGLRMLLAGGNAVDSAIATAIALTVVEPVMNGIGGDLFALVWHGGRLHGLNSSGCAPAAWTPEYFAGRETMPPTGWGAVTVPGQVAGWKALSERFGKLPFAALFEPAIAYAEQGFPVSPTIARQWATQAPKLAGEPGFADAFLPQGQAPQAGQWWRFPAQARTLREIAETGGASFYQGELARRIADFARQTGGALREQDLAEHRPEWVEPISQSFRDYELHEIPSNGQGIAALMALGMLEQFDLEAMGHDSADYYHVSIEAMKLAFADLHQHVTDPRHMRVNAAALLDPAYLAERARLISMDRSSVPAAGAPATGGTVYLTAADADGTMVSFIQSNYHGFGSGVVVPDTGISLHNRGMNFVLTPGHVNQVAPRKKPMHTIIPAFMTRKGQPAMSFGVMGGSMQAQGHLQMATRLAAFGQNPQAMSDAPRFRVENGPVVNVEAHLPADVVQTLRDRGHNVAVAPADSLEFGSAQLICRLPEGGYLAASDSRRDGQAVGF

SEQ ID NO: 58096 - DNA, 1761 bp, Photorhabdus luminescens subsp. laumondii TTO1
  CDS (1)..(1761): transl_table=11
atgttgaaaacatggaaaacaccgctggtaataatatccctgctcgtctcgtcccacctttatgccgcttcagaaccggctgttgaagccaaaaatggtatggtcgtttcatcccaacatcttgcttcacaagttggtgtggatatcctcaaaatgggtggaaatgcggttgatgcagcggttgctgttggctatgcccaagccgttgtcaatccatgttgtggcaatatcggtggtggtggctttatgacaattcatttaaccgacggtaccgatacttttattaacttccgcgaaaccgcgccaagtgcagcaagtgccgatatgtatctggataaagaagggaatgttattaaaggagccagtttatatggctaccgcgcggcgggtgtgcccggaaccgtgatggggttagacagcaccctaaaaaaatatggcaagttgagccgtgaacaagtcatggcccctgcaattaagctggcacgagaaggctttatactggcccgtgcagataccgatattctggacaccacaatcaagcgtttccgcaaagatccagaagcagctcgtatcttcctacgtaaagatggctctccttatcaaccaggagatagattaatacaaaccgatctggcaaatacgttagaattaattgctaaaaaagggcaagacgctttttatcacggaaatattcctaaactggtcgccgaagccgctaaaaaatccggcggcattattaccgaagctgattttgccaattataaaatttcagaaacaacccccgtcacctgtcactatcgcggttataaatttatctcttccccgccgccaagttcaggcggagtaaccatgtgtgaaattctgaatattttggaaggttataacctcaaagaaatgggattcaactcggctgattatattcacacattgacagaagccatgcgccatgcctacatggacagaaatacttaccttggtgatccagaatttattaaaaatccaatcgatcacttactgagtaaacactatgctgaatctctacgtaaaaaaatagagccaggtaaagcaacattatcggagaatattcagccgggtattggaccccatgagaagccagaaaccacacactactccattgtcgacaaagaaggtaatgcagtttcaactacctatactatcaatggactttttggtgctgtcgtcatcgcccccggaacaggtttcttcctcaatgatgagatggatgatttcaccactaaaattggtgaaaagaatctttatggtctcattcaaggtgcgactaactctattgcccccggtaagcgcccactatcctcaatgagcccgacacttgtcacaaaagacaataagacattccttgttctgggctcacccggcggctcccgtattatctctattaccttgcaaaccgccttaaacattattgatcacggtatgtctcctcaagaagcggtcaatagcccccgtattcatcaccaatggttacccgatgaagtttattatgagcaacgtggtatttctaaagactcgttgaatttgctagaaaaaatgggatataaaatggtggagcagataccatggggcgcggctgaagtgattatggtcggtttacctaaaaccactagcacttcagctaagtcttcaggcaatgatgccaccgtatctggtcaagttcgtgaaaaccatctttatggtgccaatgatgtccgacgcccggctggtgcggctattggctactaa

SEQ ID NO: 58097 - protein, 586 aa, Photorhabdus luminescens subsp. laumondii TTO1
MLKTWKTPLVIISLLVSSHLYAASEPAVEAKNGMVVSSQHLASQVGVDILKMGGNAVDAAVAVGYAQAVVNPCCGNIGGGGFMTIHLTDGTDTFINFRETAPSAASADMYLDKEGNVIKGASLYGYRAAGVPGTVMGLDSTLKKYGKLSREQVMAPAIKLAREGFILARADTDILDTTIKRFRKDPEAARIFLRKDGSPYQPGDRLIQTDLANTLELIAKKGQDAFYHGNIPKLVAEAAKKSGGIITEADFANYKISETTPVTCHYRGYKFISSPPPSSGGVTMCEILNILEGYNLKEMGFNSADYIHTLTEAMRHAYMDRNTYLGDPEFIKNPIDHLLSKHYAESLRKKIEPGKATLSENIQPGIGPHEKPETTHYSIVDKEGNAVSTTYTINGLFGAVVIAPGTGFFLNDEMDDFTTKIGEKNLYGLIQGATNSIAPGKRPLSSMSPTLVTKDNKTFLVLGSPGGSRIISITLQTALNIIDHGMSPQEAVNSPRIHHQWLPDEVYYEQRGISKDSLNLLEKMGYKMVEQIPWGAAEVIMVGLPKTTSTSAKSSGNDATVSGQVRENHLYGANDVRRPAGAAIGY

SEQ ID NO: 58098 - DNA, 2366 bp, Nasonia vitripennis
  CDS (1)..(1812)
atgttaaaggattatcgatattataccccattagttcaagtaaagactcatagaaataaatattctaacaggccggtgaggaaaaagacctgtcttatcggaggaagtgtgatcgtggtacttgctctgatagttatcatcagcctcgtggttgttctgaaacctggatcagatctccgacgggacaacagatacgtcagtgattcccccctcggcgtttacaagaaggcggcggtatcatcacacggaccggaatgcgcgcaaatcggtacggacatgctgaagcgcggcggctcggcagtggacggggctatcgcgacactcctctgcgaaggcatctcttctctacacagcatgggccttggaggaggatttttcatgacgatatacgatgccgaaaccggtagggcaaatttcttggacgccagagaaactgctcccgcggcagctcacaaggacatgtttaacggaaattccagcctgtccctctacggaggtaaagccgtcgcggtgccgggcgaattgctgggctactgggaagctcaccagaagtacggaaagctcaactggacggatctgtttgaaccgtccatagcactcgccgaaaagggctgcctcgttaaccgatacctagaaaacagcctcaagggaaaggaggccttcatcaggaacgagcctactctagccgaaatactgatcaacaaggaaacgggcgagctctacactacgggggagagaataaaaaggccgaaactggcgcagaccctgaggaaattggccaacagctcggcgcctcacgacttgttctacagaggggagattgcgagggatctggtcgccgagctcgaaagcttcgatgcgatcattaccgccgaagacttcgaaaactacgctgtcaagtggaaaaagccgctggagtcgagagtcggcaacatgacgatgtacacggcgccgccgcccggctccggcgcactgctcaccttcatgatgaacgtgctcgaggacttggtcccggccaacgacacgagagtcacgtggcagcgcatcatcgagactttcaagtgggcttacgccaagaggaccgagcttggggatcccgacaaggaggacgtagaggctatcgttgcaaacctcacgtcgaaagattacgccaacgccataaggtccttgatcgaagacaccaaaacgcataacgatccgaaatattacggcgctgtgaccacgaatcaacgggagcacggaacgtcgcacacgtgcgtattggctccggatggttccgccgtatcggttacctcgactatcaaccaagttttgggcgccaagatacgctcatcctcgaccggaataatattcaacgacgaaatggacgacttcagctctcccaatattacgaacggcttcgatctgccgccttctcccgcgaatttcatcaaaccagggaaaaggccgctgagttctatgtcccctacgatagtgttggacgcgaacaggagggtaaggttggtagtcggcgctgccggtggaagtaaaataacgacggctgtagctgctatcatgatttttaatctatggaacgattacgatatcaaggaggcaatcgacgcctataggattcaccatcaactattcccaatgcaagtgcaaatcgagcatgatttccctccttacgtgctacattacttaagggagattggacacagcatcactacctatgcaggtattggaagcgcagtcactgctatatcggataacaatggtcgaataactgcgaattccgattttcggcgtcaaggagcaacagctggattttgaataatgtattgcacgtagatattgaaaatatctatatcaaacacaatgaacctcctcgatctcgtcgaatgaaaggatcgattaacgtcagcatacctcaagatgggctttacagatgctcgagtggaatgtgaattaattgtttttttaatctttcttcttacgtttgcgcaagttattattgtttcaatattatagtacaataagtttgagaaattatcgagtccctttaaattttgcaaaatggcaaaatcgatcgaatgaaaatgcaactcaatttattcccatcgacgattgttgcgaactttacaaaaagagatcagcttatttatcaaggaataatatcgcgaaccaaaaatgttattcaccattagaaacaaaagcgagtctactttcagactgtgtaacttctccataccgagtacgtgacgcgtgtcagtattgcattaactgttaactgaatgtcgaatagttattataagttataatttctcttttatgtttgtatataatataaaaaatccatgcattttattttcgctttgtacataaaa

SEQ ID NO: 58099 - protein, 603 aa, Nasonia vitripennis
MLKDYRYYTPLVQVKTHRNKYSNRPVRKKTCLIGGSVIVVLALIVIISLVVVLKPGSDLRRDNRYVSDSPLGVYKKAAVSSHGPECAQIGTDMLKRGGSAVDGAIATLLCEGISSLHSMGLGGGFFMTIYDAETGRANFLDARETAPAAAHKDMFNGNSSLSLYGGKAVAVPGELLGYWEAHQKYGKLNWTDLFEPSIALAEKGCLVNRYLENSLKGKEAFIRNEPTLAEILINKETGELYTTGERIKRPKLAQTLRKLANSSAPHDLFYRGEIARDLVAELESFDAIITAEDFENYAVKWKKPLESRVGNMTMYTAPPPGSGALLTFMMNVLEDLVPANDTRVTWQRIIETFKWAYAKRTELGDPDKEDVEAIVANLTSKDYANAIRSLIEDTKTHNDPKYYGAVTTNQREHGTSHTCVLAPDGSAVSVTSTINQVLGAKIRSSSTGIIFNDEMDDFSSPNITNGFDLPPSPANFIKPGKRPLSSMSPTIVLDANRRVRLVVGAAGGSKITTAVAAIMIFNLWNDYDIKEAIDAYRIHHQLFPMQVQIEHDFPPYVLHYLREIGHSITTYAGIGSAVTAISDNNGRITANSDFRRQGATAGF

SEQ ID NO: 58100 - DNA, 1716 bp, Tribolium castaneum
  CDS (1)..(1716)
atgattatttccttcagaaaacccaccgtcaagtacttcgtcatcgctttgaccgccgccatcatcctggcaatcctcggcactattgtgtatttcctggttaagggcgagtcgagcggcaagggggctgtggtcaccaacgggcacacgtgcgcccacatcggcgccgccatcctcgcgaaagggggctcggcggtggacgccgccatcgcagctttgttctgcgagggcgtctccatgccccagagcatggggctgggcgggggcttcctgatgacggtctacttcgccgagaaccgcacggcgtactcgctgaatgcgcgggaggttgccccgctggcggcctccaaagacatgttcgatgggaacagctcgctgtcgacgaaaggggggcttgcggtggcggtgcccggggagttgaggggctactgggaggcctaccacaggtatgggggcaaggtggcgtgggccgatttggtgcagcctaccatagatttgtgcgaaagtggggtcctggtgacggagtatttggagaagttgtatgcgagtcagttggaaagcttcaagaaggatcctgtgatggctgagacttttatcgatccgagcactaatcgcacctataagaagggacaagtggttaagaggccacggttggccaaaagtttggaactgatgaagagttttggggccgatgctttgtatgacggtactttgacgaaggggtttgttgaggatatacggaacaaaggtgggattatcacggtggaggatatgaaaaactacaaggttaaatggcaagaacccatcgtggttcaaatgcccaacaaccagacgctttacacggcacctttgcccggctctggtgtgatccttagtttcataatgaacctccttaacaattacttggacaattcgcaacccttgtccgtcacaaactggcaacgaatcgtcgaaagcttcaaattcggctacggcaaaaggacagaactcggtgacatcaccgacagcaactttgccaatgtcacagacttggtcaaaaagctcatttcgccggattatgcctccgaaattcggcaaaaaatccacgacggtaccacctcccaagacccgtcgtactacggcgctaagacggtccaacccgaggaccatggtaccgcccatatctgcgtcctggcccccaatggggacgcagtctccgtcacaagcaccatcaatttatatttcggcgccggtttcatgtccgaaagcaccggaatcatcctcaacaacgaaatggacgacttctcctcccccaacatgaacaacagcttcaacgtgccgccgtccgaagccaactacatcgagcccgggaagcgcccgttgtcctccatggtgccctcgattgtcgtgggggatggcggggttgagctcgtgataggggccgcaggagggaccaaaatcacgacctcggtggcgcagatcgccgtcaagcatttgtggtttggggctccgatcggagcagcagtgcaggagaagcggattcaccatcagttgttcccgatggagattgagttcgagaatgcgtttaatgaagttacgttgcataaaattgggcatgagtatacgatagctgagccggggtcggggttttcggcggtgacggccatctcccggaaagggggcgatgtggcgacggcgagtgatgtgcggaggacgggcgacgaagttatagtttga

SEQ ID NO: 58101 - protein, 571 aa, Tribolium castaneum
MIISFRKPTVKYFVIALTAAIILAILGTIVYFLVKGESSGKGAVVTNGHTCAHIGAAILAKGGSAVDAAIAALFCEGVSMPQSMGLGGGFLMTVYFAENRTAYSLNAREVAPLAASKDMFDGNSSLSTKGGLAVAVPGELRGYWEAYHRYGGKVAWADLVQPTIDLCESGVLVTEYLEKLYASQLESFKKDPVMAETFIDPSTNRTYKKGQVVKRPRLAKSLELMKSFGADALYDGTLTKGFVEDIRNKGGIITVEDMKNYKVKWQEPIVVQMPNNQTLYTAPLPGSGVILSFIMNLLNNYLDNSQPLSVTNWQRIVESFKFGYGKRTELGDITDSNFANVTDLVKKLISPDYASEIRQKIHDGTTSQDPSYYGAKTVQPEDHGTAHICVLAPNGDAVSVTSTINLYFGAGFMSESTGIILNNEMDDFSSPNMNNSFNVPPSEANYIEPGKRPLSSMVPSIVVGDGGVELVIGAAGGTKITTSVAQIAVKHLWFGAPIGAAVQEKRIHHQLFPMEIEFENAFNEVTLHKIGHEYTIAEPGSGFSAVTAISRKGGDVATASDVRRTGDEVIV

SEQ ID NO: 58102 - DNA, 1909 bp, Tribolium castaneum
  CDS (29)..(1855)
gctcttgtgaggaacgtcttgccggaaaatggcggacgcacgtgatcagtacagggtggtcgggaggcaaaatcgcacacgtccaagagccagaaaacgctgcatcatctttattgttatcataattattatcatcgcttgcatcgccttcgcctatcattatgggttcctaagttcaagcaaggaggaagaagagctcagacccccaaaccctgagaaagccctaccaccatcggcttccgtcttgaggcgcttcaaaagggctgccgtgtgtgcagacggggcaacgtgtgcaaaaatcggaagatcaatcctagaccagaatggcagtgctgtggacgccgccatcgccacgttattctgcaacgggatttacaccatgcagagtatgggtcttgggggcggcttcctcatgaccatctacatcaaagaccaaaacaaagcctacactctaaacgctcgcgaaaaagcccccttgaaagccacacccgacttgtacaaagacgaccaatttatttcccgaaaaggggctctagccatcgcagtgcccggcgaactcaggggctatcaagcggcccacgaaaaattcggcaaactcgaatggtcaaagctggtcgaacccagcatagaattgtgcgaaaaaggctacaacatgtccaaacaccagcacgaatccttgaaagaggccaggattgtgaacgatacgaatttgaaggagtggtttttcgattctgagggtaaattcaaaaaaatgggctcgacaatagttccgaaaaaattatgtgagacgttacgattgattgcgaaaagtggcggtcacgacctttacaatggcactttaagcaagatgttggtagaagacttggaggaaatcggtagtattataaccaaagaagatttagaaagttaccaggccgaatggatggaccccatcgaagtggagctccgccaccacgaaaaactctattccgttccgccaccaggctcaggggcccttctagcgtttattttaagcatcctggatgggttcaaattcaaaccacatgatctggaaggcgttcagaacacagttcagacgtaccacaaaataatcgaggcttttaaatacgcgtacgccaaaagaactgaattaggtgatactaactttgtacacatttctgatttattacgtaatttaacttcgcacgaatatgccgaaagtatcaggaaggaaattcaggaaaattcgaccagtaatgatcccaaagactacggagcggttttttacagcaaggaggaccatggcacagctcatatctccgttctggccgaaaatggggacgcagtctcggtcacaagctccgtcaatttgtatttcggggccggtctgacgtcgcgccaaacgggcattattctgaacagtgtcatggacgatttttcattccccaatttccaaaattatttcaatttgcctggatctcccaacaacgaactgaggcctggaaaacggccgttgtcctcaatgagccccactatcctggtggacgagcacggggacgtaaaactggttctgggggcttcggggggcacgaaaatcaccacatctgtggcgctggtaattatgcgcacgctctggttcggccagaacatcaaagaggccatcgacgcccctcgaatccaccaccagctctacccaatgcaagttcagtacgaatatggcacattacaacaagtagtcactggtttggaggccctagggcacaagactagccgttacaccgacgcaggctccataatttgtgccctttacaacacctcaggcctaatccaagccaacgctgaccaccgcaaaggcggcgatgtttacggactgtgaattgttttgttgcacttcccctgttttcgccattaataaattctaatttagtga

SEQ ID NO: 58103 - protein, 608 aa, Tribolium castaneum
MADARDQYRVVGRQNRTRPRARKRCIIFIVIIIIIIACIAFAYHYGFLSSSKEEEELRPPNPEKALPPSASVLRRFKRAAVCADGATCAKIGRSILDQNGSAVDAAIATLFCNGIYTMQSMGLGGGFLMTIYIKDQNKAYTLNAREKAPLKATPDLYKDDQFISRKGALAIAVPGELRGYQAAHEKFGKLEWSKLVEPSIELCEKGYNMSKHQHESLKEARIVNDTNLKEWFFDSEGKFKKMGSTIVPKKLCETLRLIAKSGGHDLYNGTLSKMLVEDLEEIGSIITKEDLESYQAEWMDPIEVELRHHEKLYSVPPPGSGALLAFILSILDGFKFKPHDLEGVQNTVQTYHKIIEAFKYAYAKRTELGDTNFVHISDLLRNLTSHEYAESIRKEIQENSTSNDPKDYGAVFYSKEDHGTAHISVLAENGDAVSVTSSVNLYFGAGLTSRQTGIILNSVMDDFSFPNFQNYFNLPGSPNNELRPGKRPLSSMSPTILVDEHGDVKLVLGASGGTKITTSVALVIMRTLWFGQNIKEAIDAPRIHHQLYPMQVQYEYGTLQQVVTGLEALGHKTSRYTDAGSIICALYNTSGLIQANADHRKGGDVYGL

SEQ ID NO: 58104 - DNA, 1575 bp, Thermus thermophilus HB27
  CDS (1)..(1575): transl_table=11
atggacctcacctactacccctacccctcccgccgccacgtggtcttgggaaggcggggtgcggtggccacgagccagccccttgccgccctggcggggatggaggtcctcctcaaaggggggagcgccgtggacgccgctattgccatggccgcctgcctcaccgtggtggagcccacctccaacgggatcgggggggacctcttcgccctggtgtgggacggaaccctccacggcctgaacgcctccgggaaaagccccatggccctcaccccggagaggcttcccgggaggatgccggagcggggctggcttcccgtgaccgtgccgggggcggtctcggggtggcgggccctgcacgagcgctggggcaggcttcccttcgccgaggtcctcgcccccgccatccgctacgccgaggagggcttccccgtggggccggagacggcgaggagctggcggcgggcagagggcgtcttcctccccctggaggggccggagtttgggcccttcaaggaggtcttcttccccggagggagggccccaagggcgggagaggtgtggcgaagccccctccacgccaagaccctcagggagatcgccgagtcctacggggaaagcctttaccggggagccctggccgaggccctgctccgcttcagcgaggccacgggggggctccttacccgggaggacctcgaggcccacgccccggagtgggtgacgcccctttccacggagtacaaggggctcaccgtctgggagcttcccccaaacggccagggggtggcggtcctcctcgccctgaaccttctggaggggtttgacctgaggccggaggacccctggagctaccacgtccagattgaggccatgcgcctcgctttggcggacacctaccgcttcgtggccgacccgcggcacatggagctcgcccccgaggccttcctctccaaggcctacgcggcggaaaggcggaggcttatcggggaaagggcccttccccgggtccttcccgggctccgccccgagggcacggtctacctcgcggcggcggacggggaggtgatggtctccctcatccagtccaactaccaggggttcggctccggggttttggtgccgggaacggggatcgccctgcagaaccggggcctggggttttccctggaggaggggcacccgaaccgggtgggtccgggaaagaggcccttccacaccatcatcccgggctttctcgcccgggaggggaagccccttgggccctttggggtcatgggggggttcatgcagccccaggggcacgtccaggtggtggtgggcctggcggacttcggcctgaacccccaggcggccctggaccggccccgctggcaggtggtgccgggggacgaggtgttgcttgagcccggcatcccccaggccacggcgcttttcctcaaggacctcgggcatagggtgcgctacgaggcggagtacggcctcttcgggcgggggcaggtggtcttccgtctcggggaggccctcgtgggggcgagcgacccccgggccgaggggctcgccttggcgtggtag

SEQ ID NO: 58105 - protein, 524 aa, Thermus thermophilus HB27
MDLTYYPYPSRRHVVLGRRGAVATSQPLAALAGMEVLLKGGSAVDAAIAMAACLTVVEPTSNGIGGDLFALVWDGTLHGLNASGKSPMALTPERLPGRMPERGWLPVTVPGAVSGWRALHERWGRLPFAEVLAPAIRYAEEGFPVGPETARSWRRAEGVFLPLEGPEFGPFKEVFFPGGRAPRAGEVWRSPLHAKTLREIAESYGESLYRGALAEALLRFSEATGGLLTREDLEAHAPEWVTPLSTEYKGLTVWELPPNGQGVAVLLALNLLEGFDLRPEDPWSYHVQIEAMRLALADTYRFVADPRHMELAPEAFLSKAYAAERRRLIGERALPRVLPGLRPEGTVYLAAADGEVMVSLIQSNYQGFGSGVLVPGTGIALQNRGLGFSLEEGHPNRVGPGKRPFHTIIPGFLAREGKPLGPFGVMGGFMQPQGHVQVVVGLADFGLNPQAALDRPRWQVVPGDEVLLEPGIPQATALFLKDLGHRVRYEAEYGLFGRGQVVFRLGEALVGASDPRAEGLALAW

SEQ ID NO: 58106 - DNA, 2007 bp, Staphylococcus aureus subsp. aureus MRSA252
  CDS (1)..(2007): transl_table=11
atggtcattaacttaaatgacaaacagacaaaaacatctaaagaagggttaatttccgtatcacatcctcttgcggctaaaattggtaaggatgtattagatcaaggtggcaacgctatggatgccgtgattgcaattcaactggcattgaatgtggtagaaccatttgcatcaggtattggtggtggcgggtacttgctatattatgagcaaagtactggcagtataactgcgtttgatgcgcgtgagacagcccctgcacatgtagacaaacaattttatctagatgattcaggcgaatataaatcattttttgatatgactacacatggtaaaactgtcgctgtgccagcaattccaaagctgtttgattatattcacaagcgttatgctaaattgtcattggaagatttaattaatcctgcaattgaactagccattgaaggtcattcagctaattgggctactgaaaaatattcgcgccagcaacacgcgcgattgacaaagtatcacgaaacggcacaagtatttacccatgaaaatcaatattggcgtgaaggtgattggattgtacaacccgaattaggtaagacatttcaaatattaagagaacaagggtttaatgcattttataaaggtgacattgcgaaacaattagtcaatgttgtcaaagcatgtggtgggacaatcactttagaggatctagccaattatgatattcagattaaagcgccaatcagtgcgacatttaaagactatgacatttattcaatgggaccatctagttctggcggtatcacggtaattcaaatattgaagttattagaacatgtcgatttacaatctatgggtccaagatctgttgattacttgcatcatttgatacaggcgatgcatttagcatatagtgatcgcgcgcaatacttggcggatgataattttcatgaggtgcctgtacagtcattaattgatgacgattatttaaaagcacgcagtaagctcattgatagcaataaagcaaatattgatatagagcatggtgttgtgtctgattgcattagtcatacagatgttgaagaaaatcataccgaaacaactcatttttgtgtgattgataaggaaggtaatattgcttcatttacgacatcaatcggtatgatttacggatcgggtatcacgattccaggctacggcgtgttattgaataccacaatggatggttttgatgttgtgacgggtgggatcaatgaaattgcaccttataaacgaccactaagtaacatggctccaacgattgtgatgcatcacgggaagccaatattaacagtaggtgcacctggtgctataagtatcattgctagtgttgcgcaaacattaatcaatgtattagtgtttggcatggatattcagcaggctatagatgaacctagaatttatagtagccatcctaatcgcattgaatgggagcctcaattttcacaatctacaattttagcattgattgcacgtggacatgcaatggaacataaaccagatgcctatattggagatgtacatgggctacatgttgacttgaatacacgtgacgcatcgggaggtgctgatgatacgagggaaggtacagtgatgggtggtgaggtattatcaattagaaaacaaccattaccatatcgtcaaatgtatggtagtaatgtatatcgtgtatatttcaatgatgtgcagttacctttattggcagatcaagtgcgatggatgcatgacaaatattgggttgatgaaagtgtcgttagaatcatcttctctgaagttagtgcacatattgaagatttaagaagttatgaaaacgcaggagaaaattatatagatattacctggttagcacgaaagaaaggttatcaagtaacattgaaggatgacggtttatacttaactgatgatacatatacttcagtgaaacggaacacaaatgcatactatagatatgatcgagatagtatcacaagatag

SEQ ID NO: 58107 - protein, 668 aa, Staphylococcus aureus subsp. aureus MRSA252
MVINLNDKQTKTSKEGLISVSHPLAAKIGKDVLDQGGNAMDAVIAIQLALNVVEPFASGIGGGGYLLYYEQSTGSITAFDARETAPAHVDKQFYLDDSGEYKSFFDMTTHGKTVAVPAIPKLFDYIHKRYAKLSLEDLINPAIELAIEGHSANWATEKYSRQQHARLTKYHETAQVFTHENQYWREGDWIVQPELGKTFQILREQGFNAFYKGDIAKQLVNVVKACGGTITLEDLANYDIQIKAPISATFKDYDIYSMGPSSSGGITVIQILKLLEHVDLQSMGPRSVDYLHHLIQAMHLAYSDRAQYLADDNFHEVPVQSLIDDDYLKARSKLIDSNKANIDIEHGVVSDCISHTDVEENHTETTHFCVIDKEGNIASFTTSIGMIYGSGITIPGYGVLLNTTMDGFDVVTGGINEIAPYKRPLSNMAPTIVMHHGKPILTVGAPGAISIIASVAQTLINVLVFGMDIQQAIDEPRIYSSHPNRIEWEPQFSQSTILALIARGHAMEHKPDAYIGDVHGLHVDLNTRDASGGADDTREGTVMGGEVLSIRKQPLPYRQMYGSNVYRVYFNDVQLPLLADQVRWMHDKYWVDESVVRIIFSEVSAHIEDLRSYENAGENYIDITWLARKKGYQVTLKDDGLYLTDDTYTSVKRNTNAYYRYDRDSITR

SEQ ID NO: 58108 - DNA, 1884 bp, Burkholderia mallei ATCC 23344
  CDS (1)..(1884): transl_table=11
atgaccgaccggattcgtccgcgccccttccgctcgcgagccggcgcgatcgccgccgccttcttcgccgtcaccgccgccggatgcgcgaacgcgcccggcccgggcgcgcagaacgccgccgcgccggcctcggccgcttccacgccgccggcggcgccgggcgccgaagccccggccgcgcccgccgagctgtcgagttgggtcgacaagccgggctggaccgcgcagcgcgacatgatcgcggccgcgcatccgctcgccgcgcaagccggccaggcaatgctcaaggcgggcggcaccgccgtcgatgcggcgatcgccgcgcagatggtgctgatgctcgtcgagccgcaggcctcgggcatcggcggcggcgcgttcctgttgcacgagaacggcaagacgatcgaagcctatgacggccgtgaaaccgcgcccgccgccgccaccgaccgcctcttcctcgatgcgaacggcaagccgctgccgcgcgcggcgctcggcgcgcgcacggtcggcgcgccgggcgcgctgcggatgctcgagctcgcgcatcgcgcgcacggcaagctgccatggcggcgcctgttccagcccgcgatccggctcgccgagcaaggctttccgctcggcccgcggctcgcggcggcgctcgcgaacgagccgtcgctcgcgcgcgatccagccgcgcgcgcgtacttctacgaccggaacggcgcgccgaaaccggccggcacgacgctgaagaaccctcagctcgcggccacgctcaggctcgtcgccgcgcacggcgcgaacgcgttctataccggcgcgatcgcgcgcgacatcgtcgcgacagtccggcaggcgccgaatccgggcgtgctgagcatgcaggacctcgcgcaataccgtgcgaagacgcgcgagccgctgtgcgccgactatcgcaaatggaccgtgtgcgggatgccgccgccgtcggcgggcgggctcgtcgtcgcgcagattctcgggctgctcgaggcgcagccggactggcggcagatcggcgcgcaaaaacccgtgcgcaatgcggtgggcgtcgagccgacgccgttcgccgcgcatctgttcagcgaggcgggccggctcgcgtacgcggaccgcgcgcagtacgttgccgatcccgatttcgtcgcgccgccgggcggcagttggaagcgcctcgtcgagcggcgctacgtcgccgaacgcgcgcggctgatcggcgacgcgagcgcgggcgaggcgagcgccggctcgccgtccggcctgccgcccgcgaccgccgccgaccgcggcgcggagccgccgtcgggatcgcagatcaccgtcgtcgatcgctacggcaatgcggtatcgatggcgtcgacgctcgacgagcgcttcggctcgcggctgatggtgcgcggcttcctgctcaacagccagttgctcgatttctcgcccgcgtcggccgagcacggcaagccggtcgcgaatcgcgtgcagccgggcaagcgcgcgcgctcgacgctcgcgcccgagctcgtattcgagaaaggctcgtcgcggctgatgatggcgctcggctcggcgggcggcgcttccaccgcgaacgacgtcgcgaaaacgctcgtcgggatgatcgactggggcatgacgatgcagcaggcgatcgcgctgccgaacttcggatcgcgcaacgggccgaccgagctcgagcaagggcgcgtgtccgatgcgctcgccggcgcgctgaaggcgcgcgggcacgacgtgcgcgtcgtcgagctcgggtcaagcctgcaggggatccagcggatcaacgtggaggagcagtcagtgtggttcggcggctcggacccgcggcgcgacgggatcgtcgccggagactga

SEQ ID NO: 58109 - protein, 627 aa, Burkholderia mallei ATCC 23344
MTDRIRPRPFRSRAGAIAAAFFAVTAAGCANAPGPGAQNAAAPASAASTPPAAPGAEAPAAPAELSSWVDKPGWTAQRDMIAAAHPLAAQAGQAMLKAGGTAVDAAIAAQMVLMLVEPQASGIGGGAFLLHENGKTIEAYDGRETAPAAATDRLFLDANGKPLPRAALGARTVGAPGALRMLELAHRAHGKLPWRRLFQPAIRLAEQGFPLGPRLAAALANEPSLARDPAARAYFYDRNGAPKPAGTTLKNPQLAATLRLVAAHGANAFYTGAIARDIVATVRQAPNPGVLSMQDLAQYRAKTREPLCADYRKWTVCGMPPPSAGGLVVAQILGLLEAQPDWRQIGAQKPVRNAVGVEPTPFAAHLFSEAGRLAYADRAQYVADPDFVAPPGGSWKRLVERRYVAERARLIGDASAGEASAGSPSGLPPATAADRGAEPPSGSQITVVDRYGNAVSMASTLDERFGSRLMVRGFLLNSQLLDFSPASAEHGKPVANRVQPGKRARSTLAPELVFEKGSSRLMMALGSAGGASTANDVAKTLVGMIDWGMTMQQAIALPNFGSRNGPTELEQGRVSDALAGALKARGHDVRVVELGSSLQGIQRINVEEQSVWFGGSDPRRDGIVAGD

SEQ ID NO: 58110 - DNA, 1722 bp, Burkholderia mallei ATCC 23344
  CDS (1)..(1722): transl_table=11
atgaatgcaacgaatcgtttcaagtcgacggtgctcgccgcgctcgtgagctcggcgctcgccggttttctgccgagcgcgcccgcccatgcgaagggcccgcagcagcgcgtcgtgctggacggctcggccgtcgcggtcgccgacaagtacagcgccgacgcggccgaggagatcttcaggcagggcggcaacgcggtcgacgccgcggtcgcgatcgccttcacgctcgccgtcacctatccggaggcgggcaacatcggcggcggcggcttcatgaccgtctacatgggcggcaagccgtactttctcgactatcgcgagcgcgcgccgctcgccgcgacgaaggacatgtatctcgacaaggacggcaacgtcgtcaagggcatgagcctgtacggcgatcgcgcggtcggcgtgcccggcacggtggccgggatgtgggaggcgcagaagcgcttcggcaagctgaagtggaagcaggtgatcgcgcccgcgatccgttacgcgcgcgacggcttcgttgtcgacgagcagctcgcgcagcgtggcgtcgacgcgtcgaaggagttcggcggcaagacgaacttcgatcaatacttcagcggcctgaaggcgggcgcgaccttcaagcagccggagctcgcggcggtgctcgcgcgcatcgcgaacgatggcgcgaaggatttctacgacggcaagacggccgacctgatcgccgcatcgatgaagaagggcggcggcctgatcacgaagcaggatctcgtccagtacaaggcggtgtggcgccagccggtccaggcgaactggaacggctatcgcgtgatcaccgcgccgccgccgagctcgggcggcatcggcctcgtgcagttgctgacgatgaaggcggaccgcaaggccgatttcgacggcgtcgcgctcaattcgccgcaatacgtgcatctgatcgccgagatcgagaagcgcgtgttcgccgatcgcgcgcagtacctcggcgatccggatttctacaaggtgcccgtcgcgcagttgaccgacgccgcgtacatcgcgaagcgcgcggccgaggtgaatcccgagaagccgtccgacacgaagagcgtgctgccgggcctcggcacgtcgatgccggagaaggccgagacgacgcatttctccgtcgtcgacaagtggggcaacgcggtgtcgaacacgtacacgatcaacggctacttcggctcgggcgtcgtcgccgaaggcacgggcatcgtgctcaacgacgagatggacgatttctccgcgaagccgggcgtcgccaacatgttcggcgtcgtcggcagcgacgcgaacgcgatcgagccgaagaagcggccgctgtcgtcgatgtcgccgacggtcctcacgaaggacggcaaggtcgcgctcgtgatcggcacgccgggcggctcgcggatcttcacgtcgatcttccaggtgatcacgaacctgtacgacttcaagatgccgctgaaggacgcggtcggcgcgatgcgctttcaccaccagctgctgccgccgaacacgatcttctgggagccgtaccactcgatcgacggcgagctggcgaagggcatcgaggcgaagggctacacgctcaagggccaggatttcagcggcgacatccaggcgatccggatcgacggcaagacgcccgaggcggtgtccgatccgcgcggccgcggcgtgtcgcgcgtgatccggtaa

SEQ ID NO: 58111 - protein, 573 aa, Burkholderia mallei ATCC 23344
MNATNRFKSTVLAALVSSALAGFLPSAPAHAKGPQQRVVLDGSAVAVADKYSADAAEEIFRQGGNAVDAAVAIAFTLAVTYPEAGNIGGGGFMTVYMGGKPYFLDYRERAPLAATKDMYLDKDGNVVKGMSLYGDRAVGVPGTVAGMWEAQKRFGKLKWKQVIAPAIRYARDGFVVDEQLAQRGVDASKEFGGKTNFDQYFSGLKAGATFKQPELAAVLARIANDGAKDFYDGKTADLIAASMKKGGGLITKQDLVQYKAVWRQPVQANWNGYRVITAPPPSSGGIGLVQLLTMKADRKADFDGVALNSPQYVHLIAEIEKRVFADRAQYLGDPDFYKVPVAQLTDAAYIAKRAAEVNPEKPSDTKSVLPGLGTSMPEKAETTHFSVVDKWGNAVSNTYTINGYFGSGVVAEGTGIVLNDEMDDFSAKPGVANMFGVVGSDANAIEPKKRPLSSMSPTVLTKDGKVALVIGTPGGSRIFTSIFQVITNLYDFKMPLKDAVGAMRFHHQLLPPNTIFWEPYHSIDGELAKGIEAKGYTLKGQDFSGDIQAIRIDGKTPEAVSDPRGRGVSRVIR

SEQ ID NO: 58112 - DNA, 1884 bp, Burkholderia pseudomallei K96243
  CDS (1)..(1884): transl_table=11
atgaccgaccggattcgtccgcgccccttccgctcgcgagccggcgcgatcgccgccgccttcttcgccgtcgccgccgccggatgcgcgaacgcgcccggcccgggcgcgcagaacgccgccgcgccggcctcggccgcttccacgccgccggcggcgccgagcgccgaagccccggccgcgcccgccgagctgtcgagttgggtcgacaagccgggctggaccgcgcagcgcgacatgatcgcggccgcgcatccgctcgccgcgcaagccggccaggcaatgctcaaggcgggcggcaccgccgtcgatgcggcgatcgccgcgcagatggtgctgatgctcgtcgagccgcaggcgtcgggcatcggcggcggcgcgttcctgttgcacgcgaacggcaagacgatcgaagcctatgacggccgtgaaaccgcgcccgccgccgccaccgaccgcctcttcctcgatgcgaacggcaagccgctgccgcgcgcggcgctcggcgcgcgcacggtcggcgcgccgggcgcgctgcggatgctcgagctcgcgcatcgcgcgcacggcaagctgccatggcggcgcctgttccagcccgcgatccggctcgccgagcaaggctttccgctcggcccgcggctcgcggcggcgctcgcgaacgagccgtcgctcgcgcgcgatccggccgcgcgcgcgtacttctacgaccggaacggcgcgccgaaaccggccggcacgacgctgaagaaccctcagctcgcggccacgctcaggctcgtcgccgcgcacggcgcgaacgcgttctataccggcgcgatcgcgcgcgacatcgtcgcgacagtccggcaggcgccgaatccgggcgtgctgagcatgcaggacctcgcgcaataccgtgcgaagacgcgcgagccgctgtgcgccgactatcgcaaatggaccgtgtgcgggatgccgccgccgtcggcgggcgggctcgtcgtcgcgcagattctcgggctgctcgaggcgcagccggactggcggcagatcggcgcgcaaaaacccgtgcgcaatgcggtgggcgtcgagccgacgccgttcgccgcgcatctgttcagcgaggcgggccggctcgcgtacgcggaccgcgcgcagtacgttgccgatcccgatttcgtcgcgccgccgggcggcagttggaagcgcctcgtcgagcggcgctacgtcgccgaacgcgcgcggctgatcggcgacgcgagcgcgggcgaggcgagcgccggctcgccgtccggcctgccgcccgcgaccgccgccgatcgcggcgcggagccgccgtcgggatcgcagatcaccgtcgtcgatcgctacggcaatgcggtatcgatggcgtcgacgctcgacgagcgcttcggctcgcggctgatggtgcgcggcttcctgctcaacagccagttgctcgatttctcgcccgcgtcggccgagcacggcaagccggtcgcgaatcgcgtgcagccgggcaagcgcgcgcgctcgacgctcgcgcccgagctcgtattcgagaaaggctcgtcgcggctgatgatggcgctcggctcggcgggcggcgcttccaccgcgaacgacgtcgcgaaaacgctcgtcgggatgatcgactggggcatgacgatgcagcaggcgatcgcgctgccgaacttcggatcgcgcaacgggccgaccgagctcgagcaagggcgcgtgtccgatgcgctcgccggcgcgctgaaggcgcgcgggcacgacgtgcgcgtcgtcgagctcgggtcgagcctgcaggggatccagcggatcaacgtggaggggcagtcagtgtggttcggcggctcggacccgcggcgcgacgggatcgtcgccggagactga

SEQ ID NO: 58113 - protein, 627 aa, Burkholderia pseudomallei K96243
MTDRIRPRPFRSRAGAIAAAFFAVAAAGCANAPGPGAQNAAAPASAASTPPAAPSAEAPAAPAELSSWVDKPGWTAQRDMIAAAHPLAAQAGQAMLKAGGTAVDAAIAAQMVLMLVEPQASGIGGGAFLLHANGKTIEAYDGRETAPAAATDRLFLDANGKPLPRAALGARTVGAPGALRMLELAHRAHGKLPWRRLFQPAIRLAEQGFPLGPRLAAALANEPSLARDPAARAYFYDRNGAPKPAGTTLKNPQLAATLRLVAAHGANAFYTGAIARDIVATVRQAPNPGVLSMQDLAQYRAKTREPLCADYRKWTVCGMPPPSAGGLVVAQILGLLEAQPDWRQIGAQKPVRNAVGVEPTPFAAHLFSEAGRLAYADRAQYVADPDFVAPPGGSWKRLVERRYVAERARLIGDASAGEASAGSPSGLPPATAADRGAEPPSGSQITVVDRYGNAVSMASTLDERFGSRLMVRGFLLNSQLLDFSPASAEHGKPVANRVQPGKRARSTLAPELVFEKGSSRLMMALGSAGGASTANDVAKTLVGMIDWGMTMQQAIALPNFGSRNGPTELEQGRVSDALAGALKARGHDVRVVELGSSLQGIQRINVEGQSVWFGGSDPRRDGIVAGD

SEQ ID NO: 58114 - DNA, 1731 bp, Methylococcus capsulatus str. Bath
  CDS (1)..(1731): transl_table=11
atgagacgcttcgctgcgatccaccacggaggggagtgggactttcccggctggcggcccgtcgcctcggctttcgctcgatgcctgctgctcgcggccgcggtttgcaccgcccaggcggccggcggacccggccatgccgccatcgccagcgcccatcccctggccacgcaggccgggttcgaaatcctggatcagggcggcaatgcgttcgacgccgcgatcgcgatctccgcaacactagcggtggtggagccgcaaagctccgggatgggcgggggcggattctggctgctgcgccgggcggccgacggcaagaccgtgatgctggacggacgggagaccgccccgcttgccgcccggcccgacatgtacctggatgtccgcggcgagccccgcccacgcgcctcgctggacggcgcgctgtcagccgggattccgggcttgcccgcggcgctggtgcggctgtccgaggactacgggcgcctgcctctggccaagtccctggcgcccgccatccgccatgccgaaaacggtttcgccgtgggccagcgctacgcgaaagcggcgaaagaccgcgaatcggccttacggcaatcacccgccgcacgtgccattttcctggatcaggggatggcgccccagcccggatttcatctggttcagaaagatttggcccagaccctcaggcggatcgcgcggttcggccatgccggattctatggcggaacgacggcgcggcttctggtacaaggagtgaaggatgccggcggtatctggcgggccggcgacctggcgggctatcgcgcggtggagcgggcgccggtgcggggcatgtaccgtggcatccggatcaccagcgctgccccgccatccagcggtggcacggtcctgctggaagccctgaacatattgtccggttacgatctcgcccgcatggatgcgtcgacgcgcaagcatctggtgatcgaagccgagcgccgcgcctaccgcgatcgcgacctttatctgggcgatccgtctttcgtgaagatgccgctgagccggttgttgagtgcggactacgccgcagggctgcgcgtcgccatccggcccgaccgcgttttgcccagcgcggctctgggtacggcgccggagccggcccggcagggcgacaacaccagccatttctccgtcatcgaccggctcggcaatctggtcgccgccaccctgagcatcaacgacagtttcggctccggcttcgtgccgcccgggacgggggttcttctcaacgacgaaatggacgatttcgcgaccgtacccggcaggcccaacgcctatggtctggtcggcggcgacgcgaatgccatcgcgccgggcaagcgcatgctctccagcatgtcgcccactttcctggaaacgaaggaccgcaccgcggtacttggaacgcccggcggcagtcggatcatctccatggtgctgttggccgtgctcgatttcgccgaagggcgggggccggaatcctgggtttctgtcgggcgtttccatcatcaatacctgcccgatgtcgtggagtacgagcccggcgggctgtcggaggacgacatccggggcctggagagccgcggtcacgccctgaagccgaccgggtaccgctacggcgacatgcaagcggtgcagtgggaccgggcacgcaaccgcctgagtgccgccagcgatccgcgcggagaaggcgcggcggaagtcaaatga

SEQ ID NO: 58115 - protein, 576 aa, Methylococcus capsulatus str. Bath
MRRFAAIHHGGEWDFPGWRPVASAFARCLLLAAAVCTAQAAGGPGHAAIASAHPLATQAGFEILDQGGNAFDAAIAISATLAVVEPQSSGMGGGGFWLLRRAADGKTVMLDGRETAPLAARPDMYLDVRGEPRPRASLDGALSAGIPGLPAALVRLSEDYGRLPLAKSLAPAIRHAENGFAVGQRYAKAAKDRESALRQSPAARAIFLDQGMAPQPGFHLVQKDLAQTLRRIARFGHAGFYGGTTARLLVQGVKDAGGIWRAGDLAGYRAVERAPVRGMYRGIRITSAAPPSSGGTVLLEALNILSGYDLARMDASTRKHLVIEAERRAYRDRDLYLGDPSFVKMPLSRLLSADYAAGLRVAIRPDRVLPSAALGTAPEPARQGDNTSHFSVIDRLGNLVAATLSINDSFGSGFVPPGTGVLLNDEMDDFATVPGRPNAYGLVGGDANAIAPGKRMLSSMSPTFLETKDRTAVLGTPGGSRIISMVLLAVLDFAEGRGPESWVSVGRFHHQYLPDVVEYEPGGLSEDDIRGLESRGHALKPTGYRYGDMQAVQWDRARNRLSAASDPRGEGAAEVK

SEQ ID NO: 58116 - DNA, 1794 bp, Silicibacter pomeroyi DSS-3
  CDS (1)..(1794): transl_table=11
atgcgcattcgctggcaggaaagtctttgtcttttgtgggtcggagccgcgaccccgctatttgcacaacaggctgcggacgcggtggcgcccgaaggcgctgcaacagggcaggtcaggccgttctctgccgtggtcgaggccgggcaggccgccaaggaggcggggcagccggtcgaggcggaaaactggatggtcgccgccgccaacccgcttgcggtcatggccgggggcaatgtgctgcgccagggcggtaccgccgccgatgcgatggttgctgtgcagaccgtgctgggcctggtcgagccgcaaagctccgggctcggcggcggcgccttcctggtctggtacgatggcaacaccgggcagatgaccacgctcgacgcccgcgaaaccgccccgcgcgaggcgacgccccggctgtttcaggatgccgatggccagccgctcaaattctttgacgccgtggtcggcggtctttcggtcggcacgccgggcacgcccgccctgctggaagaggcgcatcgccgctggggtcaggccaattgggggtcgctgttcggcgatgcgatctggctcgccgagaacgggtttaccgtttcgccccggctggcaggtctggtcgaaggggatgccgagaagcttggccgcttcccggaaacggcggcctatttcctgcccggtggcgccgccatcaaggcgggggatacgctgaagaaccccgcctatgccgccaccctgcgggcgctggccgccgaaggatcggctgccttctacggcggccccatcgccgccgatatcgtgcgcaccgtccgcaacgccgagggcaatcccggcgtgctctcgggcgccgatctggcgctttatcaggtgatcgagcgtgagccggtctgtgccagctaccgcgcctttgaggtctgcggcatggggccaccctcgtcgggcgcgctgacgctgggccagattctcggacttctggaaccctatgacctggcggcgctgggtgcggaaaaccccgaaagctggcggttgatcggcgacgcctcgcgcctcgcctttgccgaccggggccgctatatggcggacagcgatttcgtgccgatgccgaccaaggggctggtcgaccccgactatctgaaaacgcgcagcgaattgctcgccgggccaaatgcgctggaaagcgtcgcaccgggcaaccccgagttcgaccacgcttcgaactgggcagatgatatctcgcttgagctgccctcgacctcgcatatctcgatcgtggaccgctatggcaacgtgctgtcgatgactaccaccatcgagaacggctttggctcgcggctgatgacgaacggtttcctgctcaacaacgagctgaccgatttctcgttcaagacccatgacaatggcgtgcccatcgccaaccggctggagccgggaaaacgcccgcgttcctcgatggcgcccaccatcgtcatgcaggacggcaagcccgtgctggccatcggctcgcccggcggcagccgcatcatcggctatgtcgcccagtcgatcatcgcctgggccgattggagcatgaacgtacaacaggcgctgaacgcgccccatctggtcaaccgctttggcacctatgacttggaagagggcaccgatgcggccgggatggaagaggcgctgacaggtctcggctacaaggtctcggtgcgggcgctgacctcgggcctgcatgccatcgagatcggtgacacgctcaagggtgctgccgatacccgccgcgaaggtatcgcattgggtgaatga

SEQ ID NO: 58117 - protein, 597 aa, Silicibacter pomeroyi DSS-3
MRIRWQESLCLLWVGAATPLFAQQAADAVAPEGAATGQVRPFSAVVEAGQAAKEAGQPVEAENWMVAAANPLAVMAGGNVLRQGGTAADAMVAVQTVLGLVEPQSSGLGGGAFLVWYDGNTGQMTTLDARETAPREATPRLFQDADGQPLKFFDAVVGGLSVGTPGTPALLEEAHRRWGQANWGSLFGDAIWLAENGFTVSPRLAGLVEGDAEKLGRFPETAAYFLPGGAAIKAGDTLKNPAYAATLRALAAEGSAAFYGGPIAADIVRTVRNAEGNPGVLSGADLALYQVIEREPVCASYRAFEVCGMGPPSSGALTLGQILGLLEPYDLAALGAENPESWRLIGDASRLAFADRGRYMADSDFVPMPTKGLVDPDYLKTRSELLAGPNALESVAPGNPEFDHASNWADDISLELPSTSHISIVDRYGNVLSMTTTIENGFGSRLMTNGFLLNNELTDFSFKTHDNGVPIANRLEPGKRPRSSMAPTIVMQDGKPVLAIGSPGGSRIIGYVAQSIIAWADWSMNVQQALNAPHLVNRFGTYDLEEGTDAAGMEEALTGLGYKVSVRALTSGLHAIEIGDTLKGAADTRREGIALGE

SEQ ID NO: 58118 - DNA, 1704 bp, Corynebacterium glutamicum ATCC 13032
  CDS (1)..(1704): transl_table=11
atgacccctgttcaaacccaaggttatgcggtggcaactgcaaaccccatcgcttctgaagcagcctgcgcggtgttaagagaaggcggcactgcagctgatgctcttgtcaccgcgcagtttgttttgggactgacggaaccgcagtcgtctggccttggtggtggcggatacattctgtactacgacgccgaagccaatgcggtgacagccattgatggccgtgaaacagcgccagttgctgctgatgaaaactatctcattcatgtttctgcagaggatcaaacggcacctgttcctgatgcccgacgttccggcaggtcaattggtgtgccaggaatcgtggcagcccttggacagctgcatgattcattcggaaagacctcctggcaggacgtgctgacaactccgcagcagctcgcaactgatggtttttccatcagccctcgcatgtcagcatcaattgctaactccgctgaggatctctcccacgatccggaagctgccgcatatttccttgatgaaaacggtgatgcgaaggcacccggcacacttttacaaaaccctgactatgcagaaacgattcgtctcatctctgaaggtggccccgatgcgttctacacgggtgagattgcagcagacatcgtggaacgcgccacccgtgaggttgacggtttcacaccatcactgatgagcacggcagatttggctgcctacactccggaaactcgtgaagctttgtgtgctccctaccgcgacaagattgtttgtggcatgccaccgtcatcatcgggtggcgtcacagtgatggaaaccctgggtatcttgaacaactttgatctcgcccaatacccacccactgaggttggtttggatggcggattgccaaatgcggaagctgttcacctgatttcagaggctgagcgcctggcttatgctgatcgcgatgcttacatcggtgatcctgctttcgtggaagttccagcaggtggtgtcgaagagttgatcagcgatgtctacacgggtgaacgctcagaacttattgatccagagcattcaatgggtcaggcaactgctggtctgagccaggaaccagtcatggctgccctgccggaaagtggcaccagccatatttccatcatcgattcctatggcaacgcagcatcgttgaccaccagtgtggaagctgctttcggttccttccacttcacccgtggtttcattttgaataatcagctgacagatttctccgctgaaccacttgatgaggacggcgagcccgtggccaatcgtgtcgagtcagcaaagcgcccacggtcttccatgtcgccaatgctagtgttcaacgccagtggcgatggtgaaatcgcggatctgaatatggtgctgggctcccctggcggatccttgattattcagtacgtggtgaaaaccctggtcaacatcatcgactgggatatggatccacagcaggcagtgtctgcgcccaactttggtgcgatgaaccagcctaagactggactgggaagcgagcatccgctgatcgccaatgattcagcagagcttgtatctgaactggaaagcaaaggccacgaagttaatgtgggcgagcaatccagtggcctatcggcgttggtgaaaaacggcgacaccattgtcggtggcgccgatccacgtagagaaggcgtggtcttgggtggctaa

SEQ ID NO: 58119 - protein, 567 aa, Corynebacterium glutamicum ATCC 13032
MTPVQTQGYAVATANPIASEAACAVLREGGTAADALVTAQFVLGLTEPQSSGLGGGGYILYYDAEANAVTAIDGRETAPVAADENYLIHVSAEDQTAPVPDARRSGRSIGVPGIVAALGQLHDSFGKTSWQDVLTTPQQLATDGFSISPRMSASIANSAEDLSHDPEAAAYFLDENGDAKAPGTLLQNPDYAETIRLISEGGPDAFYTGEIAADIVERATREVDGFTPSLMSTADLAAYTPETREALCAPYRDKIVCGMPPSSSGGVTVMETLGILNNFDLAQYPPTEVGLDGGLPNAEAVHLISEAERLAYADRDAYIGDPAFVEVPAGGVEELISDVYTGERSELIDPEHSMGQATAGLSQEPVMAALPESGTSHISIIDSYGNAASLTTSVEAAFGSFHFTRGFILNNQLTDFSAEPLDEDGEPVANRVESAKRPRSSMSPMLVFNASGDGEIADLNMVLGSPGGSLIIQYVVKTLVNIIDWDMDPQQAVSAPNFGAMNQPKTGLGSEHPLIANDSAELVSELESKGHEVNVGEQSSGLSALVKNGDTIVGGADPRREGVVLGG

SEQ ID NO: 58120 - DNA, 1650 bp, Pseudomonas syringae pv. syringae B728a
  CDS (1)..(1650): transl_table=11
atgcgctggaccccaagggctaaacctttcgtcttctgccaaagagaaacgcttatgttcgatgatctggattacaaccaaccgtacgcgtcggcccgctcgccggtgatgggcaacaacatggtcgcctgctctcagccattggccgctcaggccgggctggacatgctgcgccgtggcggtaacgcggtcgacgccgccatcgccgcggccatggtgctgactgtggtcgagcccaccggctgcggaatcggcagcgatgccttcgccatcgtctgggacggcagcaagctgcaaggcttgaacgcgtccggccgcgcgccacaagcctggacaccggaatacttcgaaggccagagccagatggcgcaacgcggctggcctgcggtcagcgtgccaggtgcggtatcggcctgggtggaactgtcagcgcgctacggcaaactgcccttcgcgaccctggccgaaccggcgattggctacgcccgcgacggctatcaggtcacgccgatcatcgccgagttgtggaaacgcggcgcgcatctgctcaaagaccaaccgggctttgccgagtgcttcatgccgggtggcaaggcccctatggccggagaaaaaatccggctcaaggatcacgcccgcacgctggaactgatcgcgcagaccaaaggcgaagcgttctatcgcggcgaactggcgcaaaccatcatcgcccatgccaacgccaatggcagcgtaatgagcctcgacgacctggcgacgcataccgtggactggatcgacaccctgtcggtgccctacgcaggcgctgtggtgcatgaactcccgccgaatggccagggcattgccaccttggccggcctgaccatgctcgaagcactgggcgtcggcgaacacccggtggacagccttgaaacggttcacccggtgctggaagcaatgaaactggccttggccgacctcgacgaacatgtcgccgacagcgagcacatgcgcgtgccctcagccgatttgctgggcaaggcgtacctgacagaacgcgcgggcctgatcaccgatcaggccgccaatcccgggcacggctcgccaaaaccgggcggcacggtgtacctctcggcagcggacgaaagcggcatgatgatctcgttcatccagtccaactacatgggcttcggttcgggtgtggtggtacccggtacgggcatcagcatgcagaaccgtggcgcgggcttctcgctggatccgcaacacgtcaattacgttgcgccgcgcaaacgcccgttccataccatcatccccggttttgtcatgaatgccgacggcacgccgctgatgtccttcggtttgatgggcggcccgatgcaggcgcagggtcatttgcagatgatgatgcgcatcctgcgctacaaacagaacccgcaagccgctgccgacgcaccgcgctggagaatcgaagccggtctgaaagtcgccgtggagcgtgcgtttgaccccgaagtggtgaaagcactgcgcgccaaaggtcacgacatcgatgtcgaagaaccgagcggcgtgtttgccttcggcggtgcgcagattattcagcgcaccgcgcatggatacgtgggcgggaccgatccgagaaaggacggaacggtcgcagcttattaa

SEQ ID NO: 58121 - protein, 549 aa, Pseudomonas syringae pv. syringae B728a
MRWTPRAKPFVFCQRETLMFDDLDYNQPYASARSPVMGNNMVACSQPLAAQAGLDMLRRGGNAVDAAIAAAMVLTVVEPTGCGIGSDAFAIVWDGSKLQGLNASGRAPQAWTPEYFEGQSQMAQRGWPAVSVPGAVSAWVELSARYGKLPFATLAEPAIGYARDGYQVTPIIAELWKRGAHLLKDQPGFAECFMPGGKAPMAGEKIRLKDHARTLELIAQTKGEAFYRGELAQTIIAHANANGSVMSLDDLATHTVDWIDTLSVPYAGAVVHELPPNGQGIATLAGLTMLEALGVGEHPVDSLETVHPVLEAMKLALADLDEHVADSEHMRVPSADLLGKAYLTERAGLITDQAANPGHGSPKPGGTVYLSAADESGMMISFIQSNYMGFGSGVVVPGTGISMQNRGAGFSLDPQHVNYVAPRKRPFHTIIPGFVMNADGTPLMSFGLMGGPMQAQGHLQMMMRILRYKQNPQAAADAPRWRIEAGLKVAVERAFDPEVVKALRAKGHDIDVEEPSGVFAFGGAQIIQRTAHGYVGGTDPRKDGTVAAY

SEQ ID NO: 58122 - DNA, 1668 bp, Pseudomonas fluorescens Pf-5
  CDS (1)..(1668): transl_table=11
atgcgcattctgttgttcaagaccctggccctgacggccgctatcgccgccagcagctcggccttcgccgtgaccctggaaggcggggcggtggccgcgcccaaccagtacggcgccgatgtcgcggcgcagatcctcaagaagggcggcaacgcggtggatgccgcggtggccacggccttcgccctggccgtgacctaccccgaggccggcaacatcgggggcggcgggttcatgacgatgtacatcgacggcaagccgtacttcctcgactaccgggaaaccgcacccaaggccgcgacccggaacatgtacctgaatgaaaagggcgaggtgatcgagaacctgagcctggtgggcgctcgcgccgccggggtgccgggtacggtgatgggcctgtgggaggcgcaccagaagttcggcaagctgccgtggagcgagctgatcaccccggccgtgggttatgcgaagaacggcttcaaggtggccgacaagcagtaccagtaccgcgaggatgcgttgaagctgttcaacggcaccaccaacttcggcgactacttcggcagcatgaaaccgggcgagaccttccgccagccggagctggccgcgaccctggagcgcatcgccgaccagggcgccaaggagttctacagcggcaagaccgccgacttgctggtggcgcagatgcaggccgacaagggcctgatcaccaagcaggacctgcaggactacaaggtccagtggcgccagccgctgcaggtgaccttccgtggcaacaccctgtacaccgcgccgccgcccagctctggcggggtggccctggcgcagctgatcagcatcaaggaagagcgcgcggcggacttcaagggtgtggagctcaattcagccaagtacattcacctgctggcggaaatcgaaaagcgggtgttcgccgaccgcgccgactacctgggcgacccggcgttttccgatgttccggtcaagcaactgaccgacccggcgtatctgaaaaaacgcgccgccgaggtcaaccccaacgccatctcggctaccgagaaagtgcgccccgggcttgagccgcaccagaccacccacttctccatcgtcgatgcccagggcaacgcggtgagcaacacctacaccctgaactgggactatggcagcggcgtggtggtcaagggcgcgggctttttgctcaacgacgaaatggacgacttcagcgccaagccgggcgtggccaacgccttcggcgtagtgggcggcgacgccaacgccatcgccccgggcaagcgcatgctgtcctccatgagcccgagcctggtgacccgcgatggcaaggtcaccctggtgctgggcacccccggtggttcgcggatcttcacctcgatcttccaggtgctgaacaacctctacgactaccacctgcccctggaaaaggccgtggccgcgcagcgcgtgcatcaccagctgctgcccaaggacacgatctactacgacgcctatgcgccgctcaccggcaaggtggccgacgagctcaaggccatgggctacaccctggaagaccagggctgggagatgggcgatatccaggccatccgggtcaatggcaccgcgcttgaaaccgcttccgacccacgtggccgcggtgtcggcaaggtcgtcaaataa

SEQ ID NO: 58123 - protein, 555 aa, Pseudomonas fluorescens Pf-5
MRILLFKTLALTAAIAASSSAFAVTLEGGAVAAPNQYGADVAAQILKKGGNAVDAAVATAFALAVTYPEAGNIGGGGFMTMYIDGKPYFLDYRETAPKAATRNMYLNEKGEVIENLSLVGARAAGVPGTVMGLWEAHQKFGKLPWSELITPAVGYAKNGFKVADKQYQYREDALKLFNGTTNFGDYFGSMKPGETFRQPELAATLERIADQGAKEFYSGKTADLLVAQMQADKGLITKQDLQDYKVQWRQPLQVTFRGNTLYTAPPPSSGGVALAQLISIKEERAADFKGVELNSAKYIHLLAEIEKRVFADRADYLGDPAFSDVPVKQLTDPAYLKKRAAEVNPNAISATEKVRPGLEPHQTTHFSIVDAQGNAVSNTYTLNWDYGSGVVVKGAGFLLNDEMDDFSAKPGVANAFGVVGGDANAIAPGKRMLSSMSPSLVTRDGKVTLVLGTPGGSRIFTSIFQVLNNLYDYHLPLEKAVAAQRVHHQLLPKDTIYYDAYAPLTGKVADELKAMGYTLEDQGWEMGDIQAIRVNGTALETASDPRGRGVGKVVK

SEQ ID NO: 58124 - DNA, 1836 bp, Pseudomonas fluorescens Pf-5
  CDS (1)..(1836): transl_table=11
atgttctcgaacttccctccccgtcaccgccaactgctcggcctcagcctgctggctgccgccctcagccttggcgcctgccacaacccgccttcttccaacgctctgcctgccgccccggaaatcgcctcgggctaccgcaccgacatgcagactcgccatgccggcaagcacatggccgccgctgccaacccgctggccgccgaggccgggcgcgaaatgctgcgcaaaggcggctcggccatcgacgcggcgattgccatgcaggccgtgctgaccctggtggaaccgcagtcctcggggattggcggcggcgcgatgatcgtgctctgggacggcaaggccgtgcgcacctatgacgggcgggaaaccgcgccggccggcgccaccgagaagctcttcctgcaagcggacggcaagcccatggccttcccccaggcgcagatcggtggacgctcggtcggcaccccgggcgtgctgcgggccctggaaatggcccaccagaaacacggccgcctgccctgggcgcaattgttcgaaccggcgatccgcctggccgagcaaggcttcgccatctcgccacggctgcacaccatgatcagcgccgatcctttcctggcgcgctcgccggacatggccgcgtacttcctgaatgccgacggcacgccgaaagccgtgggcgccttgctgaagaacccgccactggccgcggtgctcaaacgcatcgccgaggaaggcccggatgccctgtacaagggcccggtggcggcagaaatcgtcgccaaggtccagggccacgccaaccccggcagcctgtcgctcaacgacctgcaaggctaccgcgccaaggaacgcgcgccgctgtgcagcgactacaagcgctggcaggtgtgcggcatgccgccgccctcctccggcggcgtggcggtggcgcagatactcggcaccctgcaggccctggaacagcgcgacccgcgctacaccctggccaacctcaagccgcagaaaaccagcctgcccgccggccttgagcccgcgccacaagcggtgcacctgattgccgaagccgagcgcctggcctatgccgaccgtggcctgtacgtggccgacagcgactttgtgcccgtgccggtggccggcctgatcgccccggactacctggccaagcgtgccgcactgattggcgagcgcagcatgggcaaggccgaaccgggcaagccccagggcatccaggtggcctatgcaccggaccgttcgccaatgcgcatctccacctcgcaagtggtggcagtggatgacctgggcggcgccgtatcgatgaccaccacggtggaagcggccttcggctcgcacctgatggtccagggcttcatgctcaacaaccagatgaccgacttctcgttcattcccgaggaaaacggccagccggtggccaaccgcgtccaaccgggcaagcgcccgcgctcgtccatggcgccgaccctggtcttcgaccgtgccagcggcgaactgctggccagcgtcggctcccccggcggctcgcagatcatcgagtacgtggccaagtcggtggtcggcatgctcgactggaacctggacccgcaagccgccgtcggcctgcccaacttcggcagccgcaacgggccgaccgaactggagaaaggccagttcagcccggccctgaagcaggcactgcaagctcaggggcatgaggtaaacgagatcgacatgaccagcggcacccaggcaatcgttcgcgtgcgtgatgcacagggcaaggcctcctgggccggcggcgccgatccacggcgtgaaggggaagcgctgggggattga

SEQ ID NO: 58125 - protein, 611 aa, Pseudomonas fluorescens Pf-5
MFSNFPPRHRQLLGLSLLAAALSLGACHNPPSSNALPAAPEIASGYRTDMQTRHAGKHMAAAANPLAAEAGREMLRKGGSAIDAAIAMQAVLTLVEPQSSGIGGGAMIVLWDGKAVRTYDGRETAPAGATEKLFLQADGKPMAFPQAQIGGRSVGTPGVLRALEMAHQKHGRLPWAQLFEPAIRLAEQGFAISPRLHTMISADPFLARSPDMAAYFLNADGTPKAVGALLKNPPLAAVLKRIAEEGPDALYKGPVAAEIVAKVQGHANPGSLSLNDLQGYRAKERAPLCSDYKRWQVCGMPPPSSGGVAVAQILGTLQALEQRDPRYTLANLKPQKTSLPAGLEPAPQAVHLIAEAERLAYADRGLYVADSDFVPVPVAGLIAPDYLAKRAALIGERSMGKAEPGKPQGIQVAYAPDRSPMRISTSQVVAVDDLGGAVSMTTTVEAAFGSHLMVQGFMLNNQMTDFSFIPEENGQPVANRVQPGKRPRSSMAPTLVFDRASGELLASVGSPGGSQIIEYVAKSVVGMLDWNLDPQAAVGLPNFGSRNGPTELEKGQFSPALKQALQAQGHEVNEIDMTSGTQAIVRVRDAQGKASWAGGADPRREGEALGD

SEQ ID NO: 58126 - DNA, 1788 bp, Rhodobacter sphaeroides 2.4.1
  CDS (1)..(1788): transl_table=11
atgcccatggtccgcacgctcgccctgttcctcgcctcggccctgcccgccttcgcgcaacaggccagcgacacgctggcccccgaggcgcccaccgcgcccgcggccttcggcagcctctcgcccgcagccgccgcggcgatggagacgcgcgactcgggacggcccgtcgaggcggaggactggatggtggtggctgcgaacccgctcgccgtcgaggccggagccgagatcctgcgcagcggcggcagcgcggccgatgccatggtcgccgtccagaccgtgctggggctggtcgagccgcaatcctcggggctcggcggcggcgccttcctcgtctggttcgatgcggcgaccggcgccgtcaccacgctcgatgcgcgcgagaccgcgccgcgggccgcgaccccccggctcttccagacgcccgagggcgagccgctggaattcctcgacgcggtggtgggcggccggtccgtgggcacccccggcacgccgcttctgctcgaggaggcgcaccggcgctggggcaggtccggctggtccgacctcttcgatccggccatccgtctggccgaggagggctttgcggtctcgccgcgtctcgcggggctcgtggccgaggatcccgaggggctctcgcgctttcccgccaccgccgcctatttcctgcccgagggccagccgctgaaggccggagccctcctgaagaaccccgactatgccgagacccttcgccgtctggcggccgaaggcgcggatgcgttctaccgcggccccatcgccgaggagatcgtggccaccgtccgcggcgccgagggcaatccgggcgtgctcgcgctcgaggatctggccgcctaccgcgtggtggagcgtccgcccgtctgcgccgactaccgcggcgccgagatctgcggcatgggtccgccctcgtcgggagcgctgaccgtggggctgatcctcggcgcgctcgagccctacgatctggccgccctcgggcccgagaatgccgaaagctggcgcctgatcggcgatgcgacccgcctcgccttcgccgaccgcggccgatacatggccgacagagatttcgtgccggtgcccgtcgaggggctgctcgatcccgcctatctcgccgcccgggccgagcttctgcgcggagacgatgcgttgcccgaggtggcggccggcacgcccgaatgggatcacgcggggctcctcgcccccgacgagagcctcgaattgccctcgacctcgcatatctccatcgtggatgcggcgggcaacgtgctctcgatgacgacgaccatcgagaacggcttcggctcgcggctgatgacgaacgggttcctcctgaacaacgaactcaccgacttctccttccgcacccatgcggagggctggcccatcgcgaaccgggtggagcccggcaagcgcccgcgctcgtcgatggcgcccaccatcgtactccgcgacggcaagcccgtgctggcggtgggcagccccggcggctccacgatcatcggctatgtggcacaggcgctgatcgcccatctcgactggggcatggatgtgcagcaggcggtggccatgccgcatctcgtgaacactttcggcccgttccagatcgaggccggcacccgcgccgaagcgctgagccagccgctcgccgatctgggttatgacgtgaagccggtggacctgacctccggcctccatgcgatctcgctgggcgagaggttgcagggcggcgccgatccccgccgcgagggaatcgcgctgggcgagtga

SEQ ID NO: 58127 - protein, 595 aa, Rhodobacter sphaeroides 2.4.1
MPMVRTLALFLASALPAFAQQASDTLAPEAPTAPAAFGSLSPAAAAAMETRDSGRPVEAEDWMVVAANPLAVEAGAEILRSGGSAADAMVAVQTVLGLVEPQSSGLGGGAFLVWFDAATGAVTTLDARETAPRAATPRLFQTPEGEPLEFLDAVVGGRSVGTPGTPLLLEEAHRRWGRSGWSDLFDPAIRLAEEGFAVSPRLAGLVAEDPEGLSRFPATAAYFLPEGQPLKAGALLKNPDYAETLRRLAAEGADAFYRGPIAEEIVATVRGAEGNPGVLALEDLAAYRVVERPPVCADYRGAEICGMGPPSSGALTVGLILGALEPYDLAALGPENAESWRLIGDATRLAFADRGRYMADRDFVPVPVEGLLDPAYLAARAELLRGDDALPEVAAGTPEWDHAGLLAPDESLELPSTSHISIVDAAGNVLSMTTTIENGFGSRLMTNGFLLNNELTDFSFRTHAEGWPIANRVEPGKRPRSSMAPTIVLRDGKPVLAVGSPGGSTIIGYVAQALIAHLDWGMDVQQAVAMPHLVNTFGPFQIEAGTRAEALSQPLADLGYDVKPVDLTSGLHAISLGERLQGGADPRREGIALGE

SEQ ID NO: 58128 - DNA, 1527 bp, Synechococcus elongatus PCC 7942
  CDS (1)..(1527): transl_table=11
atggctaagcggggggcgatcgccgccggacatccacagaccgttgcggctgggctagtggccttggaagcgggaggcaatgcttttgatgccgcgatcgcagctctggcggcttcgtggatcaccgagcctctactgacctccccggctggaggtggctttctgctcgcagcccagccccaccaaagcccccgcctctatgacttcttttgccagacgcccagtcagcgatcgccagaaccacaggatttctatcccgttggggttgattttggcgatgcgattcaggagtttcatatcggtttaggctctgtggccgtacccggactcttggctgggctgctgcgagtgcaggccgaactgggacggctgccgcgctcagtcgtcttggaaccggcgatcgctctgggccgcgaaggagtagaaatcaatgcctttggtgaatactgctttcggctactggatccgatcgtgactgcaacgccagaagcgcgatcgctctaccagccgcagggtcaaccgctgcgatcgggcgatcgctttagaaacactgacttagctgccgttttagaagagttggctgcgcccaagggtcaggccttctacgaacacgaactgttgcctgcgatcgccaattactgcgcggccggcggcaacttgcaactgacggatttgcagcagtatcccgtcgccgtgcgatcgcccctcgcgattcccttcggcaactatcgtctgctaaccaatccgccacccagcagtggtggtctgctgattgcctttgccttgtcgctcctcaatcagtctgtaatcaacctcaatcctcagcagcatccgcaggatcttgtacagctgatgcggttgaccaatagggctcgccgcgactttttggatggcgcactgcaacaagctggcatcgatcgccaatttctgacaggtgccgcttttgagcaagccgctgccggctggctgaatcggctgggcagcaccacgcatatcagtgtcattgatgccgaaggcaacgctgccagcctcaccagttccaatggcgaaggttgcggtcatgtcctgccggacaccggcatcatgctcaacaacatgctgggcgaagccgatctgcaccctttgggttttcatcgctggccgctggggcaacgcctcggctcgatgatgtcgcccagcctgctttggggcgaagacgatcgcccgcatttggtgcttggctccggcggctccaaccggattcgcacggccattctgcaggtgattcatcgctgggcggtcgaaggctacgcacttgctgaggcgatcgcggctcctcggctgcattgggaggctggagtgttgaactgggagccaggctgggaccctgcggggattgaagcagcaagtcaaccctctgaaactgcgatcgcttggactactcccaacatgttctttggcggcgtgcatgccgtgggactgacagcgactggtgaattttgtggagcgggcgatccacggcgatcgggcgtctatggttgctgttga

SEQ ID NO: 58129 - protein, 508 aa, Synechococcus elongatus PCC 7942
MAKRGAIAAGHPQTVAAGLVALEAGGNAFDAAIAALAASWITEPLLTSPAGGGFLLAAQPHQSPRLYDFFCQTPSQRSPEPQDFYPVGVDFGDAIQEFHIGLGSVAVPGLLAGLLRVQAELGRLPRSVVLEPAIALGREGVEINAFGEYCFRLLDPIVTATPEARSLYQPQGQPLRSGDRFRNTDLAAVLEELAAPKGQAFYEHELLPAIANYCAAGGNLQLTDLQQYPVAVRSPLAIPFGNYRLLTNPPPSSGGLLIAFALSLLNQSVINLNPQQHPQDLVQLMRLTNRARRDFLDGALQQAGIDRQFLTGAAFEQAAAGWLNRLGSTTHISVIDAEGNAASLTSSNGEGCGHVLPDTGIMLNNMLGEADLHPLGFHRWPLGQRLGSMMSPSLLWGEDDRPHLVLGSGGSNRIRTAILQVIHRWAVEGYALAEAIAAPRLHWEAGVLNWEPGWDPAGIEAASQPSETAIAWTTPNMFFGGVHAVGLTATGEFCGAGDPRRSGVYGCC

SEQ ID NO: 58130 - DNA, 1731 bp, Rhodospirillum rubrum ATCC 11170
  CDS (1)..(1731): transl_table=11
atgggggtgttgaaggtcgtcgtcaccacgggtctggccttcgcggcgctgaccttgccgagcatggcccaggaaaaagccatcttcgacccgatggaccgcatccatccggtgtgggccgagcatggcatggtcgccgcccaagaacggctggccgctgaaatcggccgcgacattctggccaagggcggcaacgccgttgacgccggcgtcgccgtcgccttcgccctggcggtgacgctgccccaggccggcaatatcggcggcggcggcttcatgatcgtccatgacggcccaaccggcaaaaccgtcgccatcgactatcgcgaaaaggcccccgccggcgccagccgcgacatgttccttgatgcccaggggaatgccgacagcggaaagtcgctctacagcggcgcggcctcgggcgtcccgggcacggtcgccgggatgaaggcggcgctcgatgctttcggctcgatggactgggccgaggtcatcgccccggccatccgtttggccgaaggcggcatcgtcgtcacgcccaagctggccgacagcctgaaggacgcccgcaagcagcttgaggcgtttccgtcgtccgcccgcatctttttgaaagagggcggggccgattatcgccccggcgataggctggtgcaggccgatctggcggcaacgctgaagacgatcgccgccgaaggccccgacggcttttacaagggcgcggtcgccgaaaaaatctcggccgccgtacaggcggcgggtgggcttatcaccccccaggatatggccgattacacggtcgtgatgcgcgagccggtgcgcggcggctatcgcggctatgagatcgtctccatgccgccgccctcctcggggggcgtgcatctggtccagatcctcaatgcgctagagggctatccgatcggcgcccttggccagaacacgggacagacccttcatctgatggccgaaaccatgaagctggcttacgccgaccgcgcgcattatctgggcgatccggatttcacggcggtgccggtggcggcgctgacgagcaaggattacgcggcggccatgcgcgagacgatcagcgccgatttcgcccgtccctcggccaccatcgggcccggcgatctgacgccctatgaatcggaccagaccacgcatttttccatcatcgacaagaacgggagcgcggttgccaacacctataccctcaacctgagctatggctcgggtctggtggccgaggggacgggtgttttgatgaacaacgaaatggatgatttctcggccaaacccggtgtgcccaacgccttcgggctggtcggcggcgacgccaacgcggttcaggcgggcaagcggccgctgtcgtcgatgacgccgacgatcgtgctcaaggatggcaaggtctggcttgtcaccggctcgcccggcggggcgcggatcatcaccaccgtgctgcaggtgatcatgaacatgatcgatcacaagatgaacgtggcggaggcctcgaccgccccccgggcccatcatcagtggctgcccgatgaactgcgcatcgaggaggggatcagcctggatacgatccgcatcctgcaggccaagggccatacgatcgccctaaaaccggcgatggggtcgacgcaatcgatcatgcgcgatggcgcgagcggcgccgtctatggcgcctcggacccgcgcgacccggatgcggcgacggtgggctattga

SEQ ID NO: 58131 - protein, 576 aa, Rhodospirillum rubrum ATCC 11170
MGVLKVVVTTGLAFAALTLPSMAQEKAIFDPMDRIHPVWAEHGMVAAQERLAAEIGRDILAKGGNAVDAGVAVAFALAVTLPQAGNIGGGGFMIVHDGPTGKTVAIDYREKAPAGASRDMFLDAQGNADSGKSLYSGAASGVPGTVAGMKAALDAFGSMDWAEVIAPAIRLAEGGIVVTPKLADSLKDARKQLEAFPSSARIFLKEGGADYRPGDRLVQADLAATLKTIAAEGPDGFYKGAVAEKISAAVQAAGGLITPQDMADYTVVMREPVRGGYRGYEIVSMPPPSSGGVHLVQILNALEGYPIGALGQNTGQTLHLMAETMKLAYADRAHYLGDPDFTAVPVAALTSKDYAAAMRETISADFARPSATIGPGDLTPYESDQTTHFSIIDKNGSAVANTYTLNLSYGSGLVAEGTGVLMNNEMDDFSAKPGVPNAFGLVGGDANAVQAGKRPLSSMTPTIVLKDGKVWLVTGSPGGARIITTVLQVIMNMIDHKMNVAEASTAPRAHHQWLPDELRIEEGISLDTIRILQAKGHTIALKPAMGSTQSIMRDGASGAVYGASDPRDPDAATVGY

SEQ ID NO: 58132 - DNA, 1809 bp, Myxococcus xanthus DK 1622
  CDS (1)..(1809): transl_table=11
atggactgttcagacagcgcgaggagggctgaacccgtgaaggacacgagcttccgcggtgcggtgctgaagcgagggctgctggccgcggtgatgatggtggcgtgtgtggcgcaggcggcgcggccctaccggggcggcgcggtggccacggcctacccgcaggcgagcgcggcggcgttggagatgctggagaagggcggcaacgccacggacgcggcggtggcggcggccttcgtggcggcggtggtgggtccctaccactccggcgttggcggcggcggcttcgcattggtgcacgacgccaagagcggcgacacgaaggtgctggatttccgcgaggtggcccccaaggcggccacgcgcgacatgtacgtgaaggacggcaaggtggtgccgggcctgtccacggacggcgcgctgagcgtggcggtgccgggcgccgtcgcgggctacctggagctgctcaaggcgcacggaaagttgaagccggcggtggtgctggcgccggccatcgcggcggcacgcaagggcatgtgggtgacgccgcgctaccgcaccatggcggagggccggctggcctgtctgagccgggacgcggaggcctcacgcgtgttcctggtgaagaatgcccagggccagtgggaacccccgcccgtggggcacgtcatccgccagcccgacctggcgcgtacgctgtcctccatcgcgaaggggggcgccaaggccttctatgcggggccggtggcgaaggccatcgccacgtcggtccaggctggcggcggcatcctcacccaggaggacctcgcggcctacaagacgcggagcgccacgcccctggagggcacgtaccgcggccaccgcatcctcaccatgccgccgccgagcgcggggggcgtggccgtcatccaggtgctgaccgcgatggagcaactgcgcccccagggcgtgacgttccgcgacgcggaggcgctgcacctctacgcggaagccgtgcggcgggcctacgtggaccgcgcgaagtacctgggggacccggccttcgtggacgtgcccctggcgcggctggtgtcacccggccacgtcgcggacctggcgggctccatcgacccgaagaaggccacgcccagcgcgtcgctgctggcgccgaaggaaggcgtgcggggctccacgctgacggacgagcccaccaccctgacgcccgagccggagaagaagaacaccacgcacatctccgtcatcgacaaggacggcaacgcggtggcgatgacgaccacggtgaactacggcttcggctcgtgcgtggtggccaagggcaccggcgtgctgctcaacgatgagatggatgacttcgccgcgcagccgggcgtgcccaacgcgtacggcctggtgacgggcgagcccaacgccatcgcaccgggcaaggttccgctgtcctccatggcccccacgctggtgttctccaaggaagacccccggcgcgtcatgctcgcggtgggcagccctggcggctccaccatccccaccaccgtcatccaggtcatcagcaacgtggtggaccacggcatggacgtggcgcgagcggtgaatgaaggccgcgtgcatcaccagtacctgcccgacgagctgtgggtggacaagtggggcctggagccggcgacgctgtccgtgctggaggccaagggccacaaggtgcgccgcgtggagcagtggggcgacgcggaggccgtctacagcgacccgaagacggggctgcgcttctccgcgagtgacccgcgcaacgagggcgccgccctgggacaggattga

SEQ ID NO: 58133 - protein, 602 aa, Myxococcus xanthus DK 1622
MDCSDSARRAEPVKDTSFRGAVLKRGLLAAVMMVACVAQAARPYRGGAVATAYPQASAAALEMLEKGGNATDAAVAAAFVAAVVGPYHSGVGGGGFALVHDAKSGDTKVLDFREVAPKAATRDMYVKDGKVVPGLSTDGALSVAVPGAVAGYLELLKAHGKLKPAVVLAPAIAAARKGMWVTPRYRTMAEGRLACLSRDAEASRVFLVKNAQGQWEPPPVGHVIRQPDLARTLSSIAKGGAKAFYAGPVAKAIATSVQAGGGILTQEDLAAYKTRSATPLEGTYRGHRILTMPPPSAGGVAVIQVLTAMEQLRPQGVTFRDAEALHLYAEAVRRAYVDRAKYLGDPAFVDVPLARLVSPGHVADLAGSIDPKKATPSASLLAPKEGVRGSTLTDEPTTLTPEPEKKNTTHISVIDKDGNAVAMTTTVNYGFGSCVVAKGTGVLLNDEMDDFAAQPGVPNAYGLVTGEPNAIAPGKVPLSSMAPTLVFSKEDPRRVMLAVGSPGGSTIPTTVIQVISNVVDHGMDVARAVNEGRVHHQYLPDELWVDKWGLEPATLSVLEAKGHKVRRVEQWGDAEAVYSDPKTGLRFSASDPRNEGAALGQD

SEQ ID NO: 58134 - DNA, 1761 bp, Mesorhizobium sp. BNC1
  CDS (1)..(1761): transl_table=11
atgggtgtaagagaaacactcgccaagggcgcaatggctctcggccttctccttgccacacccgccctggcccagcaggcggccgacacgcttgctcccgagatcgccagcggtacggaggaaaaggcgcccgtcaaggcgcgccgccagatggtcgtcgcagccaatccgcttgccgccgaggcgggcctgaaaatcctgcgcgagggcggcagcgcggccgacgcgctcgttgccgtgcagacggtgctcggtctcgtcgagccacaatcctccggcgtcggcggtggcgccttcctggtctggtatgacgctgaaaatggaacgctgaccaccttcgacggccgtgaaaccgcgcccgaagctgcgacggcagagctcttcctcgacgagaagggcgagccgcttgccttcttcgatgccgtcgtgggcggacgctccgtcgggacaccgggcgtggtgcggctgatggaaaaggcgcacgagcgctacggaacgcttgattggaacatactcttccagcctgccattacgctggccgagaacggctttgaagtctcgccacggcttcatgcgctgatcgccgccgacaaaggcaagctcgataaggaggaagctgcgcgcgcctacttctatgatgcggacggcgagccgctggacgagggcacgcttttgaaaaaccctgactacgcgcagacattgcgggcgatcggggaaaagggcgcggatgctttttataccggagagatcgccgagaagatcgtcgctgccgtgcagaaccacccgacaaatgcggggctcctcagccttgaagatctcgccgcatacgaagtcagggagcgcccggcggtctgcgcgccctatcgcggctacgaactgtgcggcatggggccgccctcctctggtgcactcacgatcgggcagatccttggcatggtctcgcatttcgaccttggagggctcggctcggacgatccggagagctggcgcattatcggagacgcgacccggctcgccttcgccgaccgggagctttacatggccgacagcgatttcgtctccatgccgcaggggctgctgaacccggattatctaaaagaccgcgcgtcccttatccgccgcccgaccgcccttcccgcggaggaggtcaaggccggtactccgccgtgggacaaggctgagctgcgcatccccggtatcgacatggagcagccctcgacgtcgcatttcgtcattgtggacgaggcaggcaacatcgcctcaatgaccacttccatcgagaatggtttcggctcgcggcagatggcggcaggcttcctgctcaacaaccagctcaccgatttctccttcaccccggaggaggacggaaaggccgtcgccaaccgggtggagccgggcaagcgcccccgctcctccatgtcgcccactgtcgtgttgcaggacggcaggccagtcttcgccctcggttcgcccggcggcagcaacatcattccctatgtcgccaacaccctcatcgcgcttatcgactgggatatggacatgcagcaggccatctcgctgccccatctgacgaaccgcttcggcacctatatattggaagccggcacgccggccgaggaacttgccgatgacctcacagcattgggctttgaggttgaagccggcgaactcaattccggcctgcacggcatcgccttcacatcagaagggcttgaaggcggcgccgacccgcggcgagagggcgtggcgctaggtgactaa

SEQ ID NO: 58135 - protein, 586 aa, Mesorhizobium sp. BNC1
MGVRETLAKGAMALGLLLATPALAQQAADTLAPEIASGTEEKAPVKARRQMVVAANPLAAEAGLKILREGGSAADALVAVQTVLGLVEPQSSGVGGGAFLVWYDAENGTLTTFDGRETAPEAATAELFLDEKGEPLAFFDAVVGGRSVGTPGVVRLMEKAHERYGTLDWNILFQPAITLAENGFEVSPRLHALIAADKGKLDKEEAARAYFYDADGEPLDEGTLLKNPDYAQTLRAIGEKGADAFYTGEIAEKIVAAVQNHPTNAGLLSLEDLAAYEVRERPAVCAPYRGYELCGMGPPSSGALTIGQILGMVSHFDLGGLGSDDPESWRIIGDATRLAFADRELYMADSDFVSMPQGLLNPDYLKDRASLIRRPTALPAEEVKAGTPPWDKAELRIPGIDMEQPSTSHFVIVDEAGNIASMTTSIENGFGSRQMAAGFLLNNQLTDFSFTPEEDGKAVANRVEPGKRPRSSMSPTVVLQDGRPVFALGSPGGSNIIPYVANTLIALIDWDMDMQQAISLPHLTNRFGTYILEAGTPAEELADDLTALGFEVEAGELNSGLHGIAFTSEGLEGGADPRREGVALGD

SEQ ID NO: 58136 - DNA, 1782 bp, Hyphomonas neptunium ATCC 15444
  CDS (1)..(1782)
atgcgccacctccccgccctcacagctgccctcattctggcggcttgcgccccagcggcgaaggcgccgcccgcctcgagcattacgcccgtgtcagacgagacgcccgaagcgctgggcgacctctcctggacaaaaggcgcgatggtggccgccgcagatccgcgcgccgttgaagcgggcctgcgcgtattgagtgaaggcggtaatgccgttgatgcagccattgccgtgcatgccgttctcggcctggtcgagccccaaagctcgggcatcggcggaggcgcgttcatggtctattacgaccgcgccagcgacgagatcaccgtgtttgatggccgcgagactgcgccggccgccgcaggcccggactggttctccaaggacggcaagccgatggatttcctgaccgcctggcagtcgggccgctcggtcggcgtgccgggacagatcgcgctctacaagaccgcccatgacgcggccggacagggggattgggcgagccttttccaaccggccatcgagctggctgaagtcggttttgaagtctcgccgcgccttgccgaagtgcttgcctccgagcgtctgcgcgccgtgatccgtctcgacgacaacccggtcactgccgcttacttctatcccgatggccagccgctggcggccggttaccggcgcaccaatgcggcctatgcggccacactcgcggcggtcgccaatgaaggcccggctgcgttctataccggcgcgctggcggccgagatcgtcaacgcgaccaatgagggcccggacggcggcaacatgacgctcgacgacctggccgggtatgaggtgaaggttcgctcggcactctgcggcacgctgcagtccggctacaagatctgctcggcgccgccgccaagctcgggcggcatcacgcagaacatgatcatgggtctttacgagcatctgaggcctggccccacggtcaatgccgatgagagcctgctgctcaaagccttcgtggatgcccagcgtctcgcctatgccgaccgcgatcactacgtggcagacgccgatcatgtaacggtgccctccgcggaactgatcaacccggactaccttgaagcgcgcgccaaggaagcgtttgcccccgatggcaaagtcttccccggcgatcccggcgtcgttctgggcggtgaaccgatgcggccgatgtggggcgaagaccccaccacccccggcgccggcacaacccatatctcgatcattgatcttgagggcaatgccgtctcgatgaccgccaccgtggaagccgcgttcggctcctcgcgcatggccggcggtttcctgctcaataacgagctgaccgacttctccctgatccccgaaatgggcggcaagccggtggccaatgcggtcgccgctggcaagcgcccgcgctcgtcgatgtcccctaccctcgtcttcgatgaggccggcgacctcttcatggtcaccggatcgcccggcggaaattccatcgtcgcctatgtttccaagacgctgatgggcgtgctcgaatggggcaagacggctcaggaagccgccgccctgcccaacatcatcgcccgcggaaacactgtcggtgttgaagtggacatcgacggcggccccgaagccgccgaagcgcttcgcggcatgggctatactgtggaagaacgcacaggcgaaaattccggtctccatgtcatcgtcgttcgtgaccagggccttgagggcggcgccgatccgcgccgtgaaggcgtcgcgctgtctcttcgctga

SEQ ID NO: 58137 - protein, 593 aa, Hyphomonas neptunium ATCC 15444
MRHLPALTAALILAACAPAAKAPPASSITPVSDETPEALGDLSWTKGAMVAAADPRAVEAGLRVLSEGGNAVDAAIAVHAVLGLVEPQSSGIGGGAFMVYYDRASDEITVFDGRETAPAAAGPDWFSKDGKPMDFLTAWQSGRSVGVPGQIALYKTAHDAAGQGDWASLFQPAIELAEVGFEVSPRLAEVLASERLRAVIRLDDNPVTAAYFYPDGQPLAAGYRRTNAAYAATLAAVANEGPAAFYTGALAAEIVNATNEGPDGGNMTLDDLAGYEVKVRSALCGTLQSGYKICSAPPPSSGGITQNMIMGLYEHLRPGPTVNADESLLLKAFVDAQRLAYADRDHYVADADHVTVPSAELINPDYLEARAKEAFAPDGKVFPGDPGVVLGGEPMRPMWGEDPTTPGAGTTHISIIDLEGNAVSMTATVEAAFGSSRMAGGFLLNNELTDFSLIPEMGGKPVANAVAAGKRPRSSMSPTLVFDEAGDLFMVTGSPGGNSIVAYVSKTLMGVLEWGKTAQEAAALPNIIARGNTVGVEVDIDGGPEAAEALRGMGYTVEERTGENSGLHVIVVRDQGLEGGADPRREGVALSLR

SEQ ID NO: 58138 - DNA, 1584 bp, Mycobacterium avium 104
  CDS (1)..(1584): transl_table=11
atgaaccaaccgttcggatgggacttcccgtacgcctggccccgcaagccggtcctggccgacaacgtggtgtgcacatcgcaaccgcttgccgcccaagcgggtctgcggatgctcgccgagggcggcagcgcggtcgacgcggccatcgccaccgccatcacgctgaccatcgtggaaccggtttccaacggaatgggctccgacgcgttcgccatcgtctgggacggcgagaaggtgcacggcctcaacgcctccggccgctcaccggcggcgtggaccccggaatacttcggcggcaacgccgttcccgtcctcggctggaattccgtcaccgtgcccggtgcggtgtcggcgtggaccgaactgcacgcccgcttcggcaagctgccgttcgagcggctgttcgcaccggcaatatcctacggccgcaacggctttccggtatcgcccgtggtcgcggagcaatgggtggcgcaggtgccgctgttcgccggacagccgggtttcgccgaggcgttcgcacctgagggtcgggcccccaggcccggggagcggttccggctgcccgcgcacgcggacacgctcgaggccatcgcggcgagccgcggcgaggcgttctaccgcggcgcattggccgcccgcgtcgcggagcacgcggcggccaacggcggcgccatgacggccgacgacctggccgcccaccgcgccgactgggtggagacgatcaccggcgactaccgcggctacaccgtgcacgagattccgcccaacggccacggcatcgtcgcgctgatcgcgctgggcatcctcgagcgattcgacatggcttcgctgccagtcgattccgccgacagcgtgcatttgcagatcgaggcggtgaagctggccttcgccgacgcccaggcctacctcgccgatatcgagcacatgccgttgcgaccggaacacctgctggacaccgaatacctcgagcgacgggcggcgctgatcgaccccgcccgggccaagccggtgtcggcgggcgcgccggcgggcggaacggtgtatctgaccgcggccgacgccgcggggatgatggtgtcgatgatccagtcgaactacatgggcttcgggtcgggcgtggtggtgccgggaaccgggatctcgctgcagaaccgaggcgcgaatttcactgcggggcttggtcatccgaacagtgtcggcccgaacaagcggccctaccacaccatcatcccgggcttcgtgaccaagggcggcgcgcctgtgatgagcttcggggtgatgggcggcatgatgcagccgcagggacacgtgcaggtcatggtgcgcatcgccgaccacggccagaacccgcaggcggcctgtgacggcccccggttccgctgggtgcagggcacgcaggtgagctgtgaaaacggtttcccggccgcgacgctggacgagttacgccggcgcggacacgatctggtggcggtcgacgactacaaccagttcggcagctgccaggcgatctggcggatggataccggctacgtcgcggccagcgacccgcgccgcgacggccaggccgccgcgttttag

SEQ ID NO: 58139 - protein, 527 aa, Mycobacterium avium 104
MNQPFGWDFPYAWPRKPVLADNVVCTSQPLAAQAGLRMLAEGGSAVDAAIATAITLTIVEPVSNGMGSDAFAIVWDGEKVHGLNASGRSPAAWTPEYFGGNAVPVLGWNSVTVPGAVSAWTELHARFGKLPFERLFAPAISYGRNGFPVSPVVAEQWVAQVPLFAGQPGFAEAFAPEGRAPRPGERFRLPAHADTLEAIAASRGEAFYRGALAARVAEHAAANGGAMTADDLAAHRADWVETITGDYRGYTVHEIPPNGHGIVALIALGILERFDMASLPVDSADSVHLQIEAVKLAFADAQAYLADIEHMPLRPEHLLDTEYLERRAALIDPARAKPVSAGAPAGGTVYLTAADAAGMMVSMIQSNYMGFGSGVVVPGTGISLQNRGANFTAGLGHPNSVGPNKRPYHTIIPGFVTKGGAPVMSFGVMGGMMQPQGHVQVMVRIADHGQNPQAACDGPRFRWVQGTQVSCENGFPAATLDELRRRGHDLVAVDDYNQFGSCQAIWRMDTGYVAASDPRRDGQAAAF

SEQ ID NO: 58140 - DNA, 1596 bp, Acidovorax sp. JS42
  CDS (1)..(1596): transl_table=11
atgacttggcaactcccctacccctccggccgccagcccgtgctggcgcgcaacgtggtctccacctcccagccgctggccgcgcaggccggcgcggcggcgtttgcgcgcggcggcaatgcgatcgacgcggccctggccgcggccatcacgctcacggtggtggagccggtgatgaacgggattggcggcgacgccttcgcgctggtgtgggacggcgccgcgctgcacggcctgaacgcctcgggccgcgcgccgcgcgcctggtcggccgaacgcttcgcccacctgccgcaaatgccgcgcatcggctgggacacggtgaccacgcccggcggcgtggcgggctgggtggcactgtccgagcgctttggcgccctgcccttcgaagacctgttcaccgacgccatccgccacgcgcgcgacggctttcccgtcagcccggtgatcgcgcgccagtgggcgcaagcggccatcgacctcaagggccagccgggcttcgaggccttcacgcccggcggacgcgcgccgcaggcgggcgagatctggcgctttgccgaccaggcggacacgctggcggacatcgcccgcacgcgcggcgcgtcgttctaccgcggccggctggcgcaggccatggccgactacgcgcgccagcacggcgcaggcctggcgctggaggacctggccgcgcacgccgtggaatgggtgcagcccatcagcgtgccctttggcgaccgcacggtgcatgagatcccgcccaacggccagggcatcgccgcgctgatggcgctgggcctgctggaacatctgccctaccgcagcaccgcagcgggctcggccgcgcgcatgcacctggagatcgaggccatgcgcgtggcctttgccgacctgtacgcccacgtggccgacccggcccacatgcgcctcacccccgcgcagctgctggacccggcctacctgcgccagcgcgccgcactcatcgacccgcagcgcgccggccagtaccccgccggccagcccggcagcggcggtacggtgtacctgtgcacagccgacagcgaggggcgcatggtgtcgttcatccagtccaacttcaagggcttcggctcgggcgtggtggtgccgggcacgggcatcgcgctgcacaaccgcggcatgggcttcgtcaccacgccgggccaccccaaccaggtggcgggcggcaagcggcccatgcacagcatcatcccggccttcgtcacgcgcggcggccagccccacatggcctttggcgtgatgggcggcaacatgcaggcccagggccatgtgcagatggtgctgcgcgaggccgtggagggcctgaacccccaggcctgctccgacgcgccgcgctggcgcatcaacgacgcgggcgcgctgacgctggagcacaccgtgcccgccgccgtggtcgacggcctgcgcgccctgggccacgacccgcaggtggccgcgcccggcagcctggaattcggcagcgcacagatcatccgccggctggaggccacgcccggcaccggcttcgcctacgccgcgggctccgaccaccggcgcgacggccaggccgtgggctgctga

SEQ ID NO: 58141 - protein, 531 aa, Acidovorax sp. JS42
MTWQLPYPSGRQPVLARNVVSTSQPLAAQAGAAAFARGGNAIDAALAAAITLTVVEPVMNGIGGDAFALVWDGAALHGLNASGRAPRAWSAERFAHLPQMPRIGWDTVTTPGGVAGWVALSERFGALPFEDLFTDAIRHARDGFPVSPVIARQWAQAAIDLKGQPGFEAFTPGGRAPQAGEIWRFADQADTLADIARTRGASFYRGRLAQAMADYARQHGAGLALEDLAAHAVEWVQPISVPFGDRTVHEIPPNGQGIAALMALGLLEHLPYRSTAAGSAARMHLEIEAMRVAFADLYAHVADPAHMRLTPAQLLDPAYLRQRAALIDPQRAGQYPAGQPGSGGTVYLCTADSEGRMVSFIQSNFKGFGSGVVVPGTGIALHNRGMGFVTTPGHPNQVAGGKRPMHSIIPAFVTRGGQPHMAFGVMGGNMQAQGHVQMVLREAVEGLNPQACSDAPRWRINDAGALTLEHTVPAAVVDGLRALGHDPQVAAPGSLEFGSAQIIRRLEATPGTGFAYAAGSDHRRDGQAVGC

SEQ ID NO: 58142 - DNA, 1596 bp, Magnetospirillum magnetotacticum MS-1
  CDS (1)..(1596): transl_table=11
atgctcaattctcccatggcccgccggggcatggtcacctcgccccaccacctcgcctcccaggcggggctcgcggtcctgcgcgagggcggcaccgccatcgaggcggccattgccaccgccgccatgctcggcgtggtctatccccatatgaccggattgggcggcgacgctttctggctgatcgccgagccgggcaagccgcccgtttccatcgacgggtcgggcgccgccggggccaaggtggatttggagctttatcgcaaggcgggccacaaacgcatcccgacgcgcggcccccttgccgccaatacggtggcgggcgccgtgtccagctggcaactggcgctggacgtatcgggccattggggggggcgtctgccgctgcgccgtctgttcgaggatgcggttttcgcggcgcgcgaaggttttgccgtgacagggcaccaggccgccgccactttgcgcgggttgaacgatctgaagcgtgagccgggctttgccgagacctttctggccaagcgcaaggcgcctgttcccggcgcgatgctgcgcctgcccgccctggccgatacgctggagcgtcttgccaatgccgggctggacgatttctatcgcggcgaggtggcccgcgccgtggccgccggactgcaggcggcgggttcgcccctgcgcgccgaggacatggcgcgccatcgcggcatgcgccgccggcccttatccctcaacctgccttgcgggcatctgttcaacaccgcgccgcccacccaggggctggcctcgctgatcctgctggggctgtatcagcgccttgaggtcgccgaggccgacggtttcgatcatatccacggtctggtggaggccgccaagctggcctatcgcatccgcgatgcccatgttaccgatccggcgcgcatgtccattcacgccaccacctatctgtcggacggcattctcgaccgcatggcctgggagatcgacaaggccaaggccagtccgctacccggtgcgggcgccgagggcgatacggtctggctgggggtgatcgacggccagggccgcgccgtcagcttcatccagagcctgtttcacgccttcggctccggcgtggtcctgcccgaggtggggctggtctggcagaaccggggctgttccttcagcctggacccggagcaccgcaacgcgctcgagccccggcggcggcccttccacaccctgtcgcctggtctggcgcgcctcaaggatggccgcaccatggtctacgggaccatgggcggcgacgcccagcccctggtccaggcggaagtctttacccgtgtggcgctctacggccaggggttgcaacaggcggtctcggcgccgcgctggtgtctggcccgcgccctggacggttctgccgctcctgccgggattcaagtggaaagccgcgtcgatccccaggtgatccgccgccttgaagaggtgggtcactctgtccaaatggtgggagactggaattcgctgctgggccatgctggcgcggtgctgcgccgcgccgacggcctgctggaaggagccgccgatccccgcgccgatggcgtggtggcggcattttga

SEQ ID NO: 58143 - protein, 531 aa, Magnetospirillum magnetotacticum MS-1
MLNSPMARRGMVTSPHHLASQAGLAVLREGGTAIEAAIATAAMLGVVYPHMTGLGGDAFWLIAEPGKPPVSIDGSGAAGAKVDLELYRKAGHKRIPTRGPLAANTVAGAVSSWQLALDVSGHWGGRLPLRRLFEDAVFAAREGFAVTGHQAAATLRGLNDLKREPGFAETFLAKRKAPVPGAMLRLPALADTLERLANAGLDDFYRGEVARAVAAGLQAAGSPLRAEDMARHRGMRRRPLSLNLPCGHLFNTAPPTQGLASLILLGLYQRLEVAEADGFDHIHGLVEAAKLAYRIRDAHVTDPARMSIHATTYLSDGILDRMAWEIDKAKASPLPGAGAEGDTVWLGVIDGQGRAVSFIQSLFHAFGSGVVLPEVGLVWQNRGCSFSLDPEHRNALEPRRRPFHTLSPGLARLKDGRTMVYGTMGGDAQPLVQAEVFTRVALYGQGLQQAVSAPRWCLARALDGSAAPAGIQVESRVDPQVIRRLEEVGHSVQMVGDWNSLLGHAGAVLRRADGLLEGAADPRADGVVAAF

SEQ ID NO: 58144 - DNA, 1812 bp, Nostoc punctiforme PCC 73102
  CDS (1)..(1812): transl_table=11
atgcttactgttgttaaacccaagcgagttgcgctcgcaattttttctttcaccctcgttgtttacagccaagttgcatcagccgccctaactttacccctacgcagtaaaaagggaatggtggcttcagctcatcccttagcaagtgaagcgggaattttaatgttacgcaaaggtggtaatgcagtagatgcagctgtcgccacaacttttgcaatctctgtagttgagcctttttcagccggaatcggcggcggcggatttttgctgatgcactctgagaaaactggcgatatgaaagcgctagatttccgcgaacgcgcacccttgaaagccacaaaaaagatgtatttagatgcagaaggaaaggtgcgtcccaatgcaagtattaatggttatttggcagtagcgacaccaggaacggtggcgggactttatgaagtgcatcgtcgctatggtaaacttccttggcaagaggtgatgaaacctgcgatcacactcgctaaagatggctttatagttagcgatgtggtaaattggcgttctctgcaagcaaacgattcccgtaaggaagcagttctcaacaatccagccgcacgggaaattttcactcacaacggtgaattttataaaccaggggagaaactggtgcagcgtgatttggcacgcactttaacagcagttgccgaaaatccccaaagtttttacaccggaagtattgctcgtgcgatcgcttctgatatggtaaaaaatggtggtttaattactttagaagacctgaaagcctacaaaccaatctggcggactcctatttgtggcaattttcgcaaagctaaagtttgctcaatgccacccccatcatcgggaggcgttcacctattgcagattttaaatattattggtgacactgatttaaaatctttgggatggcatcatcctgacgctattcacctaatggtagaggcaatgaaaattgcttacgccgatcgctcagaatatttaggcgatcctgattttgtcaaagttcctgtacaagaactactcagtccagcttacgccaaacaacgccgtcaagaaattaatatgcaagtggctagaccctcgaccaaggtcaagccagtagatagaaagacactacaacgttttagtcaggctaataatcggagtttaggagaaaataccattcctttatctcatcaatctcttaaactacacgcgacgcggtatgaatccactgaaaccagtcatcttactgttgtggatgaagaacgcaacgctgtaagtctgactttcaccattaacctcagttttggtgctggtgtggtgacaccgggaactggaattatcctcaacaatgagatggatgattttgctgctgcgccaggagtgcctaacgcctttggtttagttggtaacgatgccaacagcattgcaccccgcaaaactcccctatccagcatgactcccacaattgtcacagaaaatggtcattttcggatggcagcaggtgcgcctggtggtagcaccatcatcactcaggttttgcaagtcatcctaaatgtgctggaatacaacatgaatgttggtgcagctgtttctgttccacgcatacatcatcaatggcttccagatgagttgcgcgtagaaccttggggtttggatgctttgactctagaagaattacgccgtcgggggcataaaattaaggaaagtactccttggggtaatggtaatgcgatcgcggttacatctgatggaactctagaaggcgcggcagatcctcgcggtgaaggttcccccagaggtctatga

SEQ ID NO: 58145 - protein, 603 aa, Nostoc punctiforme PCC 73102
MLTVVKPKRVALAIFSFTLVVYSQVASAALTLPLRSKKGMVASAHPLASEAGILMLRKGGNAVDAAVATTFAISVVEPFSAGIGGGGFLLMHSEKTGDMKALDFRERAPLKATKKMYLDAEGKVRPNASINGYLAVATPGTVAGLYEVHRRYGKLPWQEVMKPAITLAKDGFIVSDVVNWRSLQANDSRKEAVLNNPAAREIFTHNGEFYKPGEKLVQRDLARTLTAVAENPQSFYTGSIARAIASDMVKNGGLITLEDLKAYKPIWRTPICGNFRKAKVCSMPPPSSGGVHLLQILNIIGDTDLKSLGWHHPDAIHLMVEAMKIAYADRSEYLGDPDFVKVPVQELLSPAYAKQRRQEINMQVARPSTKVKPVDRKTLQRFSQANNRSLGENTIPLSHQSLKLHATRYESTETSHLTVVDEERNAVSLTFTINLSFGAGVVTPGTGIILNNEMDDFAAAPGVPNAFGLVGNDANSIAPRKTPLSSMTPTIVTENGHFRMAAGAPGGSTIITQVLQVILNVLEYNMNVGAAVSVPRIHHQWLPDELRVEPWGLDALTLEELRRRGHKIKESTPWGNGNAIAVTSDGTLEGAADPRGEGSPRGL

SEQ ID NO: 58146 - DNA, 1812 bp, Xylella fastidiosa Ann-1
  CDS (1)..(1812): transl_table=11
atgagtttatttcctcgttgtttcttgttgctctgtgtttttttctcgcacgtctctgcagagcagacagaggtaggactgttacgggagggagtcgccagagtcccgcctggtgcagtgattgccagtagtcattatttggcgacggatgctgggttgcagattctgaagcagggtggaaatgctttcgatgctgcagtggcggtgtcttccacgttgtcggtggttgaacccattagttctggtttgggcggcggtggcttttttctgcttcatgatgccaagacggggcgtgatgtcatgctggatgcgcgggaatacgcgccggcgtcggttaatctgggtacgtttctaaacaaggatggtcaactggatcatgaccgttcgatcaacgggccttggtcggcaggtatcccggggttacctgcagcacttgttgaactagctgagcactatggcaagttgccattgagacaaacattggcaccggctatccgcattgcgtctgcggggtttcctgtgtacaggcgtatggtggaggggtatcagtcgcgccgtgaagtgatggagcgttatccggggacacgtgaagtctatctccgtggcggtaagccgatggatgagggtgatattttcaaacagccggaattggcgcggactttgtcgttattggccaataagggctttgatggtttttataagggcgagaccgcgaagcggttgctggctggggtgaatcaggcgggtggacgttggactgctgaggatttggccggttatcgggtcaagtcgcgtgttcccatcacgttcgattatcgagggtggaagatcaccactgcgccgccgccgtcttctggcggtatcgcgttggcggaaatgttacagatcttggaaggttgggatctggctcggctagatgacgtacatcgcgttcatttggtggtagaagcgatgcgccgtgcgtatcgggatcgtactttttttctcggtgatcccgattttgtgtcgattccgcagcgtgtgttgacgagtcaggactatgcgcgtggtttgcgtgcggggattaaccctgagaaggcaacgcctagcgtgttgttatcaggtcatccaacgccattggaggatgaggagacgacgcacttttcaatcattgatgcggagggaaaccgagtgggtgcgacgcaaacggttaatttgctatacggttcggggctgattccgaatggaaccggtgtgttgcttaacaatgagatggatgattttgcactccagccaggcgtgccaaatgtgtttggggtgatgggctatgaggcgaatgcccccaaaccagggaagcgcatgctcagctcaatgacgccgactttccttgaatctgccgataaagtggcggtgattggcacgcctggcggcagtcgtattatcacaatggtgctgttggggatcttgggttacgacgctggattggacgcgcaacgggttgctgcgttgccgcggtatcaccaccaatggttgccggacgtcattgagacggaggcggctacgtttccggcagaggtgatcaagggattggagacgatgggccatacgatcaagcagccaagcgatacggttgccggtgggcgtggttccagccacgtttggggcaatgtgcagacggttgaatgggatcgtcgttctaatgtgctcattggcggtcatgatccgcgtcatgttgtgggcaaagcggccgtttggctcactgataaagcggttgttctgccgcctatggaccatttacctacgccgtgcttgcaggattgccatgctcaatga

SEQ ID NO: 58147 - protein, 603 aa, Xylella fastidiosa Ann-1
MSLFPRCFLLLCVFFSHVSAEQTEVGLLREGVARVPPGAVIASSHYLATDAGLQILKQGGNAFDAAVAVSSTLSVVEPISSGLGGGGFFLLHDAKTGRDVMLDAREYAPASVNLGTFLNKDGQLDHDRSINGPWSAGIPGLPAALVELAEHYGKLPLRQTLAPAIRIASAGFPVYRRMVEGYQSRREVMERYPGTREVYLRGGKPMDEGDIFKQPELARTLSLLANKGFDGFYKGETAKRLLAGVNQAGGRWTAEDLAGYRVKSRVPITFDYRGWKITTAPPPSSGGIALAEMLQILEGWDLARLDDVHRVHLVVEAMRRAYRDRTFFLGDPDFVSIPQRVLTSQDYARGLRAGINPEKATPSVLLSGHPTPLEDEETTHFSIIDAEGNRVGATQTVNLLYGSGLIPNGTGVLLNNEMDDFALQPGVPNVFGVMGYEANAPKPGKRMLSSMTPTFLESADKVAVIGTPGGSRIITMVLLGILGYDAGLDAQRVAALPRYHHQWLPDVIETEAATFPAEVIKGLETMGHTIKQPSDTVAGGRGSSHVWGNVQTVEWDRRSNVLIGGHDPRHVVGKAAVWLTDKAVVLPPMDHLPTPCLQDCHAQ

SEQ ID NO: 58148 - DNA, 1809 bp, Sulfitobacter sp. EE-36
  CDS (1)..(1809): transl_table=11
atgcttgcacatcacattgtaaaatacatcgggcggacctgcacagccatcgccataggtggttttgtaagcggggccgctttcgcgcaacaggccgccgatagtgtcgcgcccgaaggtgccagccaaggcagctttaccggcatgtcgccgcagatcaccgccgccttcgaggctaaggatgcgggcaaaccggtcatcgcccagaactggatggtcgccgccgccaaccctcacgcggttcaggcgggggcggatgtgctggcacgggggggcaccgcagccgatgcgctggtcgccgtccaagcgatgctggggctggtggagccgcaaagctctggtctgggcggcggggcgtttctggtctggtatgacgccgcatcgggctggctgaccacgctggacgggcgcgaaaccgcgccgctggcggtcacgccgcaattgtttcaggacgacgaaggtgtgccgctggggttctttgacgccgtcgttggcgggcggtcggtcggtacgccgggcacccctgcgttgatggccgcagcgcatgagaaatggggcaaccagccgtgggccgagctgctggccccctctgtcgccttggccgagaagggctttgccgtgtccccacgtcttgcggggctggtggctgatgacgccgaacggctggcaacgtcggaaacgacagcatcctatttcatgccgaacggcacgccggttcaggcaggcgatacgctcaagaatcccgattatgcccgcacggtcgcggcgatggctgaacgcggggtggaggctttctataccggcgacattgcgcgcgacatcgtgggggctgtccaaggggccaccaaccccggtgtgctgtcagaggtcgatctttcgatctatcgggtcaaggaacgcgacgccctttgcgcgccctatcacgggcatgaggtctgcggcatggggccgccgtcctctggtgcgctggccgtagggcaaatactggggctgctggaaaatgcggacctgagcgccggaccggcggacgcggatgtgctgcggctgatcggcgatgcctcgcggctcgcctttgcggatcgggggcgctatgtggccgataccgattatgtgccggtgccggtgaccggtatgctcgaccaatcctatctggcggatcgcgccaagctgttgcagggcgacgatgcgctgccggaagtcaccgcgggcgcgcccgctttcgaccatgccctgaactttgccgatgatatctctatcgagctgccgtcgacctcgcatgtgtcgatcgtggacagcatgggcaatgtcgcgagcatgaccaccaccatcgaaaacggctttgggagccgactgatggtgcgcgggtttttgttgaacaacgagctgacggatttctctttccggtcgcataccgatggcgtgccgattgccaatcgggtcgagccgggaaaacgcccgcgctcgtcgatggcaccgacgattgtgatgaaagatggcgcgccggttctggccgtgggcagccccggtggcagccgcatcatcggctatgtcgcgggcgcgatcatcgcgcatctggattggggaatggatgtgcaacaggccgcagcactgccccatgcgatcaaccggttcggtccctacgaccttgaggaaggcaccgacgccgccgcgatggccgatgcgctgaccggccttggctacgaggtgaacacccgtgcgctgacctcggggttgcatatgatttcgattggcgatgacctgcgcggcggggctgacccgcgccgcgaaggcatcgcccttggcgagtga

SEQ ID NO: 58149 - protein, 602 aa, Sulfitobacter sp. EE-36
MLAHHIVKYIGRTCTAIAIGGFVSGAAFAQQAADSVAPEGASQGSFTGMSPQITAAFEAKDAGKPVIAQNWMVAAANPHAVQAGADVLARGGTAADALVAVQAMLGLVEPQSSGLGGGAFLVWYDAASGWLTTLDGRETAPLAVTPQLFQDDEGVPLGFFDAVVGGRSVGTPGTPALMAAAHEKWGNQPWAELLAPSVALAEKGFAVSPRLAGLVADDAERLATSETTASYFMPNGTPVQAGDTLKNPDYARTVAAMAERGVEAFYTGDIARDIVGAVQGATNPGVLSEVDLSIYRVKERDALCAPYHGHEVCGMGPPSSGALAVGQILGLLENADLSAGPADADVLRLIGDASRLAFADRGRYVADTDYVPVPVTGMLDQSYLADRAKLLQGDDALPEVTAGAPAFDHALNFADDISIELPSTSHVSIVDSMGNVASMTTTIENGFGSRLMVRGFLLNNELTDFSFRSHTDGVPIANRVEPGKRPRSSMAPTIVMKDGAPVLAVGSPGGSRIIGYVAGAIIAHLDWGMDVQQAAALPHAINRFGPYDLEEGTDAAAMADALTGLGYEVNTRALTSGLHMISIGDDLRGGADPRREGIALGE

SEQ ID NO: 58150 - DNA, 1785 bp, Roseovarius nubinhibens ISM
  CDS (1)..(1785): transl_table=11
atgcgcttctggctctactcgtcgcttttcgtgatcttggcaggggcggcgtcgggccagcaggccagcgattccgtggcgccagagattggcggcacgggacaggtcgccacgtcggaggcggtggccgaggcgcaggcgcgcaaggccgaaggacggcccgtggaggcgcaggactggatggttgtcgcggcgcatccgctggcggtcgaggccggggcagaggttctggcggcggggggcacggcggcggatgccatggtggcggtgcaggcggtgctgggtctggtggagccgcaaagctcgggtctggggggcggtgccttccttgtctggtgggatgccaagagcggcgcgatgaccacgctcgatgggcgcgagaccgcgcctttggaggcgacgccgcggctctttcaggacgatcagggccagcctctgcagttctacgatgcggtggtgggcgggcgcagcgtgggggtgccggggacgcccgcgctcttgcaggaggcgcatgagagatggggggcgcggccctgggcggggctgtttgatcgggcaatcacgctggcggaagagggattcgcggtgagcccaaggctctcggcctctgttgcgggcgatgccgagcggctcggccggtttgacgcgacggcgcgctatttcctgccggagggtgcgccattgcaacccggcgcgcagttgcgcaacccggactatgccgagacgctgcgggcgctggccaccgagggcgcgcgggtcttttacggcggcgagatcgccgaggacatcgccgccacggtgcagagcgcgccgggcaatcccggtgtgctcagcgaggtagatctggcgctctaccgcgtcaaggaacgcgcggcggtctgtgcgccctatcgcgcctatgagatctgcggcatggggccgccaagctcgggcgcggtggcggtggggcagacgctgggcctgcttgcgccgtttgatttggccgggtctggcccggagagccccgaagcctggcggctcttgggggatgcgtcgcgtctggcctttgccgatcggggaaaatttttggccgatacggattttgttccggtgccggtcaaaggcctgttggagaaaatgtatctcgaaaaccgttcccaattgcttaacggcggggtcgcgctgcctgaggcggccccgggcgcgccggaatttgatcatgcgctgaactgggcgatggacaactccatcgagcttccctcgacctcgcatatctcgattgtcgattctcagggcaatgcgctgtcgatgaccaccacggtggaaaacgcctttggctcgcggctcatggtgcgggggtttttgctcaacaatgagctcacggatttttcctttcgcagccatcgcgacggggtgccgattgccaatcgggtcgagccgggcaagcggccccggtcgagcatggcaccgaccatcgtgatggcggagggccggccggtgctggtgctcggcagtccggggggcagccggatcattccttatgtgtccaaaacgctggtggcggtgctcgattgggggctcgatgcgcaggcggcggtggatctgccgcatctggtcaaccggtttggcacctatgatctcgaggcggggacggcggcagaggcgcaggccgaggcgctgcaagccatgggatatgccacagaggcgcgcgatctgacatcggggctgcatgtgatcgacctgcgcggcgggcggctgcagggcggggccgatccgcgccgcgagggcgtcgccttgggccagtga

SEQ ID NO: 58151 - protein, 594 aa, Roseovarius nubinhibens ISM
MRFWLYSSLFVILAGAASGQQASDSVAPEIGGTGQVATSEAVAEAQARKAEGRPVEAQDWMVVAAHPLAVEAGAEVLAAGGTAADAMVAVQAVLGLVEPQSSGLGGGAFLVWWDAKSGAMTTLDGRETAPLEATPRLFQDDQGQPLQFYDAVVGGRSVGVPGTPALLQEAHERWGARPWAGLFDRAITLAEEGFAVSPRLSASVAGDAERLGRFDATARYFLPEGAPLQPGAQLRNPDYAETLRALATEGARVFYGGEIAEDIAATVQSAPGNPGVLSEVDLALYRVKERAAVCAPYRAYEICGMGPPSSGAVAVGQTLGLLAPFDLAGSGPESPEAWRLLGDASRLAFADRGKFLADTDFVPVPVKGLLEKMYLENRSQLLNGGVALPEAAPGAPEFDHALNWAMDNSIELPSTSHISIVDSQGNALSMTTTVENAFGSRLMVRGFLLNNELTDFSFRSHRDGVPIANRVEPGKRPRSSMAPTIVMAEGRPVLVLGSPGGSRIIPYVSKTLVAVLDWGLDAQAAVDLPHLVNRFGTYDLEAGTAAEAQAEALQAMGYATEARDLTSGLHVIDLRGGRLQGGADPRREGVALGQ

SEQ ID NO: 58152 - DNA, 1830 bp, Oceanicola batsensis HTCC2597
  CDS (1)..(1830): transl_table=11
atgctcgaccgcctgcttccgtatctcgtcgccctgtgcctggccaccccgctgtcggcccagcaggcgacggatgcgattccgccggaaatgaccaccgatctctcggcgccggtcgacgatccggccttgcgccgggcacaggagacgaaggcccggggctttccggtcctcgcccgggactggatgatctcggcagcccaccctctggccgtcgaggcgggggctgaggtgctgcgcagcggcggcacggccgccgacgccatggtggccgcccaggccatgctgggtctggtcgagccgcagtcctcgggactcggcgggggcggcttcctgctctactacgacgcggcgcgcggggcggtgacctcgctcgacgggcgcgaaactgccccggcggcggccaccccgcgcctgttccagaccgccgaaggagaaccgatggccttcttcgacgccgtgatcggcgggctgtcggtcggcgtgccgggcacgcccgccctgatggaggccgcgcaccggagatggggccgccagccctgggcccggcttttcgacccggcgatccgcacggccgaagacggctttcccgtctcggcccggctggcggccatggtcgcgttcgaccgggaccgcctgatgctgcatccggagacggccgcccatttcctacccggaggcgccccactggccgccggtgagatcctccgcaatccgccctatgccgaaagcctgcgggccatcgcgcgcgacggcgcccgggccttctatcagggcccgatcgccacgcgcatcgcctcggccgtgcgcaccgcgatccgcccgggaaagctcaccgcgcaggacatcgcggcctaccgggtcagggaacgcgaaccggtctgccagccgttccagggctacgagatctgcggcatgggcccgccttcctcgggcggcgtcaccgtggcgcagatcctcggcacggccgaagcctttcgcggcggcgatctcaccgcctcggcgatctcggcggatgtcgagatgatgcgcgagggcgagggattcctgaacgacctcacgctgctgggaaatgccgcgcgactggcctttgccgaccgtggccggtatctcgccgacagcgatttcgttcctgtaccggtcggggggctgacggatcccgactaccttgccggccgggccgccctggccgccgaggatcgcgccatcgacagggccaccgccggcacccccgccttcgaccacgcgctgctctgggcggatcacgagggacgaccgctgccctcgaccacgcatctttcgatcgtcgacagccacggcaacgcgctctccctcacctcgagcatcgagaacgccttcgggtcgcgcgtgatggcaggaggattcctgctcaacaaccagctgacggatttctcctttcgcgcgcatgtggatggtctgccggtggcgaacggcgccgcgcccggcaagcggccccggtcctccatggcgccgaccatcgtcatgaaggacggcgcgccggtgatgatcatcggctccccgggggggagccggatcatcggctacgtcgccgaaacgatctggcggcacctgatcgagggctacgacatccagcaggccatcgccctgccccatgccgtcaatcggttcggcacctacgacatcgagcggtcggaccgggccgaggacctggcccgccaactggccgcgcgggggttcgacgtggccatccgcgatctcaacagcggcctgcacggcatcgccgtcacctcgcgcgggctcgagggcggcgcggatccgcgtcgcgaggggctggcctacggagagtga

SEQ ID NO: 58153 - protein, 609 aa, Oceanicola batsensis HTCC2597
MLDRLLPYLVALCLATPLSAQQATDAIPPEMTTDLSAPVDDPALRRAQETKARGFPVLARDWMISAAHPLAVEAGAEVLRSGGTAADAMVAAQAMLGLVEPQSSGLGGGGFLLYYDAARGAVTSLDGRETAPAAATPRLFQTAEGEPMAFFDAVIGGLSVGVPGTPALMEAAHRRWGRQPWARLFDPAIRTAEDGFPVSARLAAMVAFDRDRLMLHPETAAHFLPGGAPLAAGEILRNPPYAESLRAIARDGARAFYQGPIATRIASAVRTAIRPGKLTAQDIAAYRVREREPVCQPFQGYEICGMGPPSSGGVTVAQILGTAEAFRGGDLTASAISADVEMMREGEGFLNDLTLLGNAARLAFADRGRYLADSDFVPVPVGGLTDPDYLAGRAALAAEDRAIDRATAGTPAFDHALLWADHEGRPLPSTTHLSIVDSHGNALSLTSSIENAFGSRVMAGGFLLNNQLTDFSFRAHVDGLPVANGAAPGKRPRSSMAPTIVMKDGAPVMIIGSPGGSRIIGYVAETIWRHLIEGYDIQQAIALPHAVNRFGTYDIERSDRAEDLARQLAARGFDVAIRDLNSGLHGIAVTSRGLEGGADPRREGLAYGE

SEQ ID NO: 58154 - DNA, 1758 bp, Erythrobacter sp. NAP1
  CDS (1)..(1758): transl_table=11
atgctcaaacacttctcgataatcgccccgatcgcgcttctggccacagcctgcgcggacatggatgctcccgtcgcaagcccggcatcggccgcgcaaatcacaacgccgggcgcggtcagcgcagcggacccgcgcgccgcagcagcgggcgaagcgatcctcgcgaagggcggctctgcggccgatgcagccatcgctgtcatgctggccctgacagtggtcgaaccgcaaagttccggaattggcggcggcggcttcatgatccatgccggctctgacggcatcgaaagtttcgacggtcgcgagacagctccggccacggccacggggactcgctttcttgacgcagatggcgaacgcctgccgcgtgagacccgagttacctcgggtctaagcgtcggggttccaggcaacatcgccctcgcagcgctcgcccataaggaacacggcaaccttgcatgggccgagctgttcgagccagcaatcgcccttgcccgcgaaggcttcgttatgaaccgccgacttcaccagtcgcttagcggccagcaatcgcgtgcgggcaaaaccgaagccgcgcgggccatattcttcggtgaagatggcgagccgcttcctgttggggcgatggtaaaggtgcctgaacttgcggatacactagaacggatcgcggctggcgggcccgaagtcttctaccgcgaaagcgctgccgagtttgcgcaatacgtcgctgctgaaacgccgcaagatggcaagatgagcgccagcgatgtgcgagcttatacagccaagatgcgcgatccagtatgcgccccttatcgaacgtacaaggtgtgcggcatgggcccgccctcgtcgggcggcgtggcggttgcacagatgcttggccagcttgagggatttgatctctcggcacttggcccgcaaagcgccgaattctggcacctatttctggaatcgcagcggatcgcttacgctgaccgcgagctttatctgggtgacgcggattttgttgaagtgccagtcgatggtctcgtcaatcccgattacatggccagccgcggtgccctgattgatcgcagcaccgcgattgcagaggtacaaccaggaacgccccccggtgcaccgatggcccgcgctgacggtgacgaaccgccagaaaacggcaccacccacttctccgtggtcgatggtgaaggcaatgcggtcagctacacctcaaccatcgaaggagcgttcggctctggcctccattggggcggattctatctcaacaacgagctcaccgacttcagctcttcgcctgatgtcaacggtgtcccggtggcaaaccgggtcgaaggcagcaagcgtccgcgttcttcgatggcgcctacaatcgtcttcgatgcggatggagagatcgttctcgtgatcggagctgctggcgggccgactatcccagtacaggtcgcgcgctcgatcattggcgtcattgactttggcatgagcgctgaagaagcgcttgcccttcccttgctgatgtcattcggatcggtcgcgatcaccgaagaaggcagcgtcgcggcagctgtggcggatcagcttacagccatgggccacggcgaaatccgggtgatctcaccgcgaggcaagaccaacgcgttgcttcggaccgaaaatgggtgggaatcggctggcgacccaaggattgcagaccttttgcgctacgaacccttgtcagcgtcagaaggcaatcggggtgctgagcagccctga

SEQ ID NO: 58155 - protein, 585 aa, Erythrobacter sp. NAP1
MLKHFSIIAPIALLATACADMDAPVASPASAAQITTPGAVSAADPRAAAAGEAILAKGGSAADAAIAVMLALTVVEPQSSGIGGGGFMIHAGSDGIESFDGRETAPATATGTRFLDADGERLPRETRVTSGLSVGVPGNIALAALAHKEHGNLAWAELFEPAIALAREGFVMNRRLHQSLSGQQSRAGKTEAARAIFFGEDGEPLPVGAMVKVPELADTLERIAAGGPEVFYRESAAEFAQYVAAETPQDGKMSASDVRAYTAKMRDPVCAPYRTYKVCGMGPPSSGGVAVAQMLGQLEGFDLSALGPQSAEFWHLFLESQRIAYADRELYLGDADFVEVPVDGLVNPDYMASRGALIDRSTAIAEVQPGTPPGAPMARADGDEPPENGTTHFSVVDGEGNAVSYTSTIEGAFGSGLHWGGFYLNNELTDFSSSPDVNGVPVANRVEGSKRPRSSMAPTIVFDADGEIVLVIGAAGGPTIPVQVARSIIGVIDFGMSAEEALALPLLMSFGSVAITEEGSVAAAVADQLTAMGHGEIRVISPRGKTNALLRTENGWESAGDPRIADLLRYEPLSASEGNRGAEQP

SEQ ID NO: 58156 - DNA, 1764 bp, Photobacterium sp. SKA34
  CDS (1)..(1764): transl_table=11
atgccaaggtttacctccgctacagcctttttattgagtgtttgttgtttttcatttccagcattagccaatgaagttcaacaagcctctgatcatattgaacctgagccgagtattaaccaacaatcacaacagttggtttcaggtacagagtggatgatcgccacagccaatgcctatgccagtcaagcaggggctgatattttacgtcagggtggcagtgctgttgatgcaatgatcacctcgcagctaatattaggcttggttgaaccacaatcatccgggatcggtggtggcggatttttggtgtattgggataatgacaagaaccaaatgacgacatttgatggtcgagaaacggctccttttgctgcgactccccgtttgtttcaagacaatcaaggtcagccactaaaattctatgatgccgttgtcggcggacgatctgtaggtactcctggtacaattaaactgctttggcgcagtcatcagcaatacggaaaattaccgtggaaaacgctttttcttcctgcgataaaattagccaaagaaggcttcatcgtcagcccacggcttgctgcaatggttgaaaatgatgcgaaaaatcttagtcgctatcctacaactaaagcctacttttttgactcacaaggcaaaccacttcaagcaggaagtaagttagttaataacgcttattcaaataccttacgtcaagtggctgattatggccctaaagccttttatcaaggcgatattgcgcgagatattgttaataccgtacagaacgcaaaaggtaatcctggggtgttaaacactatggatcttgccagctacagcgttaaacaacgtgagcctatttgtgccccctaccgtcagtatcaaatttgtggaatggggccacccagctccggcgcattaaccttggggcaaatattagccatgcttaatcattatccattggataagctcggtgctgatagcgtcaaaagttggcagctaattggtgatgcctctcgcttagcttttgctgatcgcggtcgctatatggcagatagtgattatgtgccaatgcctgtccgtggcttactcgatcccaactaccttgccgagcgtgctaaattactcgatggaaataaagcattaacccaagtaaaaccggggataccaccttggaatcatgcccataaccgtgccagtgatgaagctatcgaattgccctccaccagccatttatcgattgttgataaagaaggtaatgtagtctcactcacctcgacgattgaaaacagatttggttcacgtttaatggtcaggggatttctactcaataatgaattaacggacttttcattccgtagccaaattgatggtattcctgttgctaaccgaattgaaccgggtaaacgacctcgctcgtcaatgacacccacgattgttatgaaaaataaccagccagtgctaaccatcggttcacccggaggaagtcagatcattggctatctcgcaaaaaccttggttgcgtatattgattgggagatggatttacaacaagcgatcaacttaccgaatatgaataatcgcttcggtacctttgaacttgaaaaaaacacgcccgcggcagagtgggcgccaaaacttgagaagctgggctataaaactcaaatcaaagatctgaattcaggtattcaagcgataagtattgcgccaaatcagcttattggggcagccgatcctcgtcgagaaggtaaagtgatcagccaataa

SEQ ID NO: 58157 - protein, 587 aa, Photobacterium sp. SKA34
MPRFTSATAFLLSVCCFSFPALANEVQQASDHIEPEPSINQQSQQLVSGTEWMIATANAYASQAGADILRQGGSAVDAMITSQLILGLVEPQSSGIGGGGFLVYWDNDKNQMTTFDGRETAPFAATPRLFQDNQGQPLKFYDAVVGGRSVGTPGTIKLLWRSHQQYGKLPWKTLFLPAIKLAKEGFIVSPRLAAMVENDAKNLSRYPTTKAYFFDSQGKPLQAGSKLVNNAYSNTLRQVADYGPKAFYQGDIARDIVNTVQNAKGNPGVLNTMDLASYSVKQREPICAPYRQYQICGMGPPSSGALTLGQILAMLNHYPLDKLGADSVKSWQLIGDASRLAFADRGRYMADSDYVPMPVRGLLDPNYLAERAKLLDGNKALTQVKPGIPPWNHAHNRASDEAIELPSTSHLSIVDKEGNVVSLTSTIENRFGSRLMVRGFLLNNELTDFSFRSQIDGIPVANRIEPGKRPRSSMTPTIVMKNNQPVLTIGSPGGSQIIGYLAKTLVAYIDWEMDLQQAINLPNMNNRFGTFELEKNTPAAEWAPKLEKLGYKTQIKDLNSGIQAISIAPNQLIGAADPRREGKVISQ

SEQ ID NO: 58158 - DNA, 1608 bp, Desulfitobacterium hafniense DCB-2
  CDS (1)..(1608): transl_table=11
atgctttacgatcccttatatcatccttatccttccaagcgttccctgagctttgccagccggggcatggtggcgacttcccaaggcctggccgctcaagcaggtttggacatcctcaaaaaaggcggaaatgccattgatgcggctattgctactgccgcttgtttaactgtggttgaacccacatccaacggcatgggcggcgatgcttttgctctcgtctggactaaaggccggcttcatggcctgaatgccagcggaacagcccctgcttccctttccggccatgacctcatcaaagccggacaccaagaaatgccccaatacggctggattcccgtgacggtgccgggtgcgcctgcagcctgggcagccttatcggaacgcttcggccggctgcccctgactgaagtccttaaacccgccatcgattatgctgaacagggctatcccgtctctcccgtgctgggccagaactggcagatagcctacacgaaatacgcccaggagctcaagggggaggaatatgaatcctggtttaagacctttgctccccaagggcgcgctcctttcatcggcgaaatctggcgttcccctgatcatgcccgctctttagcccaaatcgcggcaagcaaggcccaagctttttataaaggagacttagccgatcggatcgatgccttctctcaaaaatacggcggctatctgcgcaaaagggatctggaagactatcagcccctctgggtggaccccatccatctccattaccggggctatgatgtctgggaaatcccccctaacggccacggcttagtcgccctgatggctcttaacatccttaagggcttccaattctcggcaaaggactccatcgaaacctatcataagcagatcgaggccattaagctggcttatgtggacggacgcaaatatattgccgatccccggagcatggaagtcaagatcagcgatctgctctccgaaggatatgctctggaacgccgcaaacttattggccaaaccgccctcctccccgaaccgggcactccacccaaagggggaactgtctacctcgctgctgccgatgatgaaggaaacatggtgtccatgattcagagcaattatatggatttcggctcaggcttggtggttcccggcacgggtatcagcctccataaccggggcaataatttttcccttgatccccaccacgctaactttttagaacctaaaaagcgcccctaccataccattattcccggcttccttactaaagacggcaacacggtaggtccttttggggtcatgggcggattcatgcagccccaggggcatgttcaggtgctgatgaatgccatcgactttcatctcaatccccaagctgccttggacgctccccgttttctctgggtccaggaccgccatgttcaggtagagcgttccctgccttcccatatcggggacggcctcagccgtatggggcatgagatcgagtggagtgcgaataccggactctttggacgagggcaaatcatctggcgcaatgacaaggatgtcctggtcggtgccaccgaaccgcgaactgatggcgtcgttgccgcttggtaa

SEQ ID NO: 58159 - protein, 535 aa, Desulfitobacterium hafniense DCB-2
MLYDPLYHPYPSKRSLSFASRGMVATSQGLAAQAGLDILKKGGNAIDAAIATAACLTVVEPTSNGMGGDAFALVWTKGRLHGLNASGTAPASLSGHDLIKAGHQEMPQYGWIPVTVPGAPAAWAALSERFGRLPLTEVLKPAIDYAEQGYPVSPVLGQNWQIAYTKYAQELKGEEYESWFKTFAPQGRAPFIGEIWRSPDHARSLAQIAASKAQAFYKGDLADRIDAFSQKYGGYLRKRDLEDYQPLWVDPIHLHYRGYDVWEIPPNGHGLVALMALNILKGFQFSAKDSIETYHKQIEAIKLAYVDGRKYIADPRSMEVKISDLLSEGYALERRKLIGQTALLPEPGTPPKGGTVYLAAADDEGNMVSMIQSNYMDFGSGLVVPGTGISLHNRGNNFSLDPHHANFLEPKKRPYHTIIPGFLTKDGNTVGPFGVMGGFMQPQGHVQVLMNAIDFHLNPQAALDAPRFLWVQDRHVQVERSLPSHIGDGLSRMGHEIEWSANTGLFGRGQIIWRNDKDVLVGATEPRTDGVVAAW

SEQ ID NO: 58160 - DNA, 1779 bp, Alteromonadales bacterium TW-7
  CDS (1)..(1779)
atgcattttaaacttaactcattatttgctatcggcttaggtgtactgtctttgccggtgctgtcaaaagaacccacaaaagtagaagttcgcgaaccagaagctaccacatcaattagttctaagcagattgttgtaggtgacaaatacatggttgccgcggcaaatccgtatgcatctcaagcgggacagcaaatattagcaaaaggcggcaatgcagttgatgcagcaatagccactcaacttgttttaacacttgttgagcctcagtcatcgggtattggtggcggtacatttatgatgtactacaacaaagcaaataataagttaaccagctttgatggaagagaaacggcccctaaaaatgcgaatgaaaatttatttttaaataagcatggcaaagcggtcaaatggattgaagccgttgtaggcggtcgttctgtaggtgtacctggtgttctacatgcctttgcaaatgcgcataagcactatggtttattaccttgggaacagctatttaaaccggctattgaacttgctgaacaagggtttgttgtatcgcctagattacatggtttgttagctcgccaactaaatccaggtgttatgagtatgccagtgataaatgaatacttttacccaaatggtaaactcattgaggccggtaccgttaaaaaaaaccagccgcttgctgatttatacaaagccattgctaatgaaggcattgatgcgttttataaaggtgaaaacgcaaaaaaaatggtaagtgcggtacaaaattcaaaaattgcacccggtaaattatctcagcaagaccttgcacaatacaaaagcaaagaacgcgatgctgtttgtataaaataccgtgtttataacgtatgttctatggcaccaccaagtagtggcggtgtggctgttttacaaatactagggttactagagcttacaaatatttctgccttaaagcctaacagcgaacaagcaattcactacttcagccaagcgtcgcgtattgcctttgccgatagaaatgtatacatgggcgatccagattttactgaggtaccaactcaagcgctattaaacaaaagctacattaaatcacgcgcaacactcataaccgaaaaagatcagcatgcagttgccggcgaccccgttaactacttaagttatgcacaagatgattcgtatgaactcccttcaacatcgcatgtctctattgttgatagctttggtaatgcagtatcaatgaccagctcaatagaaatggcatttggctctacagttatggttaatggttatattttaaataatcagttaaccgatttctcactttctcctcgtaaaaacggtaagttagttgctaatcgtgtagagccaggaaaacgcccgcgcagttctatgtcaccggttatggtttttaatgaagatggtagcttacgtttagttgtaggatctcctggtggtagccgcattattgactacgtcgctcaagtagttgttggcgttttagactggaatttatcggtgcaagaagctattaacctgccgcgtactactaatcgtaatgattacaccagccttgaaaaaggcaccgttattgaatcacttgcaccagcactcacttcacgtggtcataaagttcgtgtgttagacctaaattcaggtttacatggtgttgaagtgaaaaataataagctgtatggcgcagccgatccgcgccgtgaaggtgttgcgttgtctgatttaactaacaataacgccactttcaaattttaa

SEQ ID NO: 58161 - protein, 592 aa, Alteromonadales bacterium TW-7
MHFKLNSLFAIGLGVLSLPVLSKEPTKVEVREPEATTSISSKQIVVGDKYMVAAANPYASQAGQQILAKGGNAVDAAIATQLVLTLVEPQSSGIGGGTFMMYYNKANNKLTSFDGRETAPKNANENLFLNKHGKAVKWIEAVVGGRSVGVPGVLHAFANAHKHYGLLPWEQLFKPAIELAEQGFVVSPRLHGLLARQLNPGVMSMPVINEYFYPNGKLIEAGTVKKNQPLADLYKAIANEGIDAFYKGENAKKMVSAVQNSKIAPGKLSQQDLAQYKSKERDAVCIKYRVYNVCSMAPPSSGGVAVLQILGLLELTNISALKPNSEQAIHYFSQASRIAFADRNVYMGDPDFTEVPTQALLNKSYIKSRATLITEKDQHAVAGDPVNYLSYAQDDSYELPSTSHVSIVDSFGNAVSMTSSIEMAFGSTVMVNGYILNNQLTDFSLSPRKNGKLVANRVEPGKRPRSSMSPVMVFNEDGSLRLVVGSPGGSRIIDYVAQVVVGVLDWNLSVQEAINLPRTTNRNDYTSLEKGTVIESLAPALTSRGHKVRVLDLNSGLHGVEVKNNKLYGAADPRREGVALSDLTNNNATFKF

SEQ ID NO: 58162 - DNA, 1743 bp, Escherichia coli B
  CDS (1)..(1743): transl_table=11
atgataaaaccgacgtttttacgccgggtggccattgctgctctgctctcaggaagttgttttagcgccgccgccgcgcctcctgcgccgcccgtctcgtatggtgtggaggaagatgtcttccacccggtacgcgcgaaacagggaatggtagcgtctgtggacgccactgccactcaggtgggggtggatattctcaaggagggcgggaatgccgttgatgccgccgtggcggtgggctacgcgctggcggtaacgcatccgcaggcagggaatctgggcggtggtggttttatgttaatccgctcgaaaaatggcaataccacggctatcgatttccgcgaaatggcacccgccaaagcgacccgcgatatgttcctcgatgatcagggcaacccggacagcaaaaaatcactcacttcgcatctggcttccggcacaccgggtacggtagcaggtttctcgctggcgctggataaatacggcaccatgccgctgaacaaagtcgtgcagcccgcgtttaaactggcacgcgatggttttatcgttaacgacgcgctggctgacgatctcaaaacctacggtagcgaagtgttgccgaatcacgaaaacagtaaagctatcttctggaaagagggcgagccgctgaaaaagggcgacacgctggtgcaggcgaacctggcaaagagcctggagatgattgctgaaaacggcccggacgaattctataaaggcacgattgcggaacagatcgcccaggagatgcagaaaaacggtggcttgatcactaaagaagatttagcggcctataaagcggtcgaacgcactccgataagcggcgattatcgcgggtatcaggtttactccatgccaccgccatcctccggcgggatccatatcgtacaaatcctcaatattctggaaaacttcgatatgaagaaatacggctttggcagcgccgatgcgatgcaaatcatggcagaagcggagaaatacgcctacgccgaccgctcggaatatcttggcgacccggattttgtcaaagtcccgtggcaggcactgaccaataaagcctatgccaaatccattgccgatcaaattgatatcaacaaagcgaagccgtccagtgagattcgccctggcaagcttgcgccttatgagagtaatcaaactacccattactctgtagtggataaagacggtaacgcggtggcggtgacctatacgctgaacaccaccttcggtacgggtattgtcgcgggcgagagcggtattctgcttaataaccagatggatgatttctccgccaaaccgggcgtaccgaacgtttacgggctggtgggcggtgatgccaacgccgtcgggccgaacaaacgcccgctgtcgtcgatgtcgccgaccattgtggtgaaagacggtaaaacctggctggttaccggtagcccaggcggtagccggatcatcactacagtgctgcaaatggtggtgaatagcatcgattatggcatgaacgtcgccgaagcgaccaatgcgccgcgtttccaccatcagtggttgccggacgagctgcgtgtcgaaaaagggtttagcccggatacgctcaagctgctggaagcaaaaggtcagaaagtggcgctgaaagaggcgatgggcagtacacaaagcattatggttgggccggacggtgagttgtacggcgcatccgacccgcgctcggtggatgatttaacggcggggtactaa

SEQ ID NO: 58163 - protein, 580 aa, Escherichia coli B
MIKPTFLRRVAIAALLSGSCFSAAAAPPAPPVSYGVEEDVFHPVRAKQGMVASVDATATQVGVDILKEGGNAVDAAVAVGYALAVTHPQAGNLGGGGFMLIRSKNGNTTAIDFREMAPAKATRDMFLDDQGNPDSKKSLTSHLASGTPGTVAGFSLALDKYGTMPLNKVVQPAFKLARDGFIVNDALADDLKTYGSEVLPNHENSKAIFWKEGEPLKKGDTLVQANLAKSLEMIAENGPDEFYKGTIAEQIAQEMQKNGGLITKEDLAAYKAVERTPISGDYRGYQVYSMPPPSSGGIHIVQILNILENFDMKKYGFGSADAMQIMAEAEKYAYADRSEYLGDPDFVKVPWQALTNKAYAKSIADQIDINKAKPSSEIRPGKLAPYESNQTTHYSVVDKDGNAVAVTYTLNTTFGTGIVAGESGILLNNQMDDFSAKPGVPNVYGLVGGDANAVGPNKRPLSSMSPTIVVKDGKTWLVTGSPGGSRIITTVLQMVVNSIDYGMNVAEATNAPRFHHQWLPDELRVEKGFSPDTLKLLEAKGQKVALKEAMGSTQSIMVGPDGELYGASDPRSVDDLTAGY

SEQ ID NO: 58164 - DNA, 1791 bp, Pseudomonas putida GB-1
  CDS (1)..(1791): transl_table=11
atgaaattttctacgccgctgatgagcgctctgtgcctggtggctgccagtggctgggcctgtgccgaccaggtgctgcccgcaccaccggagctggcctctggttaccgcagcgggctgcagccggtgcacgccagccggcacatggccgctgccgccaacccgctggccagtgaagcggggcgggcgatattgcgtgccgggggcagtgcgattgacgctgccatcgccatgcagatggtgctgaccctggtcgaaccccagtccagtggcattggcggcggggcgttcatcttgtattgggacggcaggcgcgtacaggcattcgacggtcgcgaggctgcgccggcggcggtgacagagaagctgttcctgcaagccgacggtacaccggtgccgttccgggcagcgcagattggtggccgttcggtcggcgtgccaggggggctacgtgccttgaaactggcccacgatcaacacggtaagctgccttggcgcgacctgttcgccccggccattgccctggcacgcaacggtttcgcggtttccgagcgcctgcacacgttgctggccggggacccctacattggccgttcacccgcaatggctcgctattttctggatgaacagggcaagccgctggcagtgggcacaacactgcgaaaccctgagttggcctacaccttcgagcggatcgcggcagaaggccccgaggcgttctacagcggtgaaattgccgaagccattgtggccaaggtgcgcagccatgccaatgcgggttacctgtcgctgcaggacttgcagcagtatcaggccaaggagcgcgagccggtgtgtggcccttacaaagcctggcgaatatgcggcatgccgccgccatcgtcgggcggggtgacggtgctgcagaccttgggcatgctcgaagccgtgcaacgcgctgcgccccagcgcgacctggcagcgctgcgtccgctggccacctcgtccccggcccggctggaggcaccgccactggccgtgcatctgattgccgaggccgaacgcctggcctatgccgaccgcgcccagtacctggccgacagcgactatgtgccggtgccggtcaaggccctgaccgatcccgcctacctggccagccgcgccgccttgatcggtgagtacagcatgaagcgtgcactgccgggccggccgcaaggcgcggacctggccctggcgcctgaccgctcgccattgcgcatttccacgtcgcacctcagtgccgtggatgacagtgggcaggccttggccatgaccagctcggtggaggccgcattcggttcgcacctgatggtcaaaggcttcctgctcaacaatcacctgaccgacttttccttcaccccccaagagcacggcaagccggtggccaaccgggtgcagccgggcaagcggccactgtcggccatggcgccgaccttggtgttctcgcgtgcctctggcgagcttgtggccagcctcggctcgccgggcggttctcagatcattggttacgtgaacaaggcgctggtcggcctgctggattggcagctcgacccgcagcaggccgccggcctgcccaacttcggcagccgcaatgcgggtaccgaagtggaagcagggctggccagcccgtcgctgatccgccagttggcggcctggggacacgacgtgacaccgatgaccatgaccagcggcatgcagatcatccagcgcagtggcgagggttggtcaggtggtgccgaccctcggcgggaaggtgtggcccttggcgactag

SEQ ID NO: 58165 - protein, 596 aa, Pseudomonas putida GB-1
MKFSTPLMSALCLVAASGWACADQVLPAPPELASGYRSGLQPVHASRHMAAAANPLASEAGRAILRAGGSAIDAAIAMQMVLTLVEPQSSGIGGGAFILYWDGRRVQAFDGREAAPAAVTEKLFLQADGTPVPFRAAQIGGRSVGVPGGLRALKLAHDQHGKLPWRDLFAPAIALARNGFAVSERLHTLLAGDPYIGRSPAMARYFLDEQGKPLAVGTTLRNPELAYTFERIAAEGPEAFYSGEIAEAIVAKVRSHANAGYLSLQDLQQYQAKEREPVCGPYKAWRICGMPPPSSGGVTVLQTLGMLEAVQRAAPQRDLAALRPLATSSPARLEAPPLAVHLIAEAERLAYADRAQYLADSDYVPVPVKALTDPAYLASRAALIGEYSMKRALPGRPQGADLALAPDRSPLRISTSHLSAVDDSGQALAMTSSVEAAFGSHLMVKGFLLNNHLTDFSFTPQEHGKPVANRVQPGKRPLSAMAPTLVFSRASGELVASLGSPGGSQIIGYVNKALVGLLDWQLDPQQAAGLPNFGSRNAGTEVEAGLASPSLIRQLAAWGHDVTPMTMTSGMQIIQRSGEGWSGGADPRREGVALGD

SEQ ID NO: 58166 - DNA, 1668 bp, Pseudomonas putida GB-1
  CDS (1)..(1668): transl_table=11
atgcgtattgtcccgttccagtacctggctctcgcagccgcgattctgagctgttcctcggtttacgccgccaacctggagggcggcgcggtggccgcacctgatcaatatggtgcacaggtagccgccgacattctgaaaaagggcggcaacgcggtggacgccgcagtggcaaccgccttcaccctggcggtgacctaccccgaggccggcaacatcggtggtggcggcttcatgaccctgttcatcgacggcaagccctacttcctcgactaccgcgaagtcgcgcccaaggccgccacgcgcaacatgtacctggacgacaagggcgaggtcatcgagaacctgagcctggttggtgtacgcgccgctggtgtacccggtacggtgatgggcttgtgggaggcgcaccagaagttcggcaagctgccctggagcgagttgctgaccccggccatcggctatgcgaaaaacggcttcaaggtggcggaaaaacagtaccagtaccgcaacgatgcccagggcatgttcaagacagcgaccaacttcaacgactacttcggcaacatgaaggttggcgagctgttcaaacagccggaaatggcccagaccctggagcgcatcgccgacaagggcgtgagcgagttctaccagggcaagaccgccgacctgctggtggcgcagatgcaggccgacaaaggcctgatcaccaaagaagacttgaaggactacaaggccgtgtggcgtgagccgatggccgtaagctggcgcggcaatgtggtgtacaccgccccaccgccgagctccggtggcgtggcactggcccagttgctgggcatcaaggaagaccgcgcggcggacttcaaaggggtggcgcacaactcggcgcagtacatccacctgttggcagagatcgaaaagcgggtgttcgccgaccgtgccgactaccttggcgacccggcctttaccaaggtgccggtggaccagctggtggccaaggattacctggccaagcgcgccgcgcaggtcaacccgcaggccatttccgacaccgacaaggtcaagccagggctggagccgcaccagaccacgcatttctcgatcgtcgacaagcaaggcaatgcggtcagcaatacctacaccctcaacctcgactacggcagtggcgtggtggtgaagggcgcgggcttcctgctgaacgacgagatggatgatttcagcgccaaaccgggtgcggctaacgcctttggtgtggtcggcggtgatgccaacgccatcgaaccgggcaagcgcatgctttcatcgatgagccctagcctgatgacccgcgatggcaaggtcgagctggtgatcggtaccccgggtggttcacggatcttcacctcgatcttccaggtgatgaacaacctgtacgactacggcatgccgttggacaaggcggtggcggcgcagcgggtgcaccatcagttgctgcccaaggacaccatctactttgacagctatgcgcccctgaccgggccggtagctgatgaactgaagaagatgggttacgtgctggaggaccagggttgggagatgggcgatatccaggcgatccgggtggatggggcgaagcttgagaccgcttccgatccgcgtgggcgtggggtggggatgatcgtcaagtaa

SEQ ID NO: 58167 - protein, 555 aa, Pseudomonas putida GB-1
MRIVPFQYLALAAAILSCSSVYAANLEGGAVAAPDQYGAQVAADILKKGGNAVDAAVATAFTLAVTYPEAGNIGGGGFMTLFIDGKPYFLDYREVAPKAATRNMYLDDKGEVIENLSLVGVRAAGVPGTVMGLWEAHQKFGKLPWSELLTPAIGYAKNGFKVAEKQYQYRNDAQGMFKTATNFNDYFGNMKVGELFKQPEMAQTLERIADKGVSEFYQGKTADLLVAQMQADKGLITKEDLKDYKAVWREPMAVSWRGNVVYTAPPPSSGGVALAQLLGIKEDRAADFKGVAHNSAQYIHLLAEIEKRVFADRADYLGDPAFTKVPVDQLVAKDYLAKRAAQVNPQAISDTDKVKPGLEPHQTTHFSIVDKQGNAVSNTYTLNLDYGSGVVVKGAGFLLNDEMDDFSAKPGAANAFGVVGGDANAIEPGKRMLSSMSPSLMTRDGKVELVIGTPGGSRIFTSIFQVMNNLYDYGMPLDKAVAAQRVHHQLLPKDTIYFDSYAPLTGPVADELKKMGYVLEDQGWEMGDIQAIRVDGAKLETASDPRGRGVGMIVK

SEQ ID NO: 58168 - DNA, 1767 bp, Vibrio cholerae O1 biovar eltor str. N16961
  CDS (1)..(1767): transl_table=11
atggagatgggcatgaattggactcatacccccttggcgctttctgcgctgatgtttgcgatggctgcacaagctaccccgaatcaagccaccgatgcggttgcgccagaacaagccactggctttgagcacaaatcgttagtcaaagccaaaaactggatggtcacggcggctaacccactggcgagcgaagcaggggcttcgattttacgccaaggcggtaatgcgatagatgccatggtgacgacacaactgatgctgggcttggttgagccgcaatcatccggcattggcggtggctcgtttttggtctactgggatgccaagaaaaaagcgctcactacgttcgatggccgcgaaaccgcgccactcaacgccacacctgaactatttttagatagtacaggtcagccaatgaaattttacgatgccgtggtcggcggtcgctcggttggtactcccggcacggtcaaactgctgtgggaaacccatcgtcaatacggcaagctggaatgggcgcgcttgattgaacctgtcgccaaactcgccgagcaaggctttgaggtaagtcctcgcctcgcggcactcattgcagaagataaagagcgtttaggccgttttcctgccaccaaagcctatttctttgatgcacaaggtgaacccctcacagccggcactttactgaaaaacccggactacgccgccacactcagagccatcgcacagcaaggcgcctccgccttctatcaaggtgacatcgccaaagacatcatcgccacggtgcaaaatgcgccgggcaatcccggagtgctcgctcagcaagattttgatacgtaccaagtcaaacagcgtgcgcccgtgtgtgcggcttatcaaagctatcaagtctgcggcatggggttacccagctcaggtggcctgacggtgggacaaattctcgccctcaccgaacaatacgatctcaaaggttggggcgcgcaggatgtgaaatcatggcaagtgctgggggatgcctcacaactggcgtttgccgatcgcggcttgtacatggccgatcaagattatgtgcccgttccgacccaaggcttattggataaaacctatctggccgagcgcgctaaactgatccaacccggcaaagcgctgaccagtgcgccagcaggcaatccgccttggcatcatgcgcagctacgcagccccgatcagtcgatagaactgccctccaccagccacttcaacattgttgaccgtgaaggcaacgtggtttccttcaccacctcgatcgaaaacgcgttcggttcacgcttgttggtgcgcggctttttgctcaacaacgaactgaccgatttttcgtttgccacgcaaagtgaaggtcgcccgattgccaatcgcttagagccgggcaaacgcccacgttcatcgatggcaccgaccattgtcttgcaggataaccaaccctatttggcgattggctcacccggtggcagccgaattattggctatgtggcgcaagcaatcgttgctcacacccaatggggcatgaacattcaagccgcgatcaatcaaccgcatgtgctgaatcgttttggcgaaatcgagctcgaacaaggcacctccgccgagcagttcaagccagcgctagaaagtttgggggcaaaggtcgggatcaaagagctcaactctggcctgcacgccattcgtattactgcacaaggtcttgagggagccgctgaccctcgccgtgaaggcgtcgccatcggcgagtaa

SEQ ID NO: 58169 - protein, 588 aa, Vibrio cholerae O1 biovar eltor str. N16961
MEMGMNWTHTPLALSALMFAMAAQATPNQATDAVAPEQATGFEHKSLVKAKNWMVTAANPLASEAGASILRQGGNAIDAMVTTQLMLGLVEPQSSGIGGGSFLVYWDAKKKALTTFDGRETAPLNATPELFLDSTGQPMKFYDAVVGGRSVGTPGTVKLLWETHRQYGKLEWARLIEPVAKLAEQGFEVSPRLAALIAEDKERLGRFPATKAYFFDAQGEPLTAGTLLKNPDYAATLRAIAQQGASAFYQGDIAKDIIATVQNAPGNPGVLAQQDFDTYQVKQRAPVCAAYQSYQVCGMGLPSSGGLTVGQILALTEQYDLKGWGAQDVKSWQVLGDASQLAFADRGLYMADQDYVPVPTQGLLDKTYLAERAKLIQPGKALTSAPAGNPPWHHAQLRSPDQSIELPSTSHFNIVDREGNVVSFTTSIENAFGSRLLVRGFLLNNELTDFSFATQSEGRPIANRLEPGKRPRSSMAPTIVLQDNQPYLAIGSPGGSRIIGYVAQAIVAHTQWGMNIQAAINQPHVLNRFGEIELEQGTSAEQFKPALESLGAKVGIKELNSGLHAIRITAQGLEGAADPRREGVAIGE

SEQ ID NO: 58170 - DNA, 1782 bp, Agrobacterium tumefaciens str. C58
  CDS (1)..(1782): transl_table=11
gtgccgctttggaggataaggccaatgaaaatgagatttctcagtgaggcttttctcgccttgatgctttccaccgcaatcacctcagcccagcaggcgtctgacacggtggcacccgaaaaagcgactgctgttgcgactgcccgacgtgtcgagtcccggagcttcatggtcgcagcggccaatccgctagcggccgaggcggggcgcgacgtgatcgccgcgggcggtaacgctatagatgcgatggtggcggtgcagaccgtgctcggcctcgttgaaccgcagagttccggtctcggcggaggtgccttcctcgtctactaccacgcaaaaaacggcaagctgacgacgttggacggccgggagacggcgccgatggacgccacgccaaagctcttcctggatgacaaaggtcaaccgcttaaattcatggacgccgtggtcggcggccgttccgttggcacgcccggaacggtgcgacttctggaggaggcccataaacgttatggaaaggcggattgggcaagcctgctgaagccggcggaaacgctggcgaccgagggtttcaaagtgtcgcctcgccttgcctccctcatcgcgtccgagggcgaccggttgaagaaatatccagaggcccggtcctatttctttgacacctccggggccgccctgcagaccggtgccctgttgaagaacccggcctatgccgagacactcgcaacgctcgccaaaagcggcgccgatgccttttacaaggggaggatcgccgaggcggtcgtcaagaccgtgcgcgaggcgaccgacaatcccggcgtgctgtcgctttccgatctttccaactatcgcgtcatcgagcgcgagccggtctgcttcatctatcgtgctcttgacgtttgcggcatggggccgccatcgtcgggcggcatcgccatcggccagatgctcggcatggcggagagttttgatctcaagtccctggggccgaaaaatgtcgaaagctggcgccttatcggcgatgcgcagcgcctcgccttcgccgaccgcgagcgttatgtcgctgacaccgattttgtgccgctaccgatcaagggcctgctggacaagacttatctcggcgagagggcaaaactgctcgacggcgacagggcgctggccaaggatgccgtcaaggccggcgaaccggaatgggaccacgcgctgcttttcggccgggatgccgcactcgaattgccctctaccagccattttgtcattgtcgacaaggagggcaacgtggtctcgatgacgacgacgatcgaaagcggcttcggctcgcgtctgatgacgaacggcttcctgctcaataacgagttgacggacttttccttcaagacacatgacggcggcctgccgatcgccaaccgcgtcgagcctggcaaacggccgcgctcctccatggcgccgactatcgtgatgaaggatggcaagccgctactcgccattggttcgcccggcggcagccagatcatcggctacgtggcgcaggcgctgatcgcctatattgactggggcatgccggttgaggcgattgtcgcccagccgcacctcatcaaccgcttcggcacctacgacatcgaggccggcactagcgcggaagatctggtcgagccgctgaaggcgctcggttacgaggtgaaaccgggtgagttgaattccggtttgcatgccatcgagatcactgcgcaaggtttggcaggtagcgccgatccaaggcgtgagggagccgttatgggggagtga

SEQ ID NO: 58171 - protein, 593 aa, Agrobacterium tumefaciens str. C58
MPLWRIRPMKMRFLSEAFLALMLSTAITSAQQASDTVAPEKATAVATARRVESRSFMVAAANPLAAEAGRDVIAAGGNAIDAMVAVQTVLGLVEPQSSGLGGGAFLVYYHAKNGKLTTLDGRETAPMDATPKLFLDDKGQPLKFMDAVVGGRSVGTPGTVRLLEEAHKRYGKADWASLLKPAETLATEGFKVSPRLASLIASEGDRLKKYPEARSYFFDTSGAALQTGALLKNPAYAETLATLAKSGADAFYKGRIAEAVVKTVREATDNPGVLSLSDLSNYRVIEREPVCFIYRALDVCGMGPPSSGGIAIGQMLGMAESFDLKSLGPKNVESWRLIGDAQRLAFADRERYVADTDFVPLPIKGLLDKTYLGERAKLLDGDRALAKDAVKAGEPEWDHALLFGRDAALELPSTSHFVIVDKEGNVVSMTTTIESGFGSRLMTNGFLLNNELTDFSFKTHDGGLPIANRVEPGKRPRSSMAPTIVMKDGKPLLAIGSPGGSQIIGYVAQALIAYIDWGMPVEAIVAQPHLINRFGTYDIEAGTSAEDLVEPLKALGYEVKPGELNSGLHAIEITAQGLAGSADPRREGAVMGE

SEQ ID NO: 58172 - DNA, 1752 bp, Caulobacter crescentus CB15
  CDS (1)..(1752): transl_table=11
ttgcccgctccgcccaatcggctagcgtggcggaacgatctcctggaggccgccttgcgcctgttcgctcccctcgccgccgccctttcggcggcgcttctgcttgtcgcgccgagcgtcgaggccaagccgaggtccgccgccgcagcggtccgggcgctggaggcgggagccgtggcctcgcccgaccaatacggcgccctcgcggcgcaggaggttctcaaggccggcggcaatgcggtcgatgcggcggtggccaccggcttcgccctggccgtcacctatcccgaagccggcaatctgggcgggggcgggttcatgaccgtctacatggacggcaagccctacttcctagactaccgcgagacggcgccggcggcggccagggccgacatgtatctgggtcccgatggcgagctggtcgagggtctgtcgctgtacggcggtctggcggcgggcgtgccgggcacggtgcgcggcctggccatggcccatcagcgctttggcaagctgccttgggggcaggttctggccccggccatccgctatgcgcgggacggcttcgtcgtcgatgcgcatctggcgggggtgctggccgacgagccgccgcctgagttcgccaagaccaacttccgcacctacttcgcggcgcacaaggccgggacgctgttcaagcagcccgagctggccgccaccctggagcggatcgccctggtcggcgaccgggcgttctatgagggcaagaccgccgacctgatcgtcgcccagatggcgcggggcccggtgaaggggctgatcaccaaggccgacctttcgacctacaaggcggcctggcggacgccgctggtcgctaagtggcgcggctatgacgtgatcaccgccccgccgcccagctcgggcgggatcgccctgatgcagctgctcctgatgaagcagaacctggcgccgatgttccagggcgtggccctgaacgatccgcagtatgtccacctgctggccgagatcgaaaagcgcgtctacgccgaccgcgccgagtatctgggcgatccggatttcgtgaaggtcccggtctcgaacctgatcgacccggcctatgtggcgcggcgcgccaaggaggtcgatcccgccaagccttcggcgaccaaggccgtccagccgggtctggagaagcacgagaccacccactattcgatcgtcgaccaatggggaaacgccgtctccaacacctacaccctgaacggctcgttcggctcgggcgtggtggtcgagggcgcgggcttcatcctcaacaacgagatggacgacttctcggccaagcccggcgcgcccaacatgttcggcgtggtcggcggggcggccaacgccatcgcgcccggcaagcgccccctgtcctcgatgacccccacgatcctgaccaaggacggccgggtggccatggtgatcggcacgcccggcggctcgcggatcttcgcctgggtcttccaggtgctggccaatgtctatgaccatggtctgagcctaaaggccgcccaggccgcgccgcgctttcaccatcagctgttgccgcagaacgtgatcttctacgaacgctcgggcccgccctcggctgacctgaaggcggcgctggaggcgcggggctacacttggaccgagagcttcagcggcgatgtcgaggcgatccaggtgctgggccgcacgccggttcccgagcccgacccccgtgcgcgcggggtggggctggtggtgaagtag

SEQ ID NO: 58173 - protein, 583 aa, Caulobacter crescentus CB15
MPAPPNRLAWRNDLLEAALRLFAPLAAALSAALLLVAPSVEAKPRSAAAAVRALEAGAVASPDQYGALAAQEVLKAGGNAVDAAVATGFALAVTYPEAGNLGGGGFMTVYMDGKPYFLDYRETAPAAARADMYLGPDGELVEGLSLYGGLAAGVPGTVRGLAMAHQRFGKLPWGQVLAPAIRYARDGFVVDAHLAGVLADEPPPEFAKTNFRTYFAAHKAGTLFKQPELAATLERIALVGDRAFYEGKTADLIVAQMARGPVKGLITKADLSTYKAAWRTPLVAKWRGYDVITAPPPSSGGIALMQLLLMKQNLAPMFQGVALNDPQYVHLLAEIEKRVYADRAEYLGDPDFVKVPVSNLIDPAYVARRAKEVDPAKPSATKAVQPGLEKHETTHYSIVDQWGNAVSNTYTLNGSFGSGVVVEGAGFILNNEMDDFSAKPGAPNMFGVVGGAANAIAPGKRPLSSMTPTILTKDGRVAMVIGTPGGSRIFAWVFQVLANVYDHGLSLKAAQAAPRFHHQLLPQNVIFYERSGPPSADLKAALEARGYTWTESFSGDVEAIQVLGRTPVPEPDPRARGVGLVVK

SEQ ID NO: 58174 - DNA, 1737 bp, Caulobacter crescentus CB15
  CDS (1)..(1737): transl_table=11
gtgaaacccttccgccttctcgccgcagccgccagcgtcttcgccctggcgctttcgcccatcgtctcgtccgaggcgctggcccagaagaagcagctgctggaatatcccagcatccgctcaccggtggtgggcgagcgcggcatggtggtcagccagaacgccatcgccaccaaggtcggggccgacatcctgcgccagggcggcaacgccgtggacgccgcggtcgccaccgccttcgccctggccgtgaccctgccgcgcgcgggcaatatcggcggcgacggcttcatgatggtgcacctggccaagacgaacgagaccgtcttcatcgactatcgcggcaccgcgcccaaggccgccaagctcgagaccttcgtcgatgcgaacggcaaggagatggacgacgtggcctcgcgcggctaccgcgcgcccaccgtccccggcaccgtcgcgggtcttcatctggcccaccagaagtatggtcgtctgccctggaagcaggtggtcgagccggcctatcgtctggccgccgacggcgtggtgctgacgcccgacgaagccttcgtcttcagttggggcaaggagcgcctgtccgagagcgaggcgggcaagaaggccttctacaagacgggcggcgagctctatcgcgccggcgagatcctcaagcagcccgagctggcctggtctctgcgccagatcgccgacaagggcgccgaagctttctatcgcggcgagatcgcccagcgcttcgccgccgacatgaaggcccatggcggcctgatcaccctggaggatctggcgtcctacaaggccgagatccgccagccgctggtcggaagctatcgcggcctgacggtcaagacctcgccgcccgccagcgccggcggcgcgaccctcttggaaatgctcaacatcctggagaccttcgacctgaaggccacggggctgggctcggcaaagaccctgcacctgcaggccgaggccatgaagatggcctatgccgaccgctacaagtatctgggcgacaccgatttcgtgaaggtcccgctgcagggcttcacgtccaaggcctatggcgtccagcgcgccaagctgatcgatccggacaaggccaggcccgccaaggaactgggcgccggcgatccctgggccttcgagagcccgaacaccacccacttctcggtggccgacgccgagggcaatgcggtctccaacacctatacgctgggggctgatttcggctcgggcgtgatggtggccggcgcgggcttcgtgctgaacaaccagatgaacaactacgcccacaaggcggcctggcgggctcagaaggccggcgggacgctgccgcccaacgccctgcagccgggcaagcgcgtgctgtcgaccatgatgccgaccatgctcttcaaggacggcaagccgtggctgatcaccggcacgccgggcggcagcacgatcatcgacacggtgctgcaggtcatcgtcaatgtcgtcgacttcaagctgaacgtggccgaggccacccatcagccgcgcatcttccaggacgccagcgacaccctgcgcgtcgagccgaacttcaatccagacacggtggccatcctcaaggcgatgggccacccgataacctcggacgagaccatgggctcagcccaatcgatcatgatcgaaaacggtctcttcttgggcggcgccgatccgcgtcgtcccggggccgaggcgatcgcgccctga

SEQ ID NO: 58175 - protein, 578 aa, Caulobacter crescentus CB15
MKPFRLLAAAASVFALALSPIVSSEALAQKKQLLEYPSIRSPVVGERGMVVSQNAIATKVGADILRQGGNAVDAAVATAFALAVTLPRAGNIGGDGFMMVHLAKTNETVFIDYRGTAPKAAKLETFVDANGKEMDDVASRGYRAPTVPGTVAGLHLAHQKYGRLPWKQVVEPAYRLAADGVVLTPDEAFVFSWGKERLSESEAGKKAFYKTGGELYRAGEILKQPELAWSLRQIADKGAEAFYRGEIAQRFAADMKAHGGLITLEDLASYKAEIRQPLVGSYRGLTVKTSPPASAGGATLLEMLNILETFDLKATGLGSAKTLHLQAEAMKMAYADRYKYLGDTDFVKVPLQGFTSKAYGVQRAKLIDPDKARPAKELGAGDPWAFESPNTTHFSVADAEGNAVSNTYTLGADFGSGVMVAGAGFVLNNQMNNYAHKAAWRAQKAGGTLPPNALQPGKRVLSTMMPTMLFKDGKPWLITGTPGGSTIIDTVLQVIVNVVDFKLNVAEATHQPRIFQDASDTLRVEPNFNPDTVAILKAMGHPITSDETMGSAQSIMIENGLFLGGADPRRPGAEAIAP

SEQ ID NO: 58176 - DNA, 1746 bp, Sinorhizobium meliloti 1021
  CDS (1)..(1746): transl_table=11
atgcgcagtccctgcctgaaatccctatccattaccctgatcgtcgcgctgagtacgttcgcaccgcggcagggcctggcggcctcgccggagccggtcaaggcagagcacggcatggtcgtgaccgcccagcatcttgcatccgacatcggcgtcgaggtcctgaagaagggcggcaatgcgatcgatgcggcggttgcggtcggctatgccctcgccgtcgtctaccctaccgccggcaacatcggcggcggcggcttcatgaccatccgcttcaaggacggcaagacgaccttcctcgattttcgcgagcgcgcgcctctcgccgccaccaagaccatgtatctcgacgacaagggcgatctcgtcaagggattgagcaccgaaggctatctcgccgtcggcgtgcccggaccggtcatgggtttcgagttcgcgcgcagccgttacggcaccaagccgctgaaggaactgatcgatccggcgatcgagctcgcgcgagaaggcttcgtgctccaacagggcgatatcgagtctttcgacggcgagaccgagcggctcgccagggatccggctgccgccgcgatcttcctgaagccggacggcaagccttttgcagccggtgaccggctggtccagaccgatcttgccgcttcgctttcgagcatcgccgaaaaaggcacggacgccttctacaagggtgcgatcgccgacgcgatcgtcaaggcgagcgcggataagggcggcattctcgccaaggaggatttcgaacgctatcaggtccgcgagctcgagccggtcaagtgcaactaccgcggctatgacatcgtctcctcgccgccgccatcgtcaggcggattgatcatctgcgagatcctcaacatcctcgaaggctatccgctctcctatctcggttatggctctgccgagacggtgcatgcgatgatcgaggcgatgcgccacgcctatgtggatcgcaacaccgcgctcggcgatccggccttcgtcgagaacccggtcgcaaagctcgtcgacaagagctacgcgaaagaaatccgcgccaagatcgaccccttcaaggccggcgtttcccaggagctgatgccggcgggctttaccgaaagcaaggagacgacccattattccatcatcgacgacgaggggaatgcggtcgcggtgacctacacgctgaacggctccttcggcgcgggcgtcgtcgcgcccggcacgggtattctcctcaacaacgagatggacgatttcaccgccaagccgggaacccccaatctctatggactcgtgcagggcgaggcgaatgcgatcgagcccggcaagacgccgctttcatcgatgagcccgacgatcatctccagggacggcaagccgttcatggtgatcggcagccccggcggcgcccgcatcatcaccatcacgctggaagcgatcatcaacgtgatcgaccacggcatgaacattcaggaggccgtcgacgcgccgcgagtccaccatcagtggcttccggacaaggtcttcatggagccctatgctctttcgcccgatacgcgcaaactgctttccgccatgggccatgacgttcaggtcgacgagaactggatgatctggggccaggcagcgggcatcctcgtcggcggcgagaacgtcgccgagatcgaggctggcggcggcgcccgctacaacggcgccgtcgacagccgcatcggcgcaggtgctgcgcgcggatattga

SEQ ID NO: 58177 - protein, 581 aa, Sinorhizobium meliloti 1021
MRSPCLKSLSITLIVALSTFAPRQGLAASPEPVKAEHGMVVTAQHLASDIGVEVLKKGGNAIDAAVAVGYALAVVYPTAGNIGGGGFMTIRFKDGKTTFLDFRERAPLAATKTMYLDDKGDLVKGLSTEGYLAVGVPGPVMGFEFARSRYGTKPLKELIDPAIELAREGFVLQQGDIESFDGETERLARDPAAAAIFLKPDGKPFAAGDRLVQTDLAASLSSIAEKGTDAFYKGAIADAIVKASADKGGILAKEDFERYQVRELEPVKCNYRGYDIVSSPPPSSGGLIICEILNILEGYPLSYLGYGSAETVHAMIEAMRHAYVDRNTALGDPAFVENPVAKLVDKSYAKEIRAKIDPFKAGVSQELMPAGFTESKETTHYSIIDDEGNAVAVTYTLNGSFGAGVVAPGTGILLNNEMDDFTAKPGTPNLYGLVQGEANAIEPGKTPLSSMSPTIISRDGKPFMVIGSPGGARIITITLEAIINVIDHGMNIQEAVDAPRVHHQWLPDKVFMEPYALSPDTRKLLSAMGHDVQVDENWMIWGQAAGILVGGENVAEIEAGGGARYNGAVDSRIGAGAARGY

SEQ ID NO: 58178 - DNA, 1743 bp, Salmonella typhimurium LT2
  CDS (1)..(1743): transl_table=11
atgaaaccaacgtttatgcgctgggtggcgatcgccgctctgctggccggggggacgtttagcgcggtggccaatcctcccgtcgcgccgccagtctcctatggtgttgaagaagatgtctttcatcctgtgcgggcgacgcaagggatggtggcctcggtggatgcaatggcgacgcaggttggcgtggatatcttaaagcagggcggtaatgccgtggatgccgccgtcgccgtgggctatgcgctggctgtcacgcatccgcaagccggaaatctgggcggcgggggatttatgctgctgcgcactaaagatggcgctaccacggcgatcgattttcgtgaaatggcgcctgctggcgcgacccgtgatatgttcctcgacgatcagggtaacgccgatgcgaaaaagtcgctgacgtcgcatctggcatccggtacgccgggtaccgtggcggggttctcgctggcgctggagaaatacggcacgatgccgctgaataaagtggtgcgtccggcgatgaagctggcggaagagggttttgtggttaacgatgcgctggccaacgacttaaaaacttacggcagcgaagtgatcctcaaccatgagaacagcaaagccattttctggaaagacggcgagccgctgaaaaaaggcgataagctggtccagaagaatctggcgaaaagcctggaaatgattgccgaaaacggcccggatgcgttttataaaggggcgattgctgaccaaatagccggagaaatgcagaagaacggcggtctgatgaccaaagaggatttagccaactataaagccgttgagcgtacgccaatcagcggtgactatcgcgggtatcaggtcttctccatgccgccgccatcctcgggcggtattcacatcgtacagatccttaatattcttgaaaatttcgacatgaagaagtacggctttggcagcgccgatgccatgcaaatcatggcggaagcggaaaaatacgcctacgctgaccgctcagagtatctgggcgatccggactttgtgaaagtgccgtggcaggcgctgacccacaaagcctatgcgaaaacgctggccgatcaaattgatatcaacaaggccaaaccttccagccagataaaaccgggcaagctcgccccgtatgaaagcaaccagaccacccacttctcggtggtggataaagacggcaatgctgtggcggtgacctataccctgaacaccaccttcggcacaggaattgtggcgggaaataccggtattctgctgaataatcaaatggatgatttttctgctaaacccggtgtacctaatgtttatggcctggtgggcggcgatgctaacgcggtcggtccgaagaagcgtccgctgtcgtcgatgtcgcccactatcgtcgttaaagagggcaaaacctggctggtgaccggcagccctggcgggagtcgaatcatcactactgtgctgcaaatggtagtgaatagcattgattttggcatgaacgtcgccgaagcgaccaacgcgccgcgtttccatcatcaatggttgccggacgaactgcgggtagaaaagggcttcagccccgatacgctaaagttgctggaacagaaagggcagaaagtggcgctgaaagaagcgatgggcagcacccaaagtattatggttggaccggatggtgaactgtatggcgcttccgacccgcgttcggtggatgatttaacggcgggatactga

SEQ ID NO: 58179 - protein, 580 aa, Salmonella typhimurium LT2
MKPTFMRWVAIAALLAGGTFSAVANPPVAPPVSYGVEEDVFHPVRATQGMVASVDAMATQVGVDILKQGGNAVDAAVAVGYALAVTHPQAGNLGGGGFMLLRTKDGATTAIDFREMAPAGATRDMFLDDQGNADAKKSLTSHLASGTPGTVAGFSLALEKYGTMPLNKVVRPAMKLAEEGFVVNDALANDLKTYGSEVILNHENSKAIFWKDGEPLKKGDKLVQKNLAKSLEMIAENGPDAFYKGAIADQIAGEMQKNGGLMTKEDLANYKAVERTPISGDYRGYQVFSMPPPSSGGIHIVQILNILENFDMKKYGFGSADAMQIMAEAEKYAYADRSEYLGDPDFVKVPWQALTHKAYAKTLADQIDINKAKPSSQIKPGKLAPYESNQTTHFSVVDKDGNAVAVTYTLNTTFGTGIVAGNTGILLNNQMDDFSAKPGVPNVYGLVGGDANAVGPKKRPLSSMSPTIVVKEGKTWLVTGSPGGSRIITTVLQMVVNSIDFGMNVAEATNAPRFHHQWLPDELRVEKGFSPDTLKLLEQKGQKVALKEAMGSTQSIMVGPDGELYGASDPRSVDDLTAGY

SEQ ID NO: 58180 - DNA, 1830 bp, Nostoc sp. PCC 7120
  CDS (1)..(1830): transl_table=11
gtgtttctgtcctctttccctggaaaaagtataaaaatgcctatgtttactaagtcaaagcgggttgtatgtacagttttttcccttggggttctttgttacacccaactagcctcagccactattaccttacctctgcgtagtaaaaaaggtatggtagtatctgcccatcctttggcaagtgagactggtgtggcaatgttacgcaaaggtggtaatgcagtcgatgcagcagtagccacaactttggcaatttccgtagttgagccattttctgccggaattggtggcgggggatttttgctgatgcgttcccagaaaacaggagaaatcaaagcgttagattttcgggaacgcgcacccctcaaagccacgagaaagatgtatttggatgatgcaggtaaggtgcgtccaaatgcaagtgtcaacggttatttggcggtagctacaccaggaacgatcgccgggatgtatgaagtgcatcgtcgttatggtaaattaccctggcatgaggtggtaaaacctgcgatcgcactagcgaaagatggttttgttcttgatcaaaaacccacttggcgatcaatccaagtttatgaaacccgcaaacaagcaattctcagcaaccaagcagcacgggaaatcttcactcgcaacggtgaattttatcagcctggggaaaagttggtgcagcgtgatttggcaggtactttggaagcgatcgcccaaaatccccaaagcttttacactggtaatattgcccgtgcgatcgcggctgatatggcgaaaaatggcggtttaattaccttagcagacctgaaagcctacaaacccatctggcgtaatcctgtctgtggcaatttccgtcaagctaaaatctgctcaatgccaccaccttcatcaggcggtgtgttgctattgcagatgttaaatattattggtgacacagatttaaaatcctggggttggcatcatcccgatgcgttgcatttattcacagaagcaatgaaaattacctacagcgatcgctcacaatatttaggcgaccccgattttgtcaaaattcctctacaagcactgattagtccagcctacggcaaaaagcgtcgtgcagaaattgatttacacagagccacaccctcaacccaagtcaaacccattgccccagaaattttacaacaattggagaaagcagagattccccagagaatatatgcaaatcgctatgaatctcccgaaaccagccatataaatgtcgtcgatgaagaacgtaatgcagtcagcctcacttttaccgttaattatggttttggttctggagtggttgcatcggggactggtattttgctcaacgatgaaatggacgattttgctgctgcgccaggggttcccaatgtatttgggttagtaggcagcgaagccaatgcgatttcaccccgcaaaactcccttatcgagtatgacaccaactatcatcaccgagaacgaacgcctccgtatggtagtaggtgcgcctggtggtagcaccatcattactcaagttttgcaaattattctcaatgttttagaatacaatatgaatgttggtgcagccgtatctgtcccacgcatacatcaccagtggctacccgatgaattacgagtagaaacttggggattagacgcgcttaccctacaagacttacgccgacgcggacataacatcaaagaaactaatccttggggtaatattaatgcgatcgttgtcaccaaagaaggcgacttagaaggcgcagccgacccacgcggcgaaggttctcccagaggagatatgaaactaataactaatgactaa

SEQ ID NO: 58181 - protein, 609 aa, Nostoc sp. PCC 7120
MFLSSFPGKSIKMPMFTKSKRVVCTVFSLGVLCYTQLASATITLPLRSKKGMVVSAHPLASETGVAMLRKGGNAVDAAVATTLAISVVEPFSAGIGGGGFLLMRSQKTGEIKALDFRERAPLKATRKMYLDDAGKVRPNASVNGYLAVATPGTIAGMYEVHRRYGKLPWHEVVKPAIALAKDGFVLDQKPTWRSIQVYETRKQAILSNQAAREIFTRNGEFYQPGEKLVQRDLAGTLEAIAQNPQSFYTGNIARAIAADMAKNGGLITLADLKAYKPIWRNPVCGNFRQAKICSMPPPSSGGVLLLQMLNIIGDTDLKSWGWHHPDALHLFTEAMKITYSDRSQYLGDPDFVKIPLQALISPAYGKKRRAEIDLHRATPSTQVKPIAPEILQQLEKAEIPQRIYANRYESPETSHINVVDEERNAVSLTFTVNYGFGSGVVASGTGILLNDEMDDFAAAPGVPNVFGLVGSEANAISPRKTPLSSMTPTIITENERLRMVVGAPGGSTIITQVLQIILNVLEYNMNVGAAVSVPRIHHQWLPDELRVETWGLDALTLQDLRRRGHNIKETNPWGNINAIVVTKEGDLEGAADPRGEGSPRGDMKLITND

SEQ ID NO: 58182 - DNA, 1758 bp, Agrobacterium tumefaciens str. C58
  CDS (1)..(1758): transl_table=11
atgaaaatgagatttctcagtgaggcttttctcgccttgatgctttccaccgcaatcacctcagcccagcaggcgtctgacacggtggcacccgaaaaagcgactgctgttgcgactgcccgacgtgtcgagtcccggagcttcatggtcgcagcggccaatccgctagcggccgaggcggggcgcgacgtgatcgccgcgggcggtaacgctatagatgcgatggtggcggtgcagaccgtgctcggcctcgttgaaccgcagagttccggtctcggcggaggtgccttcctcgtctactaccacgcaaaaaacggcaagctgacgacgttggacggccgggagacggcgccgatggacgccacgccaaagctcttcctggatgacaaaggtcaaccgcttaaattcatggacgccgtggtcggcggccgttccgttggcacgcccggaacggtgcgacttctggaggaggcccataaacgttatggaaaggcggattgggcaagcctgctgaagccggcggaaacgctggcgaccgagggtttcaaagtgtcgcctcgccttgcctccctcatcgcgtccgagggcgaccggttgaagaaatatccagaggcccggtcctatttctttgacacctccggggccgccctgcagaccggtgccctgttgaagaacccggcctatgccgagacactcgcaacgctcgccaaaagcggcgccgatgccttttacaaggggaggatcgccgaggcggtcgtcaagaccgtgcgcgaggcgaccgacaatcccggcgtgctgtcgctttccgatctttccaactatcgcgtcatcgagcgcgagccggtctgcttcatctatcgtgctcttgacgtttgcggcatggggccgccatcgtcgggcggcatcgccatcggccagatgctcggcatggcggagagttttgatctcaagtccctggggccgaaaaatgtcgaaagctggcgccttatcggcgatgcgcagcgcctcgccttcgccgaccgcgagcgttatgtcgctgacaccgattttgtgccgctaccgatcaagggcctgctggacaagacttatctcggcgagagggcaaaactgctcgacggcgacagggcgctggccaaggatgccgtcaaggccggcgaaccggaatgggaccacgcgctgcttttcggccgggatgccgcactcgaattgccctctaccagccattttgtcattgtcgacaaggagggcaacgtggtctcgatgacgacgacgatcgaaagcggcttcggctcgcgtctgatgacgaacggcttcctgctcaataacgagttgacggacttttccttcaagacacatgacggcggcctgccgatcgccaaccgcgtcgagcctggcaaacggccgcgctcctccatggcgccgactatcgtgatgaaggatggcaagccgctactcgccattggttcgcccggcggcagccagatcatcggctacgtggcgcaggcgctgatcgcctatattgactggggcatgccggttgaggcgattgtcgcccagccgcacctcatcaaccgcttcggcacctacgacatcgaggccggcactagcgcggaagatctggtcgagccgctgaaggcgctcggttacgaggtgaaaccgggtgagttgaattccggtttgcatgccatcgagatcactgcgcaaggtttggcaggtagcgccgatccaaggcgtgagggagccgttatgggggagtga

SEQ ID NO: 58183 - protein, 585 aa, Agrobacterium tumefaciens str. C58
MKMRFLSEAFLALMLSTAITSAQQASDTVAPEKATAVATARRVESRSFMVAAANPLAAEAGRDVIAAGGNAIDAMVAVQTVLGLVEPQSSGLGGGAFLVYYHAKNGKLTTLDGRETAPMDATPKLFLDDKGQPLKFMDAVVGGRSVGTPGTVRLLEEAHKRYGKADWASLLKPAETLATEGFKVSPRLASLIASEGDRLKKYPEARSYFFDTSGAALQTGALLKNPAYAETLATLAKSGADAFYKGRIAEAVVKTVREATDNPGVLSLSDLSNYRVIEREPVCFIYRALDVCGMGPPSSGGIAIGQMLGMAESFDLKSLGPKNVESWRLIGDAQRLAFADRERYVADTDFVPLPIKGLLDKTYLGERAKLLDGDRALAKDAVKAGEPEWDHALLFGRDAALELPSTSHFVIVDKEGNVVSMTTTIESGFGSRLMTNGFLLNNELTDFSFKTHDGGLPIANRVEPGKRPRSSMAPTIVMKDGKPLLAIGSPGGSQIIGYVAQALIAYIDWGMPVEAIVAQPHLINRFGTYDIEAGTSAEDLVEPLKALGYEVKPGELNSGLHAIEITAQGLAGSADPRREGAVMGE

SEQ ID NO: 58184 - DNA, 1977 bp, Encephalitozoon cuniculi GB-M1
  CDS (1)..(1977)
atgaagctggaatatgggccagtagttttctggaggacttggagcaagaggtgcattctctgcctgccgcatctcagcctccatcttttccagaaacccccttaccttctcaaattcctttggcgggttgactggaattctcggcattggactcaggacgaagtagggcacaaaattaagggttatttcggacgcacatgcatgcacttgcgatcaccaatgtaccctctcttgtttcaggttattttgataaatgattgctctggcctccagaaaacaatgcaaggccggctgaagctgtgtgcttcactactaggattcctgttagctccagtacttaagggagatcccagcagaaatccagggcctggagcccttgaggtgtactccaacggagcctgtagtacagaggttccgctatgctcgagaattggtgtgaagaagctggtggagggaggaaatgcaatggatgctgcaattgcatctgcgatctgcgtcggcataataaactccttttcatctggaattggaggtgggggattcatgctgataaagggccccgggacaagcaatgcattcgatatgatagacttcagagaggttgctccgaaaaacctctcggcagacaaactcagcgaggctggagggacgggtgcactaagcattggagttccgggagagatatacgggctatatgaggcacacaaaaagtacggaagacttccatggagagacctattccctgagaacatagaagtttccagaggatttcctgctagcaaccagcttgtaaagagaatcaacaagctcaaggactacataataagcgatccggggctgagagagatatacacaagaaacggcgagctcctcagagaaggcgagacggttgtgcgcgaaaactatgccaggacactggagatcataatggaccatccagagagcttttatatggggcaccttgcagacctggttgtcaaggcggttagagaaaggggaggaattctggataagaaagacctcgaggagtacagggcggtctacagagacgtgttagaaggaaggtatcgggattacaaggtctacaccacaggccttccgacaagcggattgctagtgctgaaggccttgaatatatttgaaaagtatgatctgaggaaactgaaggcagatagcctgaaaagcggaggcttcaaccacattcacctgctcattgaggtcttcaagttcgccatggccgggaggggagagctggcagacccggcatttcttcctgggtgggaagagatagtttatgagacagtttcaaaggacgccgcagaggaagcctaccacaaaataaacctgggaagggttttggatacaaaagagtatggaatgaaaagaaaaggggtggaggaccatggaacaacacacattaatgccatagataaagacgacatggttgtgcttcttacaagcacagtgaatcttgaatttggagcaaaattcatggatcccaggacaggaataatattcaacaacacgatgagcgacttctacattccatatccaaacagtgcgcaggaaaagcatgcaaatgccgtagagggaggcaaaagaccgttttcgtcgatagctccagttgtgctcctcaaggaagatgagctccttgccttgggcgcggccggcgggataagaatccctacgtccattatgtccacaatattccacttgtcggctggggagaacctctgggaggcgataacagagacaagaatccacaaccaattgtttccagacataacatttgtggagtacaacataccgaaagatcttgaaaagtacctcaccagcacggggcacagggtagagagatcactccaaaacactgttttcacctccgtccaggggattctctccaggaaggttggcggaaataaggttattcatgctgtgtcggatcctaggaagggaggcgaagcttttggatattaa

SEQ ID NO: 58185 - protein, 658 aa, Encephalitozoon cuniculi GB-M1
MKLEYGPVVFWRTWSKRCILCLPHLSLHLFQKPPYLLKFLWRVDWNSRHWTQDEVGHKIKGYFGRTCMHLRSPMYPLLFQVILINDCSGLQKTMQGRLKLCASLLGFLLAPVLKGDPSRNPGPGALEVYSNGACSTEVPLCSRIGVKKLVEGGNAMDAAIASAICVGIINSFSSGIGGGGFMLIKGPGTSNAFDMIDFREVAPKNLSADKLSEAGGTGALSIGVPGEIYGLYEAHKKYGRLPWRDLFPENIEVSRGFPASNQLVKRINKLKDYIISDPGLREIYTRNGELLREGETVVRENYARTLEIIMDHPESFYMGHLADLVVKAVRERGGILDKKDLEEYRAVYRDVLEGRYRDYKVYTTGLPTSGLLVLKALNIFEKYDLRKLKADSLKSGGFNHIHLLIEVFKFAMAGRGELADPAFLPGWEEIVYETVSKDAAEEAYHKINLGRVLDTKEYGMKRKGVEDHGTTHINAIDKDDMVVLLTSTVNLEFGAKFMDPRTGIIFNNTMSDFYIPYPNSAQEKHANAVEGGKRPFSSIAPVVLLKEDELLALGAAGGIRIPTSIMSTIFHLSAGENLWEAITETRIHNQLFPDITFVEYNIPKDLEKYLTSTGHRVERSLQNTVFTSVQGILSRKVGGNKVIHAVSDPRKGGEAFGY

SEQ ID NO: 58186 - DNA, 1740 bp, Fusobacterium nucleatum subsp. nucleatum ATCC 25586
  CDS (1)..(1740): transl_table=11
atgaaaagaaaatttattttagtaggtattatagtaatagctttttctgtaatatcttatggaaaagtttcaagtaattctgttaaaaattctaatgtagaaaattggaagccttatgatgccaatggtgaaatgatcaggactgatagaggagcaacaggaaaaataggtgttgtttctaccagtaaagttgaagccagtagaataggtgcagatatcttaaaaaaaggtggaaatgctattgatgcagctgttgcagctggttttgctttaggagttgttgaaccaaattcttcaggtctaggtggtggaggttttatgctaattagaatcgctaaaacaggagaaactgtttttatagattttagagaaagagcacctcaaaaggcttctcctgaaatgtggactgttgatgctaatggcaaagttgttggaaataaaaaagtagaaggtggaaaagctgctgctattccaggggaagtagctggtcttttatatgcacttgaaaaatatgggacaatgtctagagaacaagttataagacctgctgttaatcttgctaaaaatggatattatgttactccaactttatcaaatgatatgaaatctgaatttgataaactagaaaaatatccagaatctgctaaaatttatttgaataaggaaggtctaccttatgaagtaggagataaatttactaataaagatttagctaaaactttggaaatcattataaagaagggaaaagatggtttttataaaggggaagtagctcaagctattgtaaaaactcttaataaatatgatggtctttacacaatggaagatttagccaattataaaccattaataagaaaaccagtaaaaggaacttatagaggatatgaaataatttcttctccttctccaagttctggtggagcaatagttatagaaatattaaatatattagaaaattttaatgttagtgaattagatgtaaactctccagaatatttacacttattctctgaggcatataaacttgcttatgctgatagagcaaagtatatgggagatactgattatactcctgttccaatgaaaggttttgtatctaaaaaatatgcaaaagaaatttcaaaagatattgatatgaaagtttctcatgaaagtaaagcacatgatccttggcaatatgaatcagaagacacaactcactattcaatagcggataaagaaggaaacatggttgccattacaaaaacagtaaatggattatttggaaatagtgttgttgttgatggttatggttttgttatgaataatgaaatggatgactttgttgttggagcaggacatccaaattcagttgctcctggcaaaactccattaagttcaatgtcaccaactattgtgttaaaagatggaaaaccatttatggttttaggttctcctggagcaacaaaaataataagtactgtttcacaagttataagtagagttattgatcataaaatgagtatacaagatgccatagatactccaagattatgggataatacttcaaatgtaataaatattgaaagtagaatatctgatgaaacggctaaaaaacttgaagcaatgggacataaagtaaacaaaacatctgactgggatagaggaatggggtctgtgcaaggagttctttataaaaatgatggaactcttgaagggggagctgatcctagaagagatggaaaagcattaggattataa

SEQ ID NO: 58187 - protein, 579 aa, Fusobacterium nucleatum subsp. nucleatum ATCC 25586
MKRKFILVGIIVIAFSVISYGKVSSNSVKNSNVENWKPYDANGEMIRTDRGATGKIGVVSTSKVEASRIGADILKKGGNAIDAAVAAGFALGVVEPNSSGLGGGGFMLIRIAKTGETVFIDFRERAPQKASPEMWTVDANGKVVGNKKVEGGKAAAIPGEVAGLLYALEKYGTMSREQVIRPAVNLAKNGYYVTPTLSNDMKSEFDKLEKYPESAKIYLNKEGLPYEVGDKFTNKDLAKTLEIIIKKGKDGFYKGEVAQAIVKTLNKYDGLYTMEDLANYKPLIRKPVKGTYRGYEIISSPSPSSGGAIVIEILNILENFNVSELDVNSPEYLHLFSEAYKLAYADRAKYMGDTDYTPVPMKGFVSKKYAKEISKDIDMKVSHESKAHDPWQYESEDTTHYSIADKEGNMVAITKTVNGLFGNSVVVDGYGFVMNNEMDDFVVGAGHPNSVAPGKTPLSSMSPTIVLKDGKPFMVLGSPGATKIISTVSQVISRVIDHKMSIQDAIDTPRLWDNTSNVINIESRISDETAKKLEAMGHKVNKTSDWDRGMGSVQGVLYKNDGTLEGGADPRRDGKALGL

SEQ ID NO: 58188 - DNA, 1734 bp, Escherichia coli CFT073
  CDS (1)..(1734): transl_table=11
atgataaaaccgacgtttttacgccgggtggccattgctgctctgctcacaggaagttgttttagtacggtagccgcgccacctgtttcttatggtgtggaggaagatgtcttccatccggtacgcgctaagcagggaatggtggcgtctgtagatgctactgccactcaggtgggggtggatatcctcaaggagggcgggaatgccgttgatgctgccgtggcggtgggctacgcgctggcagtaacgcatccgcaggcagggaatctgggcggcggtggttttatgctgatccgctcgaaaaatggcaataccacggctatcgatttccgcgaaatggcacccgccaaagcgacccgcgatatgttcctcgatgatcagggcaacccggacagcaaaaaatcactcacttcgcatctggcttccggcacacccggtacggtagcgggtttctcgttggcgctggataaatacggcaccatgccgttgaataaagtggtgcaaccggcgtttaaactggcacgcgatggttttatcgttaacgacgcgctggctgacgatctcaaaacctacggcagtgaagtgctgccgaaccacgaaaatagcaaagctatcttctggaaagagggcgaaccgctgaaaaagggcgacaagctggtgcaggcgaacctggcaaagagcctggagatgattgccgaaaacggcccggatgaattctacaaaggcacgatagcggaacagattgcccaggagatgcagaaaaacggtggcttgatcagcaaagaagatttagcggcatataaagcggtcgaacgcacaccgataagcggcgattatcgcgggtatcaggtttactccatgccaccgccatcttccggcggtattcatatcgtacaaatcctcaatattctggaaaacttcgatatgcagaagtacggctttggcagtgccgacgcgatgcaaatcatggcagaagctgagaaatacgcctatgccgaccgctcggaatatcttggcgacccggattttgtcaaagtaccgtggcaggcgctgaccaataaagcctatgccaaatctattgccgatcaaatcgatatcaataaagcgaagccatccagcgaaattcgtcctggcaagcttgcgccttatgagagtaatcaaactacccattactcagtagtggataaagacggtaacgccgtggcggtgacctatacgctgaacaccaccttcggtacgggcattgtcgcgggcgagagcggtattttgctcaataaccagatggatgatttctccgcaaaaccaggcgtaccgaacgtttacgggctggtgggcggcgatgccaacgccgtcgggccgaataaacgcccgctgtcgtcgatgtcaccaaccattgtggtcaaggatggtaaaacctggctggtcaccggaagcccaggcggtagccggattatcaccactgtgctgcaaatggtggtgaatagcatcgattatggaatgaacgtcgccgaagcgaccaatgcgccgcatttccaccatcagtggttgccggacgagctgcgtgtcgaaaaagggtttagcccggatacgatcaagctgctggaagcaaaaggtcagaaagtggcgctgaaagaggcgatgggcagtacacaaagcattatgattgggccggacggtgagctgtacggtgcatccgacccgcgctcggtggatgatttaacggcggggtattaa

SEQ ID NO: 58189 - protein, 577 aa, Escherichia coli CFT073
MIKPTFLRRVAIAALLTGSCFSTVAAPPVSYGVEEDVFHPVRAKQGMVASVDATATQVGVDILKEGGNAVDAAVAVGYALAVTHPQAGNLGGGGFMLIRSKNGNTTAIDFREMAPAKATRDMFLDDQGNPDSKKSLTSHLASGTPGTVAGFSLALDKYGTMPLNKVVQPAFKLARDGFIVNDALADDLKTYGSEVLPNHENSKAIFWKEGEPLKKGDKLVQANLAKSLEMIAENGPDEFYKGTIAEQIAQEMQKNGGLISKEDLAAYKAVERTPISGDYRGYQVYSMPPPSSGGIHIVQILNILENFDMQKYGFGSADAMQIMAEAEKYAYADRSEYLGDPDFVKVPWQALTNKAYAKSIADQIDINKAKPSSEIRPGKLAPYESNQTTHYSVVDKDGNAVAVTYTLNTTFGTGIVAGESGILLNNQMDDFSAKPGVPNVYGLVGGDANAVGPNKRPLSSMSPTIVVKDGKTWLVTGSPGGSRIITTVLQMVVNSIDYGMNVAEATNAPHFHHQWLPDELRVEKGFSPDTIKLLEAKGQKVALKEAMGSTQSIMIGPDGELYGASDPRSVDDLTAGY

SEQ ID NO: 58190 - DNA, 1752 bp, Bradyrhizobium japonicum USDA 110
  CDS (1)..(1752): transl_table=11
atgatgtcgtcattttcgacccggcggacgtttttcgccttcctggccactctggcgcttggtctggcatctgcgaccgcgcaggatgcgcggcggggctatgtcccgccggcgctcgacacggtgcatgccgttgcagccgagcacggcatggtggtggcgcaggaaaagatatcggtgcaggtcggcgccgatatcctgcgacgcggcggcaatgccgtcgatgccgcggtcgcgaccggctttgcgatggcggtgacctatccgcgcgccggcaatatcggcggcggcggcttcatgatgatccattccgccgagcgcaacgaggacatcgcgatcgactatcgcgagaccgcgccggcagcgaccacgccgcaaatcttcctcggccccgacggcaagcccgacattgcgaagtcgcgcgattccgcgctcggcatcggcgtgcccggaaccgtcgcaggccttgccctggcattggaaaaatatggctcgggccagttcacgctcgcgcaattgctcgagcctgcgatcgcgctcgcccgcgacggcttcgtcgtcagcgacgacatcgccgacacgctcccgggctggcaccggcggctgacacgctggccttccgcggccaggatcttctcgcgccccgatggcgcgccgctcagtgacggcgacaggctggtgcagggcgaccttgccgatacgctggcggccgtcgccgcgcagggaccacgcggcttctatgagggcgcggtcgcggacaaactcgccaaggccgtgtccgaggcgggcggcatcatgacgccagccgatctgaagacctatcaggcggtgatccgcacgccggtgcgcggcacttatcgcggctacgacatcgtgtcgatgccgctgccttcctccggcggcgtggtgctggtggagaccctcaatatcctcgaaggctttcagcttgccgacctcaagcagggatcgccggcatcgctgcatctcctgatcgaggccatgaagcgtgcctatgcagaccgcgcgcgctatctcggcgatcccgccttcgtcaatgcgccgatcgagaccctcacggcaaaggactacgccgccaagctgcgcgcgggcatctccaccagccgcgccacgccgtcgaagcagctggtctccgccgccgcctcgccgcgcgagggcagcaacaccacgcatttctccgtcgtcgacagccgcggcaacgccgtcagcaatacatacacgctgaacttcagctatggcgttggcctcgtcgccgagggtaccggcgtgctgctcaacaacgagctcgacgatttcaccgcggcggtcggcgcgtccaacgcctacggccttgtcggcttcgaggccaacctgccagggcccggcaagcgaccgttgtcgtcgatgtcgccgaccatcgtgctgaaggacggcaagccggtgctggtgacgggttcgcccggcggcagccggatcatctccaccgtgctccaggtgatcgtgaacgtgctcgattacaaaatggatgtggccgccgccgttgccacaccgcggctgcaccatcaatggctgccggacgaggtgcgcgtcgagcgcggctttcccgacgatgtcctgttcgagctgaaggcgatggaccatcccatcgtcgagccgatgggacagacttccgccaattcgatcgcggtgacaccgaatggccccctcggcgcacccgatccgcgcacacgcggcgcagaggcggcagggcagtaa

SEQ ID NO: 58191 - protein, 583 aa, Bradyrhizobium japonicum USDA 110
MMSSFSTRRTFFAFLATLALGLASATAQDARRGYVPPALDTVHAVAAEHGMVVAQEKISVQVGADILRRGGNAVDAAVATGFAMAVTYPRAGNIGGGGFMMIHSAERNEDIAIDYRETAPAATTPQIFLGPDGKPDIAKSRDSALGIGVPGTVAGLALALEKYGSGQFTLAQLLEPAIALARDGFVVSDDIADTLPGWHRRLTRWPSAARIFSRPDGAPLSDGDRLVQGDLADTLAAVAAQGPRGFYEGAVADKLAKAVSEAGGIMTPADLKTYQAVIRTPVRGTYRGYDIVSMPLPSSGGVVLVETLNILEGFQLADLKQGSPASLHLLIEAMKRAYADRARYLGDPAFVNAPIETLTAKDYAAKLRAGISTSRATPSKQLVSAAASPREGSNTTHFSVVDSRGNAVSNTYTLNFSYGVGLVAEGTGVLLNNELDDFTAAVGASNAYGLVGFEANLPGPGKRPLSSMSPTIVLKDGKPVLVTGSPGGSRIISTVLQVIVNVLDYKMDVAAAVATPRLHHQWLPDEVRVERGFPDDVLFELKAMDHPIVEPMGQTSANSIAVTPNGPLGAPDPRTRGAEAAGQ

SEQ ID NO: 58192 - DNA, 1743 bp, Salmonella enterica subsp. enterica serovar Typhi Ty2
  CDS (1)..(1743): transl_table=11
atgaaaccaacgtttatgcgctgggtggcgatcgccgctctgctggccggggggacgtttagcgcggtggccaatcctcccgtcgcgccgccagtctcctatggtgttgaagaagatgtctttcatcctgtacgggcgacgcaagggatggtggcgtccgtggatgcaatggcgacgcaggttggcgtggatatcttaaagcagggcggtaatgccgtggatgccgccgtcgccgtgggctatgcgctggctgtcacgcatccgcaagccgggaatctgggcggcgggggatttatgctgctgcgcactaaagatggcgctaccacggcgatcgattttcgtgaaatggcgccggctgccgcgacccgtgatatgttcctcgacgatcagggtaacgccgatgcgaaaaagtcgctgacgtcgcatctggcatccggtacgccgggtaccgtggcgggtttctcgctggcgctggagaaatacggcacgatgccgctgaataaagtggtgcgtccggcgatgaagctggcggaagagggttttgtggttaacgatgcgctggccgacgacttaaaaacttacggcagcgaagtgatccccaaccatgagaacagcaaagccattttctggaaagacggcgagccgctgaaaaaaggcgataagctgatccagaagaatctggcgaaaagcctggaaatgattgccgaaaacggcccggctgcgttttataaaggggcgattgccgaccagattgccggggaaatgcagaagaacggcggtctgatgaccaaagaggatttagccagctataaagccgttgagcgtacgccaatcagcggtgactatcgcgggtatcaggttttctccatgccgccgccgtcctcgggcggtattcacatcgtgcaaatcctcaatattcttgaaaatttcgacatgaagaagtacggctttggcagcgccgatgccatgcaaatcatggcggaagcggaaaaatacgcctacgctgaccgctcagagtatctgggcgatccggactttgtgaaagtgccgtggcaggcgctgaccaacaaagcctatgcgaaaacgttggccgatcaaatagatattaataaggcaaaaccttccagccagatcaaaccgggcaagctcgccccgtatgaaagcaaccagaccacccacttctcggtggtggataaagacggcaatgctgtggcggtgacctataccctgaacaccaccttcggcacaggaattgtggcgggaaataccggtattctgctgaataatcaaatggatgatttttctgctaagcctggtgtacccaatgtttatggcctagtgggcggcgatgctaacgcggtcgaaccaaaaaaacgtccgctgtcgtcgatgtcgccgactatcgtggtaaaagacggcaaaacctggctggtgaccggtagccctggcgggagtcgaatcatcactactgtgctgcaaatggtagtgaacagcattgattttggcatgaacgtcgccgaagcgaccaacgcgccgcgtttccatcatcaatggttgccggacgaactgcgggtagaaaagggcttcagccccgatacgctgaagttgctggaacagaaagggcagaaagtcgcgctgaaagaagcgatgggcagcacccaaagtattatggttggaccggatggcgaactgtacggtgcgtctgacccgcgttccgtggatgatttaacggcgggatactga

SEQ ID NO: 58193 - protein, 580 aa, Salmonella enterica subsp. enterica serovar Typhi Ty2
MKPTFMRWVAIAALLAGGTFSAVANPPVAPPVSYGVEEDVFHPVRATQGMVASVDAMATQVGVDILKQGGNAVDAAVAVGYALAVTHPQAGNLGGGGFMLLRTKDGATTAIDFREMAPAAATRDMFLDDQGNADAKKSLTSHLASGTPGTVAGFSLALEKYGTMPLNKVVRPAMKLAEEGFVVNDALADDLKTYGSEVIPNHENSKAIFWKDGEPLKKGDKLIQKNLAKSLEMIAENGPAAFYKGAIADQIAGEMQKNGGLMTKEDLASYKAVERTPISGDYRGYQVFSMPPPSSGGIHIVQILNILENFDMKKYGFGSADAMQIMAEAEKYAYADRSEYLGDPDFVKVPWQALTNKAYAKTLADQIDINKAKPSSQIKPGKLAPYESNQTTHFSVVDKDGNAVAVTYTLNTTFGTGIVAGNTGILLNNQMDDFSAKPGVPNVYGLVGGDANAVEPKKRPLSSMSPTIVVKDGKTWLVTGSPGGSRIITTVLQMVVNSIDFGMNVAEATNAPRFHHQWLPDELRVEKGFSPDTLKLLEQKGQKVALKEAMGSTQSIMVGPDGELYGASDPRSVDDLTAGY

SEQ ID NO: 58194 - DNA, 1755 bp, Bordetella bronchiseptica RB50
  CDS (1)..(1755): transl_table=11
atgccattgcggacgctgttggcggcgctgtgcgccgccgccatttgccaggcgccggcctgggcgcgcgaggcgccgggcgtggcgcgcgaggacgtcaatccggagatcgccagcgcgcgcagcgagcgcgcgcaagcgcacgcccagcgctacatgatcgccaccgccaacccgctggccagcgaggccggctaccgtatcctgcgggccggcggcagcgccaccgacgccatcatcgccgcgcaactggtgctgaacctggtcgagccgcaatcctcgggcataggcggcggcgccttcatggtgcactacgaccgcggcgccggcgagctgcgcgtctacgacagccgcgagaccgcgcccgcggctgcgcggcccgaccgcttcctgcgcgagggcaagccgctgtcgtatgccgaatcggtcaacaacggccgcgcggtcggcacgccgggcctgttgcgcggcctggagctggcgcatcgccagcacggcaagctgccatggcaggccctgttcgagccggccatcgcgatggccgagcaggggttcgccgtgtcgccgcgcctgcacgagtccatcgccggcgacaaggcgctggcggcgcagcccgcggcggcgcgctacttctacggccccgacgggcaggcctggccggtcggccaccggctgcggaatcccgagttcgcggccacgctgcgcagcatcgcgcgcgagggggccgatgccttctaccgcgggccgatcgcgcgcgacatcgtggcggcggtgcgtgcccatcccacgccgggcgacctggccgaggccgacttggccggctaccgggccgtggtgcgcgagcctgtgtgtggcctgtaccggggctaccgcctgtgcggcgcgccgccgccgagcagcggcccgctggcggtgctgcagatgctgggcgaactggaacagtacccgctggcgcgcatgcgtcccggcagtgtcgaggccgtgcattatttttccgaggccgggcggctggccttcgccgaccgcgacttctacgtggccgatccggcctttgtcgatgttccggtgcgggcgctgctcgatcccgcctacctgcgccagcgcggcgcgctgatccgccccgaccgcagcatgaagacggccctgccgggcgatccgcaggggctgctggccgaacgcgcgcgcgacgacgccatcgaggtgccctcgaccagccacctggtggcggtggatgccgcgggcaacgtggtttccatgacgtccaccatcgaggccgcgttcggcagcaagatcttcgtgcgcggtttcctgctcaacaacgagatgacggacttctcgtcctcctaccgcgatccggaagggcggctggtcgccaaccgggtcgagccgggcaagcggccgcgcagctcgatggcgcccatgatcgtgtttcgcgccggcaagcccgtgctggcgctgggttcgcccggcggcagcgccatcatcaactacgtggccaagacgctggtcggcgtgctcgattggaagctggacgtgcagcaggcgatcgcgctgcccaacctgggcagccgcaacaaggaaaccgagctcgagcgcggcacggcgctggaagcgctggccccggcgctgcggcgcatgggccatgaggtgcgcatcaccgattttcccagcggaatccagggcatcgtgatcgggccgcacggcctggccggcggcgccgatccgcgccgcgaaggcctggcgctgggcgactga

SEQ ID NO: 58195 - protein, 584 aa, Bordetella bronchiseptica RB50
MPLRTLLAALCAAAICQAPAWAREAPGVAREDVNPEIASARSERAQAHAQRYMIATANPLASEAGYRILRAGGSATDAIIAAQLVLNLVEPQSSGIGGGAFMVHYDRGAGELRVYDSRETAPAAARPDRFLREGKPLSYAESVNNGRAVGTPGLLRGLELAHRQHGKLPWQALFEPAIAMAEQGFAVSPRLHESIAGDKALAAQPAAARYFYGPDGQAWPVGHRLRNPEFAATLRSIAREGADAFYRGPIARDIVAAVRAHPTPGDLAEADLAGYRAVVREPVCGLYRGYRLCGAPPPSSGPLAVLQMLGELEQYPLARMRPGSVEAVHYFSEAGRLAFADRDFYVADPAFVDVPVRALLDPAYLRQRGALIRPDRSMKTALPGDPQGLLAERARDDAIEVPSTSHLVAVDAAGNVVSMTSTIEAAFGSKIFVRGFLLNNEMTDFSSSYRDPEGRLVANRVEPGKRPRSSMAPMIVFRAGKPVLALGSPGGSAIINYVAKTLVGVLDWKLDVQQAIALPNLGSRNKETELERGTALEALAPALRRMGHEVRITDFPSGIQGIVIGPHGLAGGADPRREGLALGD

SEQ ID NO: 58196 - DNA, 1665 bp, Chromobacterium violaceum ATCC 12472
  CDS (1)..(1665): transl_table=11
atgaattgggtttccatgtcccgcaaggccttggccggcggcggcctgttgctgatcgcgctgccggcgctggcggggcagggcgcggtggctgcgccggaccagtacggcgccgaagtcgccgcccgtatcctgaagtcgggcggcaacgcggtggacgccgcggtggccaccgccttcgccctggccgtcacgtatcccgaggccggcaatatcggcggcggcggcttcatgaccatctaccagggcggcaaaccgtattttctcgactaccgcgaagtggcgcccaaggcggccagccgcgacatgtacctggacaaggacggcaaggtggtgccggacatgagcctggtcggcgcgcgcgccgccggcgtgccgggcacggtgatgggcttgtggcaggcgcaccagcgcttcggcaagctgcaatggaagcagctgctggatccggcgataggctacgccgagcagggcttcaccgtggccgcccgccaataccagtaccgcgacgaggcggtgaagctgttcgacggcaagaccaatttcgcccagtacttcggcaagatgaagggcggcgaaaccttccgccagcccgaactggccgccacgctgaaacgcatcgcccgctacggcgcggccgagttctaccagggcgagaccgccaagcttctggtggcgcagatgaagcgcgacaagggcctgatcaccgccgacgacctcaacgactaccgcgccaagtggcgggagccggtccggatcagctggcatgaccgtacggtctacaccgcgccgccgcccagctccggcggcgtcgcgctggcccagctgctgaccatcaagcaggagcgggcgtcggacttcaccggcgtggcgctgaattccgcccgctacatccatttgctcgcggaaatcgagaagcgggtgttcgccgaccgcgccgactatctgggcgatcccgacttcgtcaagacgccggtggcgcagctgatcgatccggactacctggcgcggcgcgcggccgagatcaacccgacggccatctcgccgacgccggacatcaagcccggcctggatccgcgccagaccacccacttctccatcgtcgaccagtggggcaacgcggtggccaatacttacaccctgaatttcgacttcggcagcggcgtggtggtcaagggcgccggcttcctgctcaacgacgagatggacgatttcagcgccaaacccggcgtggccaacgccttcggcgtggtgggcaaggacgccaacgccatcgccccgggcaagcgcatgctgtcgtcgatgtcgcccaccatcgtcacccgcgacggcaaggtggagctggtgatcggcacgcccggcggctcgcgcatcttcacctccatcttccaggtgctgaacaatctgtacgactacaagctgccgctgaaggaggcggtggcggcgcagcgcgtgcatcaccagctgctgcccaaggacaccattttctacgaccagtacgcgccgctggccggccaggccgcccaggaattgaaagcgatgggctacacgctgaaggaccagggctggcgcatgggcgacatccaggcggtgagggtggtcggcggcaagactgaaaccgcgtccgatccgcgcggccgcggcgtcggcatcgtcgtcgaatga

SEQ ID NO: 58197 - protein, 554 aa, Chromobacterium violaceum ATCC 12472
MNWVSMSRKALAGGGLLLIALPALAGQGAVAAPDQYGAEVAARILKSGGNAVDAAVATAFALAVTYPEAGNIGGGGFMTIYQGGKPYFLDYREVAPKAASRDMYLDKDGKVVPDMSLVGARAAGVPGTVMGLWQAHQRFGKLQWKQLLDPAIGYAEQGFTVAARQYQYRDEAVKLFDGKTNFAQYFGKMKGGETFRQPELAATLKRIARYGAAEFYQGETAKLLVAQMKRDKGLITADDLNDYRAKWREPVRISWHDRTVYTAPPPSSGGVALAQLLTIKQERASDFTGVALNSARYIHLLAEIEKRVFADRADYLGDPDFVKTPVAQLIDPDYLARRAAEINPTAISPTPDIKPGLDPRQTTHFSIVDQWGNAVANTYTLNFDFGSGVVVKGAGFLLNDEMDDFSAKPGVANAFGVVGKDANAIAPGKRMLSSMSPTIVTRDGKVELVIGTPGGSRIFTSIFQVLNNLYDYKLPLKEAVAAQRVHHQLLPKDTIFYDQYAPLAGQAAQELKAMGYTLKDQGWRMGDIQAVRVVGGKTETASDPRGRGVGIVVE

SEQ ID NO: 58198 - DNA, 1530 bp, Gloeobacter violaceus PCC 7421
  CDS (1)..(1530): transl_table=11
ttggggaccaggacgacgctgagcacgacctgcggagtgatcgccgccggacacgccgagacggcggcggccggagtcaaaattttgcgcctgggcggcaacgccttcgatgcggcggtggcgggaatgttggcgtcgtttgtagccgaggcgacgctcacctccgccgggggcagcggcttcctgctggcccacacggccaccggcgaggacattctgtttgattttttctcccagacgcctttgcgccgccgggcggcccgcgaggtgaacttctatccggtctcggtcaattttggcgacgcggcgcaggaatttcacatcggcccgggttcgatggccgtccccggcaacgtagcgggcctgttccacgtccaccgccgcctcggccgcttgccgatggcggttgtcgccgcccccgccgtcgccctggccaagaacggcctgctggtcagcgattttcagagcttttgccagtcggtgctggagccgattttgctggccacgcctgaggcacgacaaatttttgccccggtgggccgcctgctcgcaccgggggagcgcctgtcgatgcccgaattcgccgacaccctcgaatggctggtggcggaagggccggcagtgttctacgagggcgaaatcgcccggcgtctggtggccgactcggagcggttgggcggccacctcaccgcccgagatctgcgcgaataccgggtcatcgagcgggtacccctgggttgcggctaccggggctaccgggtgctcaccaaccccgaaccgagcgccgggggcaccctcatcgcctttgcgctgcggctactcgaacaggcggattgcatccggcagtcctacgcctcacccgagcacctcggcctgcttgcaaatgtgatgcgtctgaccgacgaggcacgccgccacgactttgcctccggcagcgaagctcttctatccgctggcacactggcgcgctacgtccgtcgcctcaccaagccctggggcagcaccacccacctgagcgtcctggacgaggagggcaacgccgcgagcgtcacttccaccaacggcgagggttccgcctacgtcattcccggcaccggcatcatggtgaacaacatgctgggcgaggacgacctgcacccggagggcttcgagagttgggccgaaaaccgccgcatcgcctcgatgatggcgccctcgctggtgctcgaagacgggaggccctgggtggtactcggttccggtggctccaagcgcatccgtaccgcgctgttgcaggtgatttcaaacctggtggactttcagatgcccctttcggaggccgttgcaagcccccgcctacattgggagaaccacgttctgcacctggagccgggtctgcttgccccgacccacagcctccacgacgcggtgatccgctggcgcgagcaaaacttttttttcggcggcgtccacgccgtcgcctgcgacgcgctcggaaacctgaccggcagcggcgacggcaggcgcaacggtgcggcgaggtttagttag

SEQ ID NO: 58199 - protein, 509 aa, Gloeobacter violaceus PCC 7421
MGTRTTLSTTCGVIAAGHAETAAAGVKILRLGGNAFDAAVAGMLASFVAEATLTSAGGSGFLLAHTATGEDILFDFFSQTPLRRRAAREVNFYPVSVNFGDAAQEFHIGPGSMAVPGNVAGLFHVHRRLGRLPMAVVAAPAVALAKNGLLVSDFQSFCQSVLEPILLATPEARQIFAPVGRLLAPGERLSMPEFADTLEWLVAEGPAVFYEGEIARRLVADSERLGGHLTARDLREYRVIERVPLGCGYRGYRVLTNPEPSAGGTLIAFALRLLEQADCIRQSYASPEHLGLLANVMRLTDEARRHDFASGSEALLSAGTLARYVRRLTKPWGSTTHLSVLDEEGNAASVTSTNGEGSAYVIPGTGIMVNNMLGEDDLHPEGFESWAENRRIASMMAPSLVLEDGRPWVVLGSGGSKRIRTALLQVISNLVDFQMPLSEAVASPRLHWENHVLHLEPGLLAPTHSLHDAVIRWREQNFFFGGVHAVACDALGNLTGSGDGRRNGAARFS

SEQ ID NO: 58200 - DNA, 1857 bp, Gloeobacter violaceus PCC 7421
  CDS (1)..(1857): transl_table=11
gtgcgaatatcagcgaataccgacaggatcgaagcattttgtcaggatagcggatctgtgtggaaccgacgcggcgtgcatcggtatgttacacctggttcggaacattttcgggatcgtcttttgaaccaccgaacgttgccgttgctggctgcctttgtcatcggatcggccgcgcccgtggccgccctcgatggcgtggtgagcaccgctcatcctttggccaccgaggcgggtatcgagatgctgcgcaaaggcggcaacgccgtcgacgccgccatcgccgcgagcctcgccctgggtgtggtcgagccgcagtcctcgggaatcggcgggggcggcttcgcgctggtgtggctcgggcggaccgccgaggcgcgcgttctcgactttcgcgaagcggccccgggtcaagccgccgccgcgatgtatctcgacaaggcaggcaaggtgatcccccggctgtcgctcgacggttaccgggcggcgggggtgcccggccaggcggcggggctggtgaaattgcagcaagcctacgcggccttgccgcttgcaacgctcgctgaaccggccatccgcctggccagggaaggcttttcactcagcgatctggtgcgcggccggatcgaggctgcagccgagcggctggggcgagatccggaggcaagccgcgtctttctggtggagggcaaagctcccccggcgggttatcgcctacggcagccggatctggcccgcaccctcgaactgtgggtcaacagcggcggcgacagtttttatcggggcgagacggcggcggcgatggcggcggcgatgactgagcgcggcgggctggtctcgcgcgccgatctcgaaagctacagccctgtctggcgcacgcccctggtgggcagttaccggggggtgccggtggtgacgatgccgcctccaggcagcggcggggtgctcctggagatgctcaataccctcgaaaactttgatctggccgcccagacgccgctattgcgcacccacctcaccgcccaggcgatgagccgcgcctacgccgaccgctcgcgcttctacggcgacccggccttcgtgccggtgcctctcgccgcgctggtggccaaaagctacggggcggcccagaaaaaaacgatctccctcgaacgggccaccccttcaacccagatcgtgccgggcagcttgctcagccccgccctcctggccggattccagagttgggaaggcccgcggccggtcgaaaacaccagccacctgagcaccatggacgccgacggcaacaccgtggcccttacccagacgatcaacggcggcttcggcgcggcggtggtcgcccccaaaacgggcatcctgctcaacaacgagatggacgattttgccgtcgcccccggcgtgcccaacctgttcggcctggtgggcagcaaggccaacgccatcgcccccggcaagcggccgctctcctcgatgaccccgacgatattgctgaaaaacgggcgaccctggatcgctctgggtagccccggcggggcgtttatcaccaacgccgtgctgcagacgattctgggcgtgctcgattaccaattgtccctgccggaagccgtgaacgctccgcgcatccaccaccagtggcagcccgaccgattgttcgtcgaaaaagcttatccagttgcccaggaaaccctctctgccctgggttatggtctgcgcgccatcgatgcgatgggcaatgtccaggcagttcagtacgcaggccggttcgtgggggcgagcgacgggcgccgcgagggcaccagcgccatctggcaaacgcccgctagggctgcttctccggctgcttcgccgcgtcgctga

SEQ ID NO: 58201 - protein, 618 aa, Gloeobacter violaceus PCC 7421
MRISANTDRIEAFCQDSGSVWNRRGVHRYVTPGSEHFRDRLLNHRTLPLLAAFVIGSAAPVAALDGVVSTAHPLATEAGIEMLRKGGNAVDAAIAASLALGVVEPQSSGIGGGGFALVWLGRTAEARVLDFREAAPGQAAAAMYLDKAGKVIPRLSLDGYRAAGVPGQAAGLVKLQQAYAALPLATLAEPAIRLAREGFSLSDLVRGRIEAAAERLGRDPEASRVFLVEGKAPPAGYRLRQPDLARTLELWVNSGGDSFYRGETAAAMAAAMTERGGLVSRADLESYSPVWRTPLVGSYRGVPVVTMPPPGSGGVLLEMLNTLENFDLAAQTPLLRTHLTAQAMSRAYADRSRFYGDPAFVPVPLAALVAKSYGAAQKKTISLERATPSTQIVPGSLLSPALLAGFQSWEGPRPVENTSHLSTMDADGNTVALTQTINGGFGAAVVAPKTGILLNNEMDDFAVAPGVPNLFGLVGSKANAIAPGKRPLSSMTPTILLKNGRPWIALGSPGGAFITNAVLQTILGVLDYQLSLPEAVNAPRIHHQWQPDRLFVEKAYPVAQETLSALGYGLRAIDAMGNVQAVQYAGRFVGASDGRREGTSAIWQTPARAASPAASPRR

SEQ ID NO: 58202 - DNA, 1734 bp, Rhodopseudomonas palustris CGA009
  CDS (1)..(1734): transl_table=11
atgatcacactgcgcgtcccgcaacgcattttgatgacgctggccgcgctggtgctggtggtgatcccgctcgccgcgccggcgcaggatatgcgcagcggcatggcgcgcgggccggcccaagcggtggtcgccaaacacggcatggtcgtggcgcaggaacggctggctgcggacatcggcgccggcttcctgtcccgcggcggcaatgcgatcgatgccgcggtggcgaccggcttcgccatggcggtcacctatccgcgcgccggcaatcttggcggcggcggcttcatggtgatccattccgcggtaaagaacgaggacgtggcgatcgactatcgcgaaaccgcgccgcaggccgccactcaagacatgttcctgaccgacggcaaacccgacccggacaaatcgcgcaaatccgcgctcggcatcggcgtgcccggcactgtggctggattggcgctggcgctcgagaaatacggctccggcaagttcaagctagcggacgtgatcgcgccggcgatcgcactcgcccgcgatgggatcaccgtcgccgacgataccgccgacacgctaccggattggcacgcctggctgtcgcgctggccttccacccgaaaggtgttcgctcgtcccgacggctcgccgctgcaggccggcgacaggctggtgcagcccgatctggcggcgacgctcgaagccatcgccaagcgggggccggacggtttctaccgcggcccgatcgccgagaagttgtcgcgcggcattcgcgaggccggcgggttgatcacgcccgaggatctcgccggctatcagccaatgctgcgatcgccgctacgcggcagctatcgcggctacgatatcgtggcgatgccgcaaccgtcgtccggcggcgtcgtgctgatcgaaagcctgaacatcctcgaaggctatgcgatgcacgacctcgggcagggcacgccgccgtcgctgcatctgctgatcgaagcgatgaagcgcgcctatgcggatcgcgcccgctatctcggcgatcctgccttcagcgaggcgccggtgacaaagctgctgtcgaaggactacgcggcgagcctgcgggccggcatcgatccggagcgcgccactccggtcgctgagccgctgccgcagccgcgcgaaggccagaacaccacgcacttctcggtcgccgatgccgagggcaatgcggtcagcaatacctacacgctcaacttctcttacggcctcggactggtagcggatggcaccggcgtgctgctcaacaacgaactcgacgatttcacagcggctcccggtgcctccaacgcctacggactggtcggcttcgccgccaatctgccggcgcccggtaagcgcccgctgtcatcgatgtcgccgaccatcgtcctgaaggacggcaagccggtgctcgtcactggctcgcccggcggcagccgcatcatctcggcagtgctgcaggtgatcgtcgatgtgatcgattaccggatgaacgtcgcggacgccgtggcggcgccgcggctgcaccatcaatggctgccggacgaggtgcgggtcgaaggcggatttcccgaagcgaccttggacacgctccgcgcgatgggccaccgcatcgtcaccccgctcggccagacctcggcgaattccatcctgatcgacgctgacggcttccatggcgcccccgatccccgcacgcggggcgcgacggcggcggggaattga

SEQ ID NO: 58203 - protein, 577 aa, Rhodopseudomonas palustris CGA009
MITLRVPQRILMTLAALVLVVIPLAAPAQDMRSGMARGPAQAVVAKHGMVVAQERLAADIGAGFLSRGGNAIDAAVATGFAMAVTYPRAGNLGGGGFMVIHSAVKNEDVAIDYRETAPQAATQDMFLTDGKPDPDKSRKSALGIGVPGTVAGLALALEKYGSGKFKLADVIAPAIALARDGITVADDTADTLPDWHAWLSRWPSTRKVFARPDGSPLQAGDRLVQPDLAATLEAIAKRGPDGFYRGPIAEKLSRGIREAGGLITPEDLAGYQPMLRSPLRGSYRGYDIVAMPQPSSGGVVLIESLNILEGYAMHDLGQGTPPSLHLLIEAMKRAYADRARYLGDPAFSEAPVTKLLSKDYAASLRAGIDPERATPVAEPLPQPREGQNTTHFSVADAEGNAVSNTYTLNFSYGLGLVADGTGVLLNNELDDFTAAPGASNAYGLVGFAANLPAPGKRPLSSMSPTIVLKDGKPVLVTGSPGGSRIISAVLQVIVDVIDYRMNVADAVAAPRLHHQWLPDEVRVEGGFPEATLDTLRAMGHRIVTPLGQTSANSILIDADGFHGAPDPRTRGATAAGN

SEQ ID NO: 58204 - DNA, 1701 bp, Magnaporthe grisea 70-15
  CDS (1)..(1701)
atgcgctccccaaccctcctcaccgccttcacggccttggtcctggccccggcctcgatcctcgcgaccccggtcgtctcagacccgcgtctgggcgccgtcgcgtccgagacgtccgagtgctcgcacatcgggacgcagatcctcaaggcgggcggcaacgccgccgactccatgatcgccacggtcttttgcgtcggcaccatcggcatgtaccacagcggcatcggcggcggcggctttctgctggtgcggtccccgaagggcaagtacgagtttgttgactttcgcgagacggcgccggcggcttcgtctgagaacatgtacaagaacaagggtaccgggagcactcgtggtgggcttgcgagcggcatccccggcgagctgcgcgggctcgagtacctgcacaagcactacggcaagctgccgtggcgcgacctgttggccccctcgatcaagctggccagggacggcttcgtcgtcaacgccgacctggtgcgctacatggacatggaggtcgacaagcccggcgacggcggcttcttcgtgtcggacccgtcgtgggccgtggatttcgcccccaacggccgccgcgtgaggctcggcgagacgatgaccaggaagcgctacgccaagacgctccagcgcatcgccgacgaggggcctggggtcttttacaggggcgacatggcacaggccaccatcaaggccctccaggccacgggcggcatcatgacgctgcaggatctcgccggctaccagatcaagctgcggaggccggcgggcatcaactaccgcgggtacaaactgacggcgacgtcggcgccgtcgggtggcggtgtggccctcgccatcctcaacgtcctcaatggctacaaggactttgggcacccgtcggccgtcaaccagtcgacgcaccgactcaacgaggccatgcgattcgcctacgcccagcgcgccaagctcggcgacccggcctttgtgaacggcacggaaaagttccagagggacatgctgtcaggcgcaacgggccagctgatccgctccaagatctcagacgccaagactcaggatacggcatactacaaccccgaagggctcgagtccctcgagacccccggaacctctcacatcgccgtggccgacgccagcggcatggccgtgtcgctgaccaccaccatcaacactttctttggctcgcacgtcatggtccccgagacgggcgtgcccatgaacaacaacatggacgacttttccgtcccaggcatgaccaactcctttggctacctgcccagcccggccaacttcatccggcccggcaagcggcccctctcctccatgtcccccttgatcgcagaggtgcgcgacggcaagaggctgtactttgtcctcggcgccgccggcgggagcaggatcatcaccagcacggtgcagaacgtcatccacgtcctggacgagggcaagaccgcgccccaggccctggccatgcccaggctgcacgaccagctgacgcccgccgtgacgacgtttgagtgggcttacaacaacgccacggtccagtacctcaagaacctgggccacaatgtgtcttgggtcgcgccgggacagagcaccgcccaggcagtgcggttgttgccaaacggaacatttgaagctgctggtgagccgaggcagttgaactcgggtgggtatgctgtttga

SEQ ID NO: 58205 - protein, 566 aa, Magnaporthe grisea 70-15
MRSPTLLTAFTALVLAPASILATPVVSDPRLGAVASETSECSHIGTQILKAGGNAADSMIATVFCVGTIGMYHSGIGGGGFLLVRSPKGKYEFVDFRETAPAASSENMYKNKGTGSTRGGLASGIPGELRGLEYLHKHYGKLPWRDLLAPSIKLARDGFVVNADLVRYMDMEVDKPGDGGFFVSDPSWAVDFAPNGRRVRLGETMTRKRYAKTLQRIADEGPGVFYRGDMAQATIKALQATGGIMTLQDLAGYQIKLRRPAGINYRGYKLTATSAPSGGGVALAILNVLNGYKDFGHPSAVNQSTHRLNEAMRFAYAQRAKLGDPAFVNGTEKFQRDMLSGATGQLIRSKISDAKTQDTAYYNPEGLESLETPGTSHIAVADASGMAVSLTTTINTFFGSHVMVPETGVPMNNNMDDFSVPGMTNSFGYLPSPANFIRPGKRPLSSMSPLIAEVRDGKRLYFVLGAAGGSRIITSTVQNVIHVLDEGKTAPQALAMPRLHDQLTPAVTTFEWAYNNATVQYLKNLGHNVSWVAPGQSTAQAVRLLPNGTFEAAGEPRQLNSGGYAV

SEQ ID NO: 58206 - DNA, 1743 bp, Gibberella zeae PH-1
  CDS (1)..(1743)
atgggtcaattacaggtcttggctgcgttactcagcgtgtttccacaaattggtctttcgaaaccatgcgagactacttatcctcctcttatgcacccactgcaatccagacaattctctgataatttgggtgctgttgcgagtgagagtgagatatgcagtaccataggagtcaatatcctacgggatggcggtaacgcggcagatgctatggtagcgacagttctatgcgttggaacaattggcatgtatcattctggtattggcgggggaggcttcatgctcatccatgcacccgacgagaagaatggatcgaatgcttacgaattcgtcgactttcgtgagacagcacctgcggctgctacggagaacatgtttaagaacaatgtgaacgagagtatatctggcggcaaagcaagcggtgtcccaggagaattgagaggtctccaacacctacacgaaaaatacggtagtctaccctggtctcagctcgtacaaccagccatcaaggtcgcacgctacggcttccccgtcaacaacgacaccctcaaatttatgggagccacctacaccaaattcgagaacgagagtttccttctcaacgacccagcctgggcaattgatttcgcgccttccggcagactcgtcaagtttggcgagaagctgacccgaaagagattcgcggataccctggaaacaattgcttctgaaggaccggatgtgttttatcaaggcgctatcgccgaggcgactattcgaacgctgaaacgcgaaaagggtatcatgacgatggatgaccttaagaattatactgttgagattcgtcagccttcacagatcaattacagaggcggaaaggtcacgagcggttctgccccttcaagcggtgctgtagtcgcagctgcattgaatattctggacggatatgacttccttggagatccgagccgagtcaacgacacggcttactataccgatgaagcgttcaagttcagctacggcatgcgtaccaacttgggtgatcccagttttgttgatgatatgtcagaatatcagaaacagatgtattccaacaagaccgctcaggaagttagagcaaagttggatggtcgtgctcttgccttgaaagactacgatcccaaaggcctcgagagtttggaaacacctggaacatctcacatcgtcgccatggactcatctggtctagctatttccctcaccaccaccatcaacctcaactttggctccaaggtcatcgtcccagaaacaggcataatcatgaacaacgagatgaacgatttcagcatcccaggcgaatccaaccaattcggctacatccccagcgaagccaactttatccgtcctggaaaacgtcctctatctagtatcagcaccaccatcgttgaagatgcagacggcaaggtttctcttgtcacaggatctgcgggaggtagcaggatcattactgcgactacacaagttgtgctcaacgctattgacaaaaacatgactgtgcgcgaagcccttgctgctcctagattgcacgatcagcttgtcccgcgacaggtgtctttcgagtacgcatttgataattctactgttgcatatctaaaagaggttgggaataatgttacttgggtgccgacgcagagcacggcgcaggctttgagaagattggcgaatgggacgtttgaggctgctggagaacctcgacaggttaattctggtggtttctcaacttga

SEQ ID NO: 58207 - protein, 580 aa, Gibberella zeae PH-1
MGQLQVLAALLSVFPQIGLSKPCETTYPPLMHPLQSRQFSDNLGAVASESEICSTIGVNILRDGGNAADAMVATVLCVGTIGMYHSGIGGGGFMLIHAPDEKNGSNAYEFVDFRETAPAAATENMFKNNVNESISGGKASGVPGELRGLQHLHEKYGSLPWSQLVQPAIKVARYGFPVNNDTLKFMGATYTKFENESFLLNDPAWAIDFAPSGRLVKFGEKLTRKRFADTLETIASEGPDVFYQGAIAEATIRTLKREKGIMTMDDLKNYTVEIRQPSQINYRGGKVTSGSAPSSGAVVAAALNILDGYDFLGDPSRVNDTAYYTDEAFKFSYGMRTNLGDPSFVDDMSEYQKQMYSNKTAQEVRAKLDGRALALKDYDPKGLESLETPGTSHIVAMDSSGLAISLTTTINLNFGSKVIVPETGIIMNNEMNDFSIPGESNQFGYIPSEANFIRPGKRPLSSISTTIVEDADGKVSLVTGSAGGSRIITATTQVVLNAIDKNMTVREALAAPRLHDQLVPRQVSFEYAFDNSTVAYLKEVGNNVTWVPTQSTAQALRRLANGTFEAAGEPRQVNSGGFST

SEQ ID NO: 58208 - DNA, 1779 bp, Erwinia carotovora subsp. atroseptica SCRI1043
  CDS (1)..(1779): transl_table=11
atgaaaataaaaaacacaacatcgggaaaatggctgttgtcactgagcgtgacggcgctgctggtgagcggaaccgtgcaggcggcgtcggcccctgcggtggaagcaaaaaacggcatggtggtcagctcgcagtatctggcttcgcagattggcgtcgatatcatgaaaatgggcggcaatgcgattgatgccgccgtggccgtgggctatgcgcaggcggtggtgaacccctgctgtggcaatatcggcggcggcggatttatgacgctgcatctggccgatgggaaagacacctttatcaacttccgtgagacggcgcctgcggcggccagcgccaacatgtatctgaacgcggatgggagcgtgaaaaaagacgcgagcctgtacggctatctggctgctggcgtaccgggaacggtgttggggctggatactgcgttgcaaaaatatggcaaattgacgcgtgaacaggtgatgaccccggcgattaaactggcgcgtgaaggttttgaactcacgcgtgcggataccgatattctggacactaccatcaaacgctttaaagccgatcctgaagcggcgcgtattttcttacgtcccgacggcagcccgttgcagcccggcgataagctggtgcaaaccgatctggcgaatacgctggcggcgattgccgctaaagggccggatgccttctacaaaggcacgattccgcaggcagtggagaaggcagcaaagcagggcggtggcatcctgacagcggctgattttgccgattaccgtattaccgaaacggcaccggtaacctgtaactatcgcggttatcagtttgtctcttcaccgccgcctagctccggtggcatcacgatgtgtgaaattctcaatattgtcgaaggctacgatattacatcgacgggctttaactcggcagccaccgttcatgtgttgacggaagcgatgcgtcacgcgtacatggaccgcaatacgtacctcggtgacccggcgtttgtcagtaaccctgtcgagcgcctgttgagtaaggattacgccgccgaaatccgcaaacaaatcgaaccggagaacgcgacgccgtccaaaaatgtacagccgggaattggcccacatgaacgaccggaaacgacgcactattccatcgtggataatcagggcaacgcggtatccactacgtataccgttaacggacgttttggttcggtggtgattgcgccgggtactggcttcttcctcaataacgaaatggatgactttaccgttaaagttggcgagaaaaacctgtacggattggtgcaaggggagcggaattctatcgcccccggtaagcgcccactttcgtccatgagcccgtcactggtgacgaaagacggcaaagtcttcatggtgctcggctcgcctggtggttcacgcattatcaccatcacgctgcaaacggcgctgaatattatcgaccacggcatggcaccgcaggaagcggtggatgcgccacgtatccatcaccagtggttgccagacgaggtgtattacgaacagcgcgggctatctgccgatacgctaaacctgctgaagcagcgcggctacaagatggtggaacaaacgccttggggcgcagcggagctgattctggttggtttaccgggagcagcaggcgtgacccctgcggattcgggtaatgactcggcggtatccggcaaggtgcgtgaaggttacctgtacggagcaaatgatatccgccgcccggcaggggcagcgataggatattga

SEQ ID NO: 58209 - protein, 592 aa, Erwinia carotovora subsp. atroseptica SCRI1043
MKIKNTTSGKWLLSLSVTALLVSGTVQAASAPAVEAKNGMVVSSQYLASQIGVDIMKMGGNAIDAAVAVGYAQAVVNPCCGNIGGGGFMTLHLADGKDTFINFRETAPAAASANMYLNADGSVKKDASLYGYLAAGVPGTVLGLDTALQKYGKLTREQVMTPAIKLAREGFELTRADTDILDTTIKRFKADPEAARIFLRPDGSPLQPGDKLVQTDLANTLAAIAAKGPDAFYKGTIPQAVEKAAKQGGGILTAADFADYRITETAPVTCNYRGYQFVSSPPPSSGGITMCEILNIVEGYDITSTGFNSAATVHVLTEAMRHAYMDRNTYLGDPAFVSNPVERLLSKDYAAEIRKQIEPENATPSKNVQPGIGPHERPETTHYSIVDNQGNAVSTTYTVNGRFGSVVIAPGTGFFLNNEMDDFTVKVGEKNLYGLVQGERNSIAPGKRPLSSMSPSLVTKDGKVFMVLGSPGGSRIITITLQTALNIIDHGMAPQEAVDAPRIHHQWLPDEVYYEQRGLSADTLNLLKQRGYKMVEQTPWGAAELILVGLPGAAGVTPADSGNDSAVSGKVREGYLYGANDIRRPAGAAIGY

SEQ ID NO: 58210 - DNA, 1764 bp, Yersinia pseudotuberculosis IP 32953
  CDS (1)..(1764): transl_table=11
atgtttttaacaaaatggaataagccattagcagtattagctttactggtaagtggcacgctgcatgccgcctccacacccgcggtagaagcgaaaaatggcatggttgtgacctcccaatatctggcttcacaggttggggctgatattttaaaaatgggcggtaatgctgttgatgccgcggtagcagtaggatatgcccaggcagtagtcaatccttgctgtggcaatattggcggggggggttttatgaccattcatcttgccgatggaaccgatacatttattaactttcgtgaaaccgccccttccacggctaatgctgatatgtacttggataaagacggtaacgttaccaaggatgccagtttgtatggctatctggcggtaggtgtacctggcacggtattgggcatggatagtgcgcaaaaaaaatacggcaaattaacccgtcagcaagtcatggcaccggctatccgtttggcccgtgacggctttatcctgactcgcgccgataccgatattctggacaccaccgtcaaacgtttccgtcaggatcctgagtctgcacgtatcttcctgcgtaaagatggagaggcactacaaccgggcgatcgtctggttcaggccgatctcgcggatacgttaagcgcgatttcagaaaaagggccggatgcgttctatcaaggtaaaataccgcaagctgtggaagcagcggctaaaaagggaggcggaatactgactgccgccgatttcgccgattataaaatcaccgaaaccgcaccgattacctgtagttatcgcggttataaattcgtttcagccccaccgccgagttccggtggcgtcacattatgtgaaacgctaaatgttttggagggctataacctcaaaagtatgggctttaactccgctgactatatccatacgctaacggaggcaatgcgccatgcctatatggaccgcaataccttcctcggtgatccagagtttgttaaaaatccgcttgaccgcctactgagcaaaagctatgccgccgatatccgtaaacagatcgtcgccaacaaagcaacaccatcagtagaagtacaaccgggtatgcaacctcacgaaaaaccggagacgacacactactccatcgtcgatcatgagggtaatgccgtttctaccacgtataccgttaatgggcgctttggcgcggtggtcattgctcctggtactggcttcttcctcaataatgaaatggatgattttacagttaaagtgggtgaacaaaatctgtatggattggtacaaggtgcaaccaacgctatcgcccccggtaagcgcccactatcgtcaatgagcccgacactagtgaccaaagatggaaaaacatttatggtcttgggttcaccgggtggctcacggattatcagcatcacgctgcaaaccgccctgaacgtcattgaccacggtatggccccgcaagaagcggttgatgcaccacgtattcaccatcagtggctacccgatgaagtctattatgagcaacgcggtgtctcagcggacagtctcaatatcctgaagagtatgggatataagatggttgaacagagcccttggggcgcagcggagttgattttagtcggcctggccggtgttgagggcgtcagcccggctaactcgggtaatgattctgctgtctccggcaaagtccgtgagggctacctgtacggtgccaatgatgtccgtcgccccgcaggggctgctattggctactaa

SEQ ID NO: 58211 - protein, 587 aa, Yersinia pseudotuberculosis IP 32953
MFLTKWNKPLAVLALLVSGTLHAASTPAVEAKNGMVVTSQYLASQVGADILKMGGNAVDAAVAVGYAQAVVNPCCGNIGGGGFMTIHLADGTDTFINFRETAPSTANADMYLDKDGNVTKDASLYGYLAVGVPGTVLGMDSAQKKYGKLTRQQVMAPAIRLARDGFILTRADTDILDTTVKRFRQDPESARIFLRKDGEALQPGDRLVQADLADTLSAISEKGPDAFYQGKIPQAVEAAAKKGGGILTAADFADYKITETAPITCSYRGYKFVSAPPPSSGGVTLCETLNVLEGYNLKSMGFNSADYIHTLTEAMRHAYMDRNTFLGDPEFVKNPLDRLLSKSYAADIRKQIVANKATPSVEVQPGMQPHEKPETTHYSIVDHEGNAVSTTYTVNGRFGAVVIAPGTGFFLNNEMDDFTVKVGEQNLYGLVQGATNAIAPGKRPLSSMSPTLVTKDGKTFMVLGSPGGSRIISITLQTALNVIDHGMAPQEAVDAPRIHHQWLPDEVYYEQRGVSADSLNILKSMGYKMVEQSPWGAAELILVGLAGVEGVSPANSGNDSAVSGKVREGYLYGANDVRRPAGAAIGY

SEQ ID NO: 58212 - DNA, 1608 bp, Synechococcus elongatus PCC 6301
  CDS (1)..(1608): transl_table=11
gtgcgatttgggcctgatgctcaccgttgttgtcaggctctcggcaagctgcgacgatcgcggcagtcactgaggaccagcatggctaagcggggggcgatcgccgccggacatccacagaccgttgcggctgggctagtggccttggaagcgggaggcaatgcttttgatgccgcgatcgcagctctggcggcttcgtggatcaccgagcctctactgacctccccggctggaggtggctttctgctcgcagcccagccccaccaaagcccccgcctctatgacttcttttgccagacgcccagtcagcgatcgccagaaccacaggatttctatcccgttggggttgattttggcgatgcgattcaggagtttcatatcggtttaggctctgtggccgtacccggactcttggctgggctgctgcgagtgcaggccgaactgggacggctgccgcgctcagtcgtcttggaaccggcgatcgctctgggccgcgaaggagtagaaatcaatgcctttggtgaatactgctttcggctactggatccgatcgtgactgcaacgccagaagcgcgatcgctctaccagccgcagggtcaaccgctgcgatcgggcgatcgctttagaaacactgacttagctgccgttttagaagagttggctgcgcccaagggtcaggccttctacgaacacgaactgttgcctgcgatcgccaattactgcgcggccggcggcaacttgcaactgacggatttgcagcagtatcccgtcgccgtgcgatcgcccctcgcgattcccttcggcaactatcgtctgctaaccaatccgccacccagcagtggtggtctgctgattgcctttgccttgtcgctcctcaatcagtctgtaatcaacctcaatcctcagcagcatccgcaggatcttgtacagctgatgcggttgaccaatagggctcgccgcgactttttggatggcgcactgcaacaagctggcatcgatcgccaatttctgacaggtgccgcttttgagcaagccgctgccggctggctgaatcggctgggcagcaccacgcatatcagtgtcattgatgccgaaggcaacgctgccagcctcaccagttccaatggcgaaggttgcggtcatgtcctgccggacaccggcatcatgctcaacaacatgctgggcgaagccgatctgcaccctttgggttttcatcgctggccgctggggcaacgcctcggctcgatgatgtcgcccagcctgctttggggcgaagacgatcgcccgcatttggtgcttggctccggcggctccaaccggattcgcacggccattctgcaggtgattcatcgctgggcggtcgaaggctacgcacttgctgaggcgatcgcggctcctcggctgcattgggaggctggagtgttgaactgggagccaggctgggaccctgcggggattgaagcagcaagtcaaccctctgaaactgcgatcgcttggactactcccaacatgttctttggcggcgtgcatgccgtgggactgacagcgactggtgaattttgtggagcgggcgatccacggcgatcgggcgtctatggttgctgttga

SEQ ID NO: 58213 - protein, 535 aa, Synechococcus elongatus PCC 6301
MRFGPDAHRCCQALGKLRRSRQSLRTSMAKRGAIAAGHPQTVAAGLVALEAGGNAFDAAIAALAASWITEPLLTSPAGGGFLLAAQPHQSPRLYDFFCQTPSQRSPEPQDFYPVGVDFGDAIQEFHIGLGSVAVPGLLAGLLRVQAELGRLPRSVVLEPAIALGREGVEINAFGEYCFRLLDPIVTATPEARSLYQPQGQPLRSGDRFRNTDLAAVLEELAAPKGQAFYEHELLPAIANYCAAGGNLQLTDLQQYPVAVRSPLAIPFGNYRLLTNPPPSSGGLLIAFALSLLNQSVINLNPQQHPQDLVQLMRLTNRARRDFLDGALQQAGIDRQFLTGAAFEQAAAGWLNRLGSTTHISVIDAEGNAASLTSSNGEGCGHVLPDTGIMLNNMLGEADLHPLGFHRWPLGQRLGSMMSPSLLWGEDDRPHLVLGSGGSNRIRTAILQVIHRWAVEGYALAEAIAAPRLHWEAGVLNWEPGWDPAGIEAASQPSETAIAWTTPNMFFGGVHAVGLTATGEFCGAGDPRRSGVYGCC

SEQ ID NO: 58214 - DNA, 1938 bp, Psychrobacter arcticus 273-4
  CDS (1)..(1938): transl_table=11
atgtcagctccatattcttattctcatcagacacaagcgcccacttataaaactttaaaatctgccgcattggttattagcagcacgctattgctctctgtatctgcccatgcggtagacacaaacactgctgtcgccccaaaaaccattaattcaacctcgattaataccagtgcgattaatctagcggttatgacagaaaaccctaccgtactgtctgaaaccaagcgcatcacacgagcgaaaaccaatacgctcacgcctaagaccacgcaagccaaaaccgatcaagccatctattctgtggacgctatccaccaccctgtttgggcaaaaaacggcatggtcgccacccaagaagcacttgcttctgatatcggcttaaagattttgaaagatggtggtaatgccgttgatgctgctgtggcggtgggttttgctctagccgtgacgttaccacgtgcaggcaatatcggcggtggtggatttatgatggtatatgatgccaaacaaggtaaaaccgtggcgctcgattatcgtgaaaaagcccctagtagcgcctcgcgcgatatgtatcttgataaggatggcaatgccgtcagtgacttatctcgttatcatggtttagcagttggtgtgccaggtacggtagcaggcttactcaaagcattagaagatcatggcaccatgagccgcggacaagtgatggcaccagcgattgcgctggctgaaaatggtattgaagtcactgctgggttgtcagagtcgttagaagcgttaagcgatcgcttacaaaaatggccaagtaccaaaaagatattctttaaagctgatggcagcgcttatcaaccgggtgagcacttaaaacaaccggagcttgctcattcgctaaagctgattgccgccaaaggcgctgatggtttttataagggtgaaactgcccgaaagcttgtcaaagcgattaatgaagcgggcggaaagatgagtttgcaagacttagctaactatcaagctattgcccgtacgcctgttaaaggcgattatcgtggctatgagattgtctccatgccaccaccgtcttctggcggtattcatattgtgcagattttaaatatcttggaaggttatccgctaagagactatggtcaaaacagcgcgcaaaccattcatttaatggctgaagcaatgcagttggcttatgcggatcgttctgagtatttgggtgattctgattttattgacgtccctgctagcggtttaactgctaagccttatgctgataagctgcgcgctttaatcaacccaaataaagccacgccagcagcaaccatcaaggcaaataaccctctaccgtacgagagtgatcaaaccacgcatttttctattgtcgataaagatggcaatgcggtggccaatacttatacgttgaatttctcttatggcactggtcttgtcgccgatggtacggggatactgctcaataacgagatggacgatttttctgctaagcccggtgtgccaaatggttatggcttaatcggtggcgatgccaatgcgatcgaggcgaataagcgtcccttgtcctctatgagtccaacgctcgtatttaaagacagcaaaccttatatcgtcacgggcagtccgggtggtagccgtatcattactacggtcacgcaggtcatctcaaacgtcattgaccatgatatgaatattgctgaagccacacacgcaccgcgtattcatgaccagtggctaccggatgagattcgtatcgaaaaagcactaaatatagatacgattaaaaaattagagtccatgggacataaggtcagttcacagtcagccatgggttcgacacaatcaattatgattacgccaaatggcatttatggggcttctgacccgcgtattgtcgatgccgcggtggttggatactaa

SEQ ID NO: 58215 - protein, 645 aa, Psychrobacter arcticus 273-4
MSAPYSYSHQTQAPTYKTLKSAALVISSTLLLSVSAHAVDTNTAVAPKTINSTSINTSAINLAVMTENPTVLSETKRITRAKTNTLTPKTTQAKTDQAIYSVDAIHHPVWAKNGMVATQEALASDIGLKILKDGGNAVDAAVAVGFALAVTLPRAGNIGGGGFMMVYDAKQGKTVALDYREKAPSSASRDMYLDKDGNAVSDLSRYHGLAVGVPGTVAGLLKALEDHGTMSRGQVMAPAIALAENGIEVTAGLSESLEALSDRLQKWPSTKKIFFKADGSAYQPGEHLKQPELAHSLKLIAAKGADGFYKGETARKLVKAINEAGGKMSLQDLANYQAIARTPVKGDYRGYEIVSMPPPSSGGIHIVQILNILEGYPLRDYGQNSAQTIHLMAEAMQLAYADRSEYLGDSDFIDVPASGLTAKPYADKLRALINPNKATPAATIKANNPLPYESDQTTHFSIVDKDGNAVANTYTLNFSYGTGLVADGTGILLNNEMDDFSAKPGVPNGYGLIGGDANAIEANKRPLSSMSPTLVFKDSKPYIVTGSPGGSRIITTVTQVISNVIDHDMNIAEATHAPRIHDQWLPDEIRIEKALNIDTIKKLESMGHKVSSQSAMGSTQSIMITPNGIYGASDPRIVDAAVVGY

SEQ ID NO: 58216 - DNA, 1761 bp, Colwellia psychrerythraea 34H
  CDS (1)..(1761): transl_table=11
atgattcatcattcatttttattacgattttctacacttgcatttgttgttactcaccttttaataagtcagacagcgctggcgaaacgtgaaatccgtgaacccgaagctgcaacgggctttaatcaaaagaaagctgtttttgctaagcaatatatggtggttgctgccaatccttatgcaagtaaagcaggattagcaatgcttgataaaggcggtagtgctgttgatgcggctattgccgctcaacttgtacttagcttagttgaaccgcaatcctcgggtcttggtggtggtacctttatgctgcattggcacaataaaaaccaaaaactaacgacttttgatggcagagaaactgcgccacaaaacgcgacaagtgaattgtttttagataaaaatggcaagccacttaagtggtctgatgccgttgtaggtggtaagtctgttggtgtcccaggattacttgcggcgcttaataaagcacatcaacaatttggtgtgttgccatggaaagcattatttcagccagcgattgagttagctgaaaatggctttattgtatcgccgcgtttagaacaattactaggtatgaatttcaatccaggcattcatattttacctgagattaagaactatttttcacctaatggtattggtataaaagcgggtgataccctaaaaaaccccaagttggctaaagcgcttcatagtattgctaacgaaggggttgaggtgttctaccaaggttggatagccaagaaaatagttgcaaaggtgaaaaattcagttgtttcacctgggttattaagtctggatgatatgaaaaattatcaagcaatagaacgcgcttctgtttgtggtccttaccatcaatataagatatgtggcatggcaccgccaagctcgggcggtatcagcgttattcagattttagcgcaactacaatcatttgaacttgcccaatacccgccaaattctttacatgcgatacacctattaacacaaagttcacgattagcctttgcagatagaaataaatacattgccgatagtgattttgtcagcgtacccgttaaaggattattagctgaagattacatcgctaaacgtgcggctttaattgatgaaaaaagagatatgggtcaggcaatcgcaggcaatccacaaaacagtttagtgttagcgaatgataacgcaattgaaagaccatcaaccactcatttggtggttgttgataaacaaggtaatgccatatcaatgaccagtagtattgaaaatggttttggctcagctctaatggtgcaaggctttattttaaataatcaattaactgatttttcattggcgccaaagcgtgatgggaaatgggtagccaatcgtgtagaaccattaaaaaggccccgtagctccatggcaccgatgatggtttttaatgaagataattcattacgtttgatacttggtgcgcccgggggtagtcgtattattaattatgtagcgcaaactattatcggtgtactcgattggcaactgaatgtacaacaagctgttaatttgcccaaagtaaccaaccgaaattacgtcactacgttggagttagatactgatgttgctaaactaaaacctgcgcttgaagcgagaggacatacggtgaaaattcgagccttaaatagtggtttacatgcaattgaagtcactaatagtgggcttgttggcggagctgatccacgtcgagaaggattagcgctagggcgttaa

SEQ ID NO: 58217 - protein, 586 aa, Colwellia psychrerythraea 34H
MIHHSFLLRFSTLAFVVTHLLISQTALAKREIREPEAATGFNQKKAVFAKQYMVVAANPYASKAGLAMLDKGGSAVDAAIAAQLVLSLVEPQSSGLGGGTFMLHWHNKNQKLTTFDGRETAPQNATSELFLDKNGKPLKWSDAVVGGKSVGVPGLLAALNKAHQQFGVLPWKALFQPAIELAENGFIVSPRLEQLLGMNFNPGIHILPEIKNYFSPNGIGIKAGDTLKNPKLAKALHSIANEGVEVFYQGWIAKKIVAKVKNSVVSPGLLSLDDMKNYQAIERASVCGPYHQYKICGMAPPSSGGISVIQILAQLQSFELAQYPPNSLHAIHLLTQSSRLAFADRNKYIADSDFVSVPVKGLLAEDYIAKRAALIDEKRDMGQAIAGNPQNSLVLANDNAIERPSTTHLVVVDKQGNAISMTSSIENGFGSALMVQGFILNNQLTDFSLAPKRDGKWVANRVEPLKRPRSSMAPMMVFNEDNSLRLILGAPGGSRIINYVAQTIIGVLDWQLNVQQAVNLPKVTNRNYVTTLELDTDVAKLKPALEARGHTVKIRALNSGLHAIEVTNSGLVGGADPRREGLALGR

SEQ ID NO: 58218 - DNA, 1860 bp, Colwellia psychrerythraea 34H
  CDS (1)..(1860): transl_table=11
atgaaaaataattttattaccaatattcataatcgattattctccagtgcccactcccaaaaaaatcttcgagatatggtagtaaaattaacttgttgttttttatcgttcgtcgctactaacagtgtcgccactacgccagtccagcaagttagcaaagctgagctgcctcgtttatggcaattggttgattatcacgatatctctcatcctgtcatcggcagaaagggcatggtggtgagtcaaaagcgaatagccagtgaagtgggggcagatattcttaggcaaggcggcaacgcagttgatgctgcggtagcggtaggttttgcattatccgttgttttaccacgcgctggaaacttagctggtggtggttttatgctggttcatttaggtgatgaaaagaaaacaattgccattgattatcgagaaacagctcctgctttagcatacaaagatgtttttcttgataaatatggttacccgatagtaaataaatcactgaaaacattatccgcttcgggtgtaccaggcacagttgcaggtttacattatgcccttgaaaactatggttcaatgtcttggtctgaagtaattaaaccggcagaaaaacttgctagagcgggtatcgttgttgatgatgatatggcgcgtttcttttacaaagaacaaatgtttttatcagctaactcagaaacatgtcgagtatttttaaaagaaaactgccaaccgtatctagcaggcgaagtttgggtgcaaacagatcttgccgatagcttagcctacttgcgcgagcagggtaaatctggattttaccaaggggatattgcaaaaaaaattgttgcagcaatgcagcagggcaatggcctcattactgcaaaagacttagcggattatagagtgaatgaagtagcgcctattcgtggcacatttcaagggtttgaaattttaactatgccaccgccaagttcaggtggcgttcaccttattcaaatgttaaatatgtttgaaacacttaacttagagaacattcagcaaggctctgcagcactaatacatctgcaaactgaaatatttaagcgcgcctatgccgacagaagttcctttttaggtgaccctgcttttgtcaacgtaccgagtgagggcttaactagcaaagcatacgcaaaagaactcagtaaaaatattaagcgaaataaaataactccttcaagcgatattaaagccggtgaacccagtaaatatgaaagccctgataccacacatttttctgttatggatgccgagggtaatgtggtgagtagtacttatactttaaatcataactacggtagtggtattactattccaggtacgggaattttactgaataacaccatggatgatttttcggtaaaaccaggtagtcctaatagttacggtttaattggcggtacagctaatgccattgaagcaaaaaaacgtccgcttagctctatgacgccaacgatagtgcttaaagatggtgaaccctaccttgctactggtacgccaggtggtagtaaaataattacctcggtatttcaacaattggttaatgttttatatttcgaaatgaatattgctgaagcgaccaatgcaccacggtttcatcatcaatggcaacctgaggtgttgtctgttgagaggaatatccctgctgataccgttgatatcttaaaagcgaaaggttacaacatcaaagtatctagttcattgggtagcttacaagccatcatgaaacataatggcgtatttttaggagcagcagaccctagaagagctggtgcagctgccattgctgttgatgttatcgagcagtctgttaagttagccaagtaa

SEQ ID NO: 58219 - protein, 619 aa, Colwellia psychrerythraea 34H
MKNNFITNIHNRLFSSAHSQKNLRDMVVKLTCCFLSFVATNSVATTPVQQVSKAELPRLWQLVDYHDISHPVIGRKGMVVSQKRIASEVGADILRQGGNAVDAAVAVGFALSVVLPRAGNLAGGGFMLVHLGDEKKTIAIDYRETAPALAYKDVFLDKYGYPIVNKSLKTLSASGVPGTVAGLHYALENYGSMSWSEVIKPAEKLARAGIVVDDDMARFFYKEQMFLSANSETCRVFLKENCQPYLAGEVWVQTDLADSLAYLREQGKSGFYQGDIAKKIVAAMQQGNGLITAKDLADYRVNEVAPIRGTFQGFEILTMPPPSSGGVHLIQMLNMFETLNLENIQQGSAALIHLQTEIFKRAYADRSSFLGDPAFVNVPSEGLTSKAYAKELSKNIKRNKITPSSDIKAGEPSKYESPDTTHFSVMDAEGNVVSSTYTLNHNYGSGITIPGTGILLNNTMDDFSVKPGSPNSYGLIGGTANAIEAKKRPLSSMTPTIVLKDGEPYLATGTPGGSKIITSVFQQLVNVLYFEMNIAEATNAPRFHHQWQPEVLSVERNIPADTVDILKAKGYNIKVSSSLGSLQAIMKHNGVFLGAADPRRAGAAAIAVDVIEQSVKLAK

SEQ ID NO: 58220 - DNA, 1806 bp, Thiobacillus denitrificans ATCC 25259
  CDS (1)..(1806): transl_table=11
atgcccatgaaccgctttttgctctggctgctcctcagcctcgtcgcgtccccgctgcgcgccgcgcctgacggggtcgtcgccgtttcccatccggccgcggccgccgccggcgcgcgcatgctcgccacgggcggcaacgccgtcgacgccgccgcggcggtgcagttcgcgttgaacgtggtcgagccgcagtcgtccggcatcggcggcggcggcttcatgctgattcatctcgccaagaccggcgagaccgtcatcgtcgactcgcgcgagcgcgcaccggctgcgtcccgcgccgacatgttcgcgcccggcggcgcgccgatggcgtttccgctcgcctcgacgagcgggcttgcggtcggcgtgccgggtaccgtgcgcggcgtcgacacggcgctgcgccgttggggcacgatggcgctcgccgacacgctcgcccccgcgatcgaactcgccgcgggcggctttcgcgtcaaccgctttctcgctgccgacatcgccgacgacggcgggcggacagccatccatccggaaaccgctgcgatctttcggcccggcggcgtgccgttggccgagggcgactggctggtgcagcccgatcttgcgcgcacgctcagactcattgcgacaggtgggccaaaggttttttacgagggtccgctcgcgcgcgcgatcgtcgaagcccagcaacggacacgcggcgagttgggcgagcccggccgcggacgcatggcaatcgccgacctgcgcgactacacggccgcgatccggcgtccgctcacggggcagtaccgcggctggaccgtggcgagcatgccacccccgtcctcgggcggcctgacgttgctgcagacgctgggcctgctcgagcgctttccgctcggcgatacgacacagggttacggcttcggcagcgcgaaaacggtgcacctcatgatcgaagcgatgcgcctcgccttcgccgaccgcgccgtctggatcggcgacgacgacgcacgcgccctgccccaggccgcgctgctgcatccgcagtaccaggccgcacgcgccgcgctcatcgatccggcgcgacgcatcgaacaggcaagcgccggcgacccgacacgctgggcccccgcggcaaccaaggcgccgcaacgcatccgtagcagggcggaaagtccgcagacgacccatttctcgatcgtcgaccgctggggcaacgtcgtgagctatacgagcacgatcgaatacacctggggcgcgggcatcaccgtgccgggctacggctttctgctcaacaacgaactgaccgatttcaatttcgtgccgagcgccgacagcgcgaccggcaatcccggcgccaacgacgtcgcgcccggcagacgtccgcgatcgagcatggcaccgacgctgcttctgaaaaacgggcgtccggtcgcggcctacggctcgccgggcggcgcgacgatcatcaactcggtgctcaacatgacgctcaatctcgtcgaccacggcatgacgccgggtcaggcgatcgccgcgccgcgcgtctcggtcacgagcgctgcaggcaaagtcgcctgcgagggcggcgaggatttcatgcagccgcgcctgagcatcgcggtgcaggaccgccttcgcgcgctcggacacgtcggactgggagaagccgggacggacggctgtcaggggaggatcggttcggtgcaggcggtcgtcgtcgacctgaccagtggcgcgcagtacggcgccgccgatccgcgccgcgaaggtacggtgatccgggtaggtcccggcgcgcccctcgcgccctga

SEQ ID NO: 58221 - protein, 601 aa, Thiobacillus denitrificans ATCC 25259
MPMNRFLLWLLLSLVASPLRAAPDGVVAVSHPAAAAAGARMLATGGNAVDAAAAVQFALNVVEPQSSGIGGGGFMLIHLAKTGETVIVDSRERAPAASRADMFAPGGAPMAFPLASTSGLAVGVPGTVRGVDTALRRWGTMALADTLAPAIELAAGGFRVNRFLAADIADDGGRTAIHPETAAIFRPGGVPLAEGDWLVQPDLARTLRLIATGGPKVFYEGPLARAIVEAQQRTRGELGEPGRGRMAIADLRDYTAAIRRPLTGQYRGWTVASMPPPSSGGLTLLQTLGLLERFPLGDTTQGYGFGSAKTVHLMIEAMRLAFADRAVWIGDDDARALPQAALLHPQYQAARAALIDPARRIEQASAGDPTRWAPAATKAPQRIRSRAESPQTTHFSIVDRWGNVVSYTSTIEYTWGAGITVPGYGFLLNNELTDFNFVPSADSATGNPGANDVAPGRRPRSSMAPTLLLKNGRPVAAYGSPGGATIINSVLNMTLNLVDHGMTPGQAIAAPRVSVTSAAGKVACEGGEDFMQPRLSIAVQDRLRALGHVGLGEAGTDGCQGRIGSVQAVVVDLTSGAQYGAADPRREGTVIRVGPGAPLAP

SEQ ID NO: 58222 - DNA, 1782 bp, Anabaena variabilis ATCC 29413
  CDS (1)..(1782): transl_table=11
atgcctattcttgctaagtccaagctggttgtatttacagtcttttctctgggggttctttgctacaaccaaatagcctcagccactattaccttacctctacgcagtaaaaaaggtatggtagtatctgcccatcctttggcaagtgagactggtgtggcaatgttacgcaaaggtggtaatgcagtcgatgcagcagtagccacaacctttgccatttctgttgttgagcctttttctgccggaattggtggcgggggatttttgctgatgcgttcccagaaaacaggagaaatcaaagcgttagattttcgggaacgcgcacccctcaaagccacgagaaagatgtatttggatgatgcagggaaggtacgcccaaatgcaagtatcaacggttatttggcggtagctacaccaggaacgatcgccgggatgtatgaagtgcatcgtcgttatggtaaattaccctggtatgaggtggtaaaacctgcgatcgctctagctaaggatggtttcgttcttgctcaaaaaccaacttggcgatcaatccaagtttatggaacccgcaaacaagcaattctcagcaaccaagcagcacgggaaatttttactcgcaacggcgaattttatcagcctggagaaaggttggtacagcgcgatttggcacgtactttagcagagatcgcccaaaatcctcaaagcttttacactggtgatattgcccgtgcgatcgcggctgatatggcgaaaaatggcggtttagttaccttagcagacctgaaggcctacaaacccatctggcgtaatcctgtctgtggcaatttccgtcaagctaaaatctgctcaatgccaccaccttcatcggggggtgtgttgctattgcagatgttaaatattattggtgacacagatttaaaatcttggggttggcatcatcccaaggctctgcatttattcacagaagcaatgaaaattgcctacagcgatcgctcacaatatttaggcgaccccgattttgtcaaaattcctctacaagcgctgcttagtcctgcctacggcaaaaagcgccgtgcagaaattgatttacacagagccataccctcaacccaagtcaaacccatcgccccacaaattttacaacggttcggaaaagccgagattccccaaagaatatatgcaaatcgctatgaatctcccgaaaccagccatataagtgtcgtcgataaagaacgtaatgcagtcagcctcacttttacagttaattatggttttggttctggagtggtggcatcggggactggtattttgctcaacgatgaaatggacgattttgctgctgcgccaggagttcccaatgtattcgggttagtaggaagcgaagccaatgcgatcgcaccccgcaaaactcccttatcgagtatgacaccgactatcatcaccgagaacgaacgcctccgcatggtagtaggtgcgcctggtggtagcaccatcatcactcaagttttgcaaattattctcaatgttttagaatacgatatggatgttggtgcagccgtatctgtcccacgcatacatcaccagtggctacccgatgagttacgagtagaaacttggggattagatgcgcttaccctacaagacttacgccgacgcggacataacatcaaagaaactaatccttggggcaatattaatgcgatcgttgtcaccaaagaaggcgacttagaaggcgcagccgacccacgcggtgaaggttctcctatagcaaatgaccgtttgtag

SEQ ID NO: 58223 - protein, 593 aa, Anabaena variabilis ATCC 29413
MPILAKSKLVVFTVFSLGVLCYNQIASATITLPLRSKKGMVVSAHPLASETGVAMLRKGGNAVDAAVATTFAISVVEPFSAGIGGGGFLLMRSQKTGEIKALDFRERAPLKATRKMYLDDAGKVRPNASINGYLAVATPGTIAGMYEVHRRYGKLPWYEVVKPAIALAKDGFVLAQKPTWRSIQVYGTRKQAILSNQAAREIFTRNGEFYQPGERLVQRDLARTLAEIAQNPQSFYTGDIARAIAADMAKNGGLVTLADLKAYKPIWRNPVCGNFRQAKICSMPPPSSGGVLLLQMLNIIGDTDLKSWGWHHPKALHLFTEAMKIAYSDRSQYLGDPDFVKIPLQALLSPAYGKKRRAEIDLHRAIPSTQVKPIAPQILQRFGKAEIPQRIYANRYESPETSHISVVDKERNAVSLTFTVNYGFGSGVVASGTGILLNDEMDDFAAAPGVPNVFGLVGSEANAIAPRKTPLSSMTPTIITENERLRMVVGAPGGSTIITQVLQIILNVLEYDMDVGAAVSVPRIHHQWLPDELRVETWGLDALTLQDLRRRGHNIKETNPWGNINAIVVTKEGDLEGAADPRGEGSPIANDRL

SEQ ID NO: 58224 - DNA, 1833 bp, Pseudomonas fluorescens PfO-1
  CDS (1)..(1833): transl_table=11
gtgcttccagccctttccctgaaccgctttcgtctgcccgccctgacactgatcgtcagcgccattgcccttacggcctgcaacgcaccgccctcctcgaccctgccagtggcaccggaagccgcctccggctaccgcaccggcctgcaagccagccacgccgaaaaacacatggccgccgcagccaatccgctggccgccgaagccggtcgcgaaatgttgcgtcagggtggttccgccatcgatgccgccatcgcgatgcaagccgtgttgaccctggtcgaaccgcagtcctcggggatcggtggtggcgcgatgatcgtgctgtgggatggcaaacaggtgcgcacctacgacggtcgcgaaaccgcaccggccggcgcgaccgagaagctgtttctacaggcagacggcaaaccgatgccgttcccgcaggcgcagatcggcggacgctccgtcggcacgccgggcgtgatgcgagcgctggaactggcgcacaaaaagcacggccgcttgccgtgggccaagctgttcgaaccggcgatcaaactcgccgagcagggctttgcaatctctccgcgcctgcattcactgctggaatccgatccggagatacgccgctcgccagacatggccaagtactttctgaacagcgacggcagcgtcaaagccgtcggcactcgcttgcagaacccggcgctggccgccgtgctcaagcgcatcgccaacgaaggcgcagacactctgtacaaaggcccgatcgccgaagagatcgtggacaaggttcagggccacgccaaccccggcagcctgtcgctgaccgaccttcagcactatcaggccaaggaacgcgcgcccctgtgcaccgactacaagcgctggcaggtgtgcggaatgccgccaccctcatcgggcgggattgcggtggcgcagattctcggcaccttacaggcgctggaaacccgcgatccgcgtcaggccctgacgccgctcaagcctgtgaagaccaataagcccgccggcatcgaacctgcaccgcaagccgtgcacctgatcgccgaagccgagcgtctggcctacgccgaccgcgcgcaatacgtagccgataccgacttcgtgccggtaccggtcaaaggcttggtcgatccgggttacctggccagtcgcgccagcctgatcagcgaacgcagcatgggcagcgccaaacccggtacaccgccgggcatacaggttgcctatgcgccggatcgctcgccactgcgcatttccacctcacaagtggttgccgtggatgacttcggtggcgccgtgtcgatgacgaccaccatcgaagcagcgttcggctcgcacctgatggttcagggcttcttgctcaacaatcagatgaccgatttctcgttcctccccgaagagaacggccagaaagtcgccaaccgcgtggaacccggcaaacgcccgcgctcatcgatggcgccgaccctgatcttcgaccgcaacagcggcgagttcgtcgccaccgtcggctctccgggcggctcgcagatcatcgagtacgtggccaaaaccacggtcggcctgctcgactggaacctcgacccgcaaagcgccatcagcctgcccaacttcggcagccgcaacggccccactgaactcgaacagggccagttcagcccgacgctgatccaggcactcaaggacaagggccacaccgtcagcgaaatcgacatgaccagcggcacccaggccatcgtgcgggtcaaggatgctgcggggaaggcaacgctgtcaggtggggcagatcctcggcgcgaaggagcagcgttgggggattga

SEQ ID NO: 58225 - protein, 610 aa, Pseudomonas fluorescens PfO-1
MLPALSLNRFRLPALTLIVSAIALTACNAPPSSTLPVAPEAASGYRTGLQASHAEKHMAAAANPLAAEAGREMLRQGGSAIDAAIAMQAVLTLVEPQSSGIGGGAMIVLWDGKQVRTYDGRETAPAGATEKLFLQADGKPMPFPQAQIGGRSVGTPGVMRALELAHKKHGRLPWAKLFEPAIKLAEQGFAISPRLHSLLESDPEIRRSPDMAKYFLNSDGSVKAVGTRLQNPALAAVLKRIANEGADTLYKGPIAEEIVDKVQGHANPGSLSLTDLQHYQAKERAPLCTDYKRWQVCGMPPPSSGGIAVAQILGTLQALETRDPRQALTPLKPVKTNKPAGIEPAPQAVHLIAEAERLAYADRAQYVADTDFVPVPVKGLVDPGYLASRASLISERSMGSAKPGTPPGIQVAYAPDRSPLRISTSQVVAVDDFGGAVSMTTTIEAAFGSHLMVQGFLLNNQMTDFSFLPEENGQKVANRVEPGKRPRSSMAPTLIFDRNSGEFVATVGSPGGSQIIEYVAKTTVGLLDWNLDPQSAISLPNFGSRNGPTELEQGQFSPTLIQALKDKGHTVSEIDMTSGTQAIVRVKDAAGKATLSGGADPRREGAALGD

SEQ ID NO: 58226 - DNA, 1752 bp, Burkholderia sp. 383
  CDS (1)..(1752): transl_table=11
atgaggcggctcgtagtactcaccctgttgtcggccatgagcgtgtgcgcgttcgccgcgtcggaccccgcggttgaagcgaagaacggcatggtcgtttcgtcgcagcatttcgcgtcgcagatcggcgtcgacatcctgaaggaaggcggcaacgcggtggacgcggcggtggcggtcggctacgcgcaggccgtgaccaacccgtgctgcggcaacatcggcggcggcggtttcatgaccgtccacctggccgacggccgcgaccgcttcatcaatttccgcgaaaccgcaccggctgcggcttccgcgaacatgtatctcgatgcgaagggcaacgtcattcccgacgacagcctgtatggctatcgtgcggtcggcgtgccgggcacggtcgccggcctcgatcttgcgcagcgcaagtacggcaagctgacgcgcaagcaggtcatggcgccggcgatccgcctcgcgcgcgacggcttcgtgctgacgcgtggcgatacggacatcctcgacacgacgatcgaccgcttcaagaaggacccggatgcggcccgcatcttcctgcggccggacggcacgccgctgcagccgggcgaccgcctggtgcagaaggacctggcccgcacgctcgagcgcatcgcggagcagggtcccgacgcgttctatcacggcgagatcccgaagatcgtcgaggcggcggccaagaagggcggcggcctgatcacggcggccgacttcgcgtcgtaccgtgcgcaggacatcgcgccgctgacgtgttcgtatcgcggctacgagttcgtgtcggctccgccgccgagctcgggtggcgtgacgatgtgcgagacgctgaacatcctcgaagggtatgacatgcgcaagcttggctaccattcggccgcggcggttcactacatgaccgaagcgatgcgccatgcatacgaagatcgcaacacgctgctcggtgacccgaacttcatcgacaacccggtcgcgaagctgacgagcaaggaatacgcggcgcagatccgcaagagcatccattcggatacggcaacgccgtcggtcgacgtgcagccgggcgtcggcgtgcacgagaagccggagacgacccactattcgatcatcgacaaggacggcaacgcggtgtcgacgacctacacggtcaacggccgcttcggcgccgtggtcatcgcgccgggcacgggcttcttcctgaacgacgagatggacgacttcaccgtgaaggtcggcgcgcagaacctgttcggcctcgtgcagggcacgcgcaactcgatcgcgccgggcaagcgtccgctgtcgtcgatggcgccgaccatcgtgaagaaggacggcaaggtgttcatggtggtcggctcgccgggtggctcgcgcatcatcacgatcacgctgcagacggtgctgaacgtgatcgactacgggatgacgccgcaggacgcggtcaccgcgccgcgcatccaccaccagtggctgcctgacgaggtctattacgaaacctacggcctgtcgcccgacacgctcgcgatcctgcgcaacatgggctacaagatggtcgagcagacgccgtggggcgccgccgagctgatcatggtcggcctgccgggcaccgaagcggcgagccgccagagttccgggaacgattcgtccgtgtccggcaacgtgcgggtcggcttcatctacggctacaacgatccgcgccgtccggccggctcggcaatcggttactga

SEQ ID NO: 58227 - protein, 583 aa, Burkholderia sp. 383
MRRLVVLTLLSAMSVCAFAASDPAVEAKNGMVVSSQHFASQIGVDILKEGGNAVDAAVAVGYAQAVTNPCCGNIGGGGFMTVHLADGRDRFINFRETAPAAASANMYLDAKGNVIPDDSLYGYRAVGVPGTVAGLDLAQRKYGKLTRKQVMAPAIRLARDGFVLTRGDTDILDTTIDRFKKDPDAARIFLRPDGTPLQPGDRLVQKDLARTLERIAEQGPDAFYHGEIPKIVEAAAKKGGGLITAADFASYRAQDIAPLTCSYRGYEFVSAPPPSSGGVTMCETLNILEGYDMRKLGYHSAAAVHYMTEAMRHAYEDRNTLLGDPNFIDNPVAKLTSKEYAAQIRKSIHSDTATPSVDVQPGVGVHEKPETTHYSIIDKDGNAVSTTYTVNGRFGAVVIAPGTGFFLNDEMDDFTVKVGAQNLFGLVQGTRNSIAPGKRPLSSMAPTIVKKDGKVFMVVGSPGGSRIITITLQTVLNVIDYGMTPQDAVTAPRIHHQWLPDEVYYETYGLSPDTLAILRNMGYKMVEQTPWGAAELIMVGLPGTEAASRQSSGNDSSVSGNVRVGFIYGYNDPRRPAGSAIGY

SEQ ID NO: 58228 - DNA, 1722 bp, Burkholderia sp. 383
  CDS (1)..(1722): transl_table=11
atgactacgctgaatcgcttcaaatcatccgctgtcgtgctcgcgacagtggccggcatcggcttcctgccgaacgcgcctgtctatgcgaaggggccgcagcccgcagtcctgacgagctcggcagtcgcggtggccgacaagtacagcgcagatgccgcggagcggatcttcaaggaaggcggcaacgcgatcgacgcggccgtcgcgatcgcattcacgctcgccgtcacgtatccggaagccggcaacatcggcggtggcggcttcatgacgatctacaaggacggcaagccgtacttcatcgactaccgcgagcgcgcgccgctcgccgcgacgaaggacatgtatctcgacaaggacggcaacgtcgtcaagggcatgagcctgtacggcccgcgcgcggtcggcgtgccgggcacggtcgcgggcatgtgggaagcgcagaagcgtttcggcaagctgaagtggaagcaggtgctcgcgccggcgatccactacgcgcgcgatggcttcgtcgtcgacgaacagctcgcgcagcgcggcgtcgacgcatcgaaggagttcggcggcaagaccaacttcgacaagtatttctccgggctgaaggccggcgtgaacttcaagcagccggatctcgccgacgtgctcacgcgcatcgcgaacgacggcgcggaagggttctacaagggcaagacggccgagctgatcgccgcgtcgatgaagaccggcgacggcaacgggctgatcaccaccgaggatctcgcgcagtaccgcgcggtgtggcgccagccggtgcaggcgaagtggaacggctatgacgtgatcaccgcgccgcctccgagctcgggcggcatcggcctcgtgcagttgctgaagatgaaggccgacctcaagcaggacttcgagggcgtgaagctcaactcgccgcagtacatccacctcgtcgcggaaatcgagaagcgcgtgttcgccgatcgtgcgcagtatctcggcgatcccgatttctacaaggtgccgatcgcgcagctgaccgacgacgcctacatcgcgaagcgggcaggcgaagtcaacccgaaggagccgtcggatacgaagagcgtgcagccgggcctcggcacgacgatgccggagaaggctgaaacgacgcacttctcggtggtcgacaagtggggcaacgcagtgtcgaacacgtacacgatcaacggctatttcggctcgggcgtgatcgcggacggcacgggcatcgtgctgaacgacgagatggacgacttctctgcgaagccgggcgtcgcgaacatgttcggcgtggtcggcagcgacgcgaacgcgatcgaaccgaagaagcgcccgctgtcgtcgatgtcgccgacgatcatgaccagggacggcaaggtgtccctcgtgatcggcacgccgggcggctcgcgcatcttcacgtcgatcttccaggtgatcaacaacatctacgacttcaagatgccgttgaaggaggcggttggcgcgatgcgcttccatcaccagctgctgccgccgaacacgatcttctgggagccgtaccacccgatcgaaggcgaactcgcgaagcagatcgaggcgcgcggctacacgctgaaggggcaggatttcagcggcgacatccaggtgatcaagatcgacggcaagacgccggaggcgatggccgacccgcgcgggcgtggcgtgacgcggatcattcactga

SEQ ID NO: 58229 - protein, 573 aa, Burkholderia sp. 383
MTTLNRFKSSAVVLATVAGIGFLPNAPVYAKGPQPAVLTSSAVAVADKYSADAAERIFKEGGNAIDAAVAIAFTLAVTYPEAGNIGGGGFMTIYKDGKPYFIDYRERAPLAATKDMYLDKDGNVVKGMSLYGPRAVGVPGTVAGMWEAQKRFGKLKWKQVLAPAIHYARDGFVVDEQLAQRGVDASKEFGGKTNFDKYFSGLKAGVNFKQPDLADVLTRIANDGAEGFYKGKTAELIAASMKTGDGNGLITTEDLAQYRAVWRQPVQAKWNGYDVITAPPPSSGGIGLVQLLKMKADLKQDFEGVKLNSPQYIHLVAEIEKRVFADRAQYLGDPDFYKVPIAQLTDDAYIAKRAGEVNPKEPSDTKSVQPGLGTTMPEKAETTHFSVVDKWGNAVSNTYTINGYFGSGVIADGTGIVLNDEMDDFSAKPGVANMFGVVGSDANAIEPKKRPLSSMSPTIMTRDGKVSLVIGTPGGSRIFTSIFQVINNIYDFKMPLKEAVGAMRFHHQLLPPNTIFWEPYHPIEGELAKQIEARGYTLKGQDFSGDIQVIKIDGKTPEAMADPRGRGVTRIIH

SEQ ID NO: 58230 - DNA, 1773 bp, Synechococcus sp. CC9605
  CDS (1)..(1773): transl_table=11
atgcgtcgcaatttcctcctgctcagaggcttactgctggcgctgagccttcggaccactctccccgcagcggcagccccgatcagccgcgacgatccggaatccagcgacaccagcagcagaggcatctccaccgcccgcggatccgccgtggtggtcaccgccaatcccctcgccagcaaggcggcgctggctgcgttgaagaacggcggcaacgccatcgatgctctggtcacagcccaggcggtgctggcggtggtggaaccccagagctccggcctggggggtggtggttttctgctccactgggaggccaagcaacgccagcttgcagtgctggatggccgtgaagtggcccccgaacgcagccgccccgccgatctgcttgatgccgcggggaaccccctcccttggcggcaggccaccagcaaagccaacgccatcggcattcccggcaccgtggccctgctctgggaggcccatcaaaaccacggccagctgccctgggcacaaatcctgcaaccttcgatccgcctggccagcgatggctttctgccgagcccgcgactgctgcgatccattctcctggcccagcgcttcggcgtggcccacagccctgatttccaagcgctttacctgcccggcggccagccaccagcagcggatcaacgcttccgcaacccagccctggcacgcaccctgaggctgctggccaggggaggggggccagccttttatcaagggcctctggcgcagcagatcttgggcgggatcaacgccctgcaggcaagcgagccgaatttccgcggctggagctccgctgatctgagcagctatgccgtggtccggcgcacccccctctgcagccagcagctgcagcaccggatctgcacggtcccgccccccagcagcggtggcttggcgctgctgcaaactctggcgctgctgaaccagaccacccacctggccagctccagtgcaggtgagccgcaggtatggcggcagctggcccgcgcccaggcctgggccgatgccgaccggctctactgggtgcacgaccccatcgatggagcagtgcccagcgcagccctgctggatccggcctacttagacagccgggccagagccatgcagcgcgccaacggcgaaaggccagcgccggggttgcccccaggcatcgatcgctatccctacggcaggccggatcaggacatcgaacagggcaccagccaaatcaccatcgtggatgccagcggcaacatcgcctcctacacctcttcagtggagacgatcttcgggagtcggcacctgataggaggcatggtgatgaacaatcagctcaccgatttcgccttcaaaccaagccttggcggcaaaccggtcgccaaccgccgactgcctggacggcggccgatgtcgtcgatggcgccgacgctggtgttccgcaagggcgagccggtgctagccctcggcagccccggcggccgcagcattccccatctgctcagccgggtgctgctggcatccctggtctggaacgatccaccggcgcgggcggttggccttccccatctctcacgccggggcacaacactggtgctggaaagcaatccgccgctgccctggccgtttccgctgcagcagctcaaaagcgaagcaagcccacggcttcagagcatcggcagcggcaccgctctgattcaaaaaatcgatgctggctggcagggggccgctgatccgcgccgcgaaggaacggccctggtcctgccctga

SEQ ID NO: 58231 - protein, 590 aa, Synechococcus sp. CC9605
MRRNFLLLRGLLLALSLRTTLPAAAAPISRDDPESSDTSSRGISTARGSAVVVTANPLASKAALAALKNGGNAIDALVTAQAVLAVVEPQSSGLGGGGFLLHWEAKQRQLAVLDGREVAPERSRPADLLDAAGNPLPWRQATSKANAIGIPGTVALLWEAHQNHGQLPWAQILQPSIRLASDGFLPSPRLLRSILLAQRFGVAHSPDFQALYLPGGQPPAADQRFRNPALARTLRLLARGGGPAFYQGPLAQQILGGINALQASEPNFRGWSSADLSSYAVVRRTPLCSQQLQHRICTVPPPSSGGLALLQTLALLNQTTHLASSSAGEPQVWRQLARAQAWADADRLYWVHDPIDGAVPSAALLDPAYLDSRARAMQRANGERPAPGLPPGIDRYPYGRPDQDIEQGTSQITIVDASGNIASYTSSVETIFGSRHLIGGMVMNNQLTDFAFKPSLGGKPVANRRLPGRRPMSSMAPTLVFRKGEPVLALGSPGGRSIPHLLSRVLLASLVWNDPPARAVGLPHLSRRGTTLVLESNPPLPWPFPLQQLKSEASPRLQSIGSGTALIQKIDAGWQGAADPRREGTALVLP

SEQ ID NO: 58232 - DNA, 1806 bp, Francisella tularensis subsp. holarctica
  CDS (1)..(1806): transl_table=11
atgcgtcgttttttgttatcttatacttattctgtttttaaaaatacactgaggttattagtgaaaaaattatttgtaaacttaatgtcattgttaatactgctaccaagtttaactctaattgctgcaccagtccctacaggttatggttttattcctattcaagaagagatgcaaattgctcaaccttttactgcaacacatggtatggtttcttctcaagaagctctggcaagtaaagtaggcttagatatcctaaagcaaggtggtaatgctgtagatgcagctgtagctgttggttttgctttagctgtcacgctaccaagagctggtaatctcgctggtggtggatttatgattatacatctacaagatggcaataagaatatagctataaactatcgtgaaaaagctccagcgaaagcatctcgtgatatgtttctaaatgataaaggtgatattgattatgctaaagtttctggttcatatagcgcatctggtgttcctggtactgttgcatgcttaatcgatgcacaacaaaaatatggcaaattaaaactatcacaagttattgaacctgctatcaaacttgctgaagatggtattcctgtaagctatgatcttcaccagtcacttgtaactgcaaaaccatggctacaaaaatctccagatgcgatgaaaatcttttataaaaaagatggatcagcctatgaggtaggagaaatcctaaaacagcctgaacttgctaatagtttaaagctaattgcaaaacaaggcaaaaaagctttctatgaaggagaaatagctcataagatagccgatagtatggctaaaaatggtggtttaataacattgcaagatttgaaaaattataatattgaggagatgaagccagttaagggaacttatagaggttatactatatattctatgccgccgccaagttctggtggtgtgattctaatagaattattaaatattctggagaattttccattgtctgactatggtaacaatagtgctaagactattaatcttatgagtaatgcgatgagctatgcttataatgataggaattctgacttaggagatccagattttgtcaaaatggatttagctaagtttttatctaagaagtatgcaaaacagattgctcaaaagataactacagataagcatatccctagtaaagatattagtactatagatccggatgatcatgaaaaattacaaactacacattttagtattattgataaagatggtaatatggtatcaaatacttataccttaaattattcttatggaagtggtattgtagtaccaggaacgggaatttttttaaataacgaaatggatgatttcgctgctaaagttggcgaggcaaatgtctttggtttggttcaaggtgaagtaaatactgtcgcaccgaataaacgaccattaagttcaatgactccaacgatagtattagataatgatggtaaaccatttttagctacaggttctcctggaggaagtcgtattattacaacaacgttacaagtgattctaaatatcattgattttaatatgaatcttcaagcagcagttaataatcctcgtatacatagtcaattatggccagaagagattggtgtagagcagggtatatctgtagatacaattaatctacttaagaagatgggtaacactgtcacaccttatgctgctatgggagctgctgaatctgtaatgtcagatggacaatatgtctatggagctgcagatccacgcagagctagcgcattagctataggttattaa

SEQ ID NO: 58233 - protein, 601 aa, Francisella tularensis subsp. holarctica
MRRFLLSYTYSVFKNTLRLLVKKLFVNLMSLLILLPSLTLIAAPVPTGYGFIPIQEEMQIAQPFTATHGMVSSQEALASKVGLDILKQGGNAVDAAVAVGFALAVTLPRAGNLAGGGFMIIHLQDGNKNIAINYREKAPAKASRDMFLNDKGDIDYAKVSGSYSASGVPGTVACLIDAQQKYGKLKLSQVIEPAIKLAEDGIPVSYDLHQSLVTAKPWLQKSPDAMKIFYKKDGSAYEVGEILKQPELANSLKLIAKQGKKAFYEGEIAHKIADSMAKNGGLITLQDLKNYNIEEMKPVKGTYRGYTIYSMPPPSSGGVILIELLNILENFPLSDYGNNSAKTINLMSNAMSYAYNDRNSDLGDPDFVKMDLAKFLSKKYAKQIAQKITTDKHIPSKDISTIDPDDHEKLQTTHFSIIDKDGNMVSNTYTLNYSYGSGIVVPGTGIFLNNEMDDFAAKVGEANVFGLVQGEVNTVAPNKRPLSSMTPTIVLDNDGKPFLATGSPGGSRIITTTLQVILNIIDFNMNLQAAVNNPRIHSQLWPEEIGVEQGISVDTINLLKKMGNTVTPYAAMGAAESVMSDGQYVYGAADPRRASALAIGY

SEQ ID NO: 58234 - DNA, 1755 bp, Burkholderia xenovorans LB400
  CDS (1)..(1755): transl_table=11
atgtctgtcccgacacacggcgcgcttcgcgcgcctttcacttcgcttcgtttcgcccggatcctgacggtgtcggcaatgcttgccgcgttcaccggcggcgcgctcgcgcccacggccgcgctcgcgaaaacgccgctgcccaaggccgtattcgacgcgtcggcggtggccgtgccggaccgctacagcgcggacacggcgcagcagattttcgcggccggcggcaacgcagtcgatgccgcggtcgcgatcgccttcacgctggccgtgacctgtccggacgcgggcaacctcggcggtggcgggttcatgaccatgttcgtggacggcaaaccgtacttcctcgactatcgcgagcgcgcgccgcagcaggcgacccgcgacatgtacctcgacgacaagggcaatctgctgccgggcatgagcgccgtcggccatcgcgcggtagccgtgccgggaacggtggagggcatgtgggaggcgcagcggcgtttcggcaagctgaagtggaagcaggtgctggcgcccgcgatccgctatgcgaccgagggcttccaggtcgagccgtggttgcagcagcgccgcgacgcagcggcgaagagcttcgccggcaagaccaatttcgacgcctatttttcgggcctgaaggcgggcgtgacataccgccagccggaactcgcacagacgctgtctcgtattgcgagcgacggcgggcgcgaattctacgagggccgcaccgcggacctgatcgcccagcagatgtacggccacggcctcgtcacgaagcaggacctgatccagtacaaggccgtgtggcgccagccgctcaccgccgactggaacggctatcgggtcgtcaccgcgccgccgccgagttcgggcggcatcgggctgatccagatgctgaagatgaaagcggatctgaagcaggcgttcgacggactcgacctcaattccgtgccgtatatccatctgatcgcccagatcgaggaccgcgtgttcggtgaccggcagcaatacctggccgatccggattcgttcaaggtgccggtcgacaaactgatcgacgacgcctacctcgcgcaacgcgccgacgaagtcaaacccgacgaagtaccgggcgcggcgccggttacgccgggcctcggcgacgccgcaccggagaaagcgcaaaccacccatttttcggtggtcgacaagtggggtaatgccgtgtcgaacacgtacacgttaaatggagacttcggttcaggcgtggtggtggacggcggcggtttcctgttgaacgatgcgatggacgacttcgtcaccaaaccggccggtgcgagcccgtcgggtgcgggcagcgccgaagtcaacacggtggcgcccggccgccgcccgctatcctcgatgacgccgaccattctgttgaaggacgacaaggtgtcgctcgtgatcggcacgccaggcggctcgcgcatcctgacgtcgattttccaggtgatgaccgacctgtacgacttcaatctgccgcccgccgacgcgctcgccgcaatgcgctttcaccatcagttgttgccgcagaagacgatctatttcgagccgtatcgtccgatcacgggggaactggccgagcagttgcaagcgaagggctacacgctcgaagggcagtcgttcaacggtgacgtgcagatgatccgcatcgagggcgcgacgcccgaaccggcggcggaccctcgcggcgtgggcgtggcgcgcgtgatgcattga

SEQ ID NO: 58235 - protein, 584 aa, Burkholderia xenovorans LB400
MSVPTHGALRAPFTSLRFARILTVSAMLAAFTGGALAPTAALAKTPLPKAVFDASAVAVPDRYSADTAQQIFAAGGNAVDAAVAIAFTLAVTCPDAGNLGGGGFMTMFVDGKPYFLDYRERAPQQATRDMYLDDKGNLLPGMSAVGHRAVAVPGTVEGMWEAQRRFGKLKWKQVLAPAIRYATEGFQVEPWLQQRRDAAAKSFAGKTNFDAYFSGLKAGVTYRQPELAQTLSRIASDGGREFYEGRTADLIAQQMYGHGLVTKQDLIQYKAVWRQPLTADWNGYRVVTAPPPSSGGIGLIQMLKMKADLKQAFDGLDLNSVPYIHLIAQIEDRVFGDRQQYLADPDSFKVPVDKLIDDAYLAQRADEVKPDEVPGAAPVTPGLGDAAPEKAQTTHFSVVDKWGNAVSNTYTLNGDFGSGVVVDGGGFLLNDAMDDFVTKPAGASPSGAGSAEVNTVAPGRRPLSSMTPTILLKDDKVSLVIGTPGGSRILTSIFQVMTDLYDFNLPPADALAAMRFHHQLLPQKTIYFEPYRPITGELAEQLQAKGYTLEGQSFNGDVQMIRIEGATPEPAADPRGVGVARVMH

SEQ ID NO: 58236 - DNA, 1962 bp, Ralstonia metallidurans CH34
  CDS (1)..(1962): transl_table=11
atggctgacacactcatagcgacttcaacaggatcttccgcgcaatctgtcgcgcagcgtgccgcgaaccggcactggcgcggcgcgctggccggggcgatggtttccctgctggccgcgtcgctatcaggctgcggcacggtggacaaggaggcggggacgtccgccgcatcgaccgacccggccacggggacggtgccggcgtctaccggggccgtggcgtcagccgggttgccgcccgccgccgaagttgcctcgggctaccgcccggggatgaccacgacctatgcgcagaagcatatggccgcggccgcgaatccactggccacggaggcaggtcgcgagatgctgcgtgctggcgggtcggccatcgatgccgccgtggcgatgcaggcagtgctgacgctggtcgagccacaggcttccgggatcggtggcggcgccttcatcatgtactgggacggcaagcgcgtgcagacctatgacggccgcgaaacggcacccgctggcgccaccgagaacctgttcatgcgtgccgatggcaagccgatggagttctcggcggggcagatcggtgggcgctcggtcggcgtgccgggtgtattgcgcgcgctggagctcgcgcatcgccagcacggccgcttgccgtgggcacgcctgttcgagccagccatcgcgctggccgacaagggctttccgatctcgcagcgcctctatacgcaggttgccgcagacaagtttctgaccggctcccccgagatgaaggcgtatttcctcgacgatcagggcaagccgaagccggtcggcacgctggtcaggaatccgcagctcgcgcagacattgagggagatcgccagacacgggccgaacgtgttctacaacggccccatcgcgcatgacatcgtggccaaggtcaacgctcatgcgaatcctggcagcctgtccgtggccgatctgaaggggtacaaggccaaggagcgcccgccggtctgcacgaactacaaggcctggaaggtctgcgggatgccgccgccttcgtcgggtggcatcgctatcgcgcagattctcggcaacctcgaagcactcgaaaagcgcgatccgcgctacgcgctggcaaagctcaagccggcgcaggtcaatacgccggcggggttcgaggccaatccgctggcggtgcacgccatctcggaggccgaccgtctggcctacgcggaccgtgggctctacgtggccgacgccgatttcgtgcctgtagacgtgggcgcgctcgtgaatccgcaatacctggccgagcgtgccgaactgattggcgagaagagtatgggcaaggccgaaccgggcacgccgcccggggtcaacgttgcctttgcgcctgaccgctcgccaccgcgcatttccacgtcgcaggtggcggcggtggatgaccgtggtggcgcgttgtcgatgaccacgacggtcgagtcgtacttcggctcgcacatcatggtgcgcggcttcatgctgaacaaccagctgaccgacttctcgttcaacccgaccgagaacggcaagcctgtggccaatcgggtgcaggctggcaagcggccgcgctcgtcgatggcgccgacgctggtgtttgaccgcaagagtggcaggctggtggcggcgcttggctctccgggcggttcgcagatcatcgagtatgtctcgaagacgctggtcggcctgctcgactggaacatggacgtgcagcaggccgtgagcatggcgaacttcggtagccgtaacggcccgacggaagtcgagcgcgggctggtgacgcctcaactggtgcaggcgctcaaggatcagggccatcaggtggccgagatcgagatgaccagtggcacgcaggcgatcatgcgcaaggcgggcccgaatggtcggccagtctgggctggcggcgctgatccacggcgtgagggcgtggcgctgggcgattga

SEQ ID NO: 58237 - protein, 653 aa, Ralstonia metallidurans CH34
MADTLIATSTGSSAQSVAQRAANRHWRGALAGAMVSLLAASLSGCGTVDKEAGTSAASTDPATGTVPASTGAVASAGLPPAAEVASGYRPGMTTTYAQKHMAAAANPLATEAGREMLRAGGSAIDAAVAMQAVLTLVEPQASGIGGGAFIMYWDGKRVQTYDGRETAPAGATENLFMRADGKPMEFSAGQIGGRSVGVPGVLRALELAHRQHGRLPWARLFEPAIALADKGFPISQRLYTQVAADKFLTGSPEMKAYFLDDQGKPKPVGTLVRNPQLAQTLREIARHGPNVFYNGPIAHDIVAKVNAHANPGSLSVADLKGYKAKERPPVCTNYKAWKVCGMPPPSSGGIAIAQILGNLEALEKRDPRYALAKLKPAQVNTPAGFEANPLAVHAISEADRLAYADRGLYVADADFVPVDVGALVNPQYLAERAELIGEKSMGKAEPGTPPGVNVAFAPDRSPPRISTSQVAAVDDRGGALSMTTTVESYFGSHIMVRGFMLNNQLTDFSFNPTENGKPVANRVQAGKRPRSSMAPTLVFDRKSGRLVAALGSPGGSQIIEYVSKTLVGLLDWNMDVQQAVSMANFGSRNGPTEVERGLVTPQLVQALKDQGHQVAEIEMTSGTQAIMRKAGPNGRPVWAGGADPRREGVALGD

SEQ ID NO: 58238 - DNA, 1752 bp, Acidobacteria bacterium Ellin345
  CDS (1)..(1752): transl_table=11
atgataatgacccgcttgaaagccgcattttccctgacgttcgccgttgttctttcgaccactccgctgatggcggagaccatggtcaaccccgagcacgccaagcacgcgatggttgccgcggtgcagatcgatgccagcaaggtcggcgtagagatcatgaagcagggtggcaatgctgtggatgccgcggtcgccaccggtttcgcgctggcggttacgcactcggcggcggggaacattggtggcggtgggttcatgctcatccgtatggcgaatggcgagagccactttattgattatcgcgagaaggcgccggccaaggccacgcacgatatgtatctcgatgcgcaggggaacgtgttgcccgatgccagccttgtcggatacaaggccaacggcgtgccgggatcggtggcgggcatggtgtacgccgaaaaacatttcggcaagctgaccctgcaacaggtaatggcaccggcgatccggctggcacgcgatggcttcgcgctcagcttcgaagatgcgatgggcttccgcgacgagaacctgacgaagttccccgagtcgcggcgtatcttccaacgcgacggtaaattctacgaaccgggcgacgtattcaaacaaccggaattggcgaagacgctggagcgcatcgcggaaaaccctgatgatttctacaagggtgcgatggcgaaggaaatcgcagccgaccaggccaaaggcggtggattgatcaccgcagaggatctcgcagcttacgaagtaaaagatcggcccgtgattcgcggcacctatcgcaattaccaagttctcagcgcgccaccgccgtcatcaggcggaatcgcgctggttgaggcgctcaatattctggaaggctacgatctcggcaagctcggtaatcgctcggcggcggccatgcacctcacgctggaagcctatcggcgtgcgttctacgatcgtgcggaatttctcggcgatcccgatttttcgaagattcctgtcgcgcagttgattgacaagcactacggcgttgcctggcgcaagtcgatcgacgagcagcatgcaacgccgagcaacgaagtgaagcgtccggtgggctttgcgcagcttgaccagtacgcagtgctgcatccgcccgcaacaaacgtgtatgaaccggaagacacgacgcactactccgtggtggacaacgccggcaatgccgttgcggtcacgaccacgctcaacggcggcttcggcaactacgtcacggtctcagggctcggcttcctgctcaataacgagatggacgacttctcttccaagccgggggtgcccaatcaatacggactgattcaaggcgaagccaacgcgatcggcccggggaaacgtccgttgtcagcgatgacgccgaccatcgttctgaaggacggcaagctcttcatggtgctgggatcgccgggcggtccgcgcattattacgaccgtcgccaacattcttatgggcgtggtggactatggcctcaacatccagcagtcggtgaatgcgccgcgctaccacaaccagtggctgcccgatctcgaatatctcgagcctggtttttcgccggacacgcgcgcggcgctggtgaagatggggcatcacatcgcaaaagaggaagaggactggggctattggagtgacggcgaatgcatcctggtggatccgctttcgggcgagcgccagggtgccagcgatggccgcaataacggtcatgcggtaggctactaa

SEQ ID NO: 58239 - protein, 583 aa, Acidobacteria bacterium Ellin345
MIMTRLKAAFSLTFAVVLSTTPLMAETMVNPEHAKHAMVAAVQIDASKVGVEIMKQGGNAVDAAVATGFALAVTHSAAGNIGGGGFMLIRMANGESHFIDYREKAPAKATHDMYLDAQGNVLPDASLVGYKANGVPGSVAGMVYAEKHFGKLTLQQVMAPAIRLARDGFALSFEDAMGFRDENLTKFPESRRIFQRDGKFYEPGDVFKQPELAKTLERIAENPDDFYKGAMAKEIAADQAKGGGLITAEDLAAYEVKDRPVIRGTYRNYQVLSAPPPSSGGIALVEALNILEGYDLGKLGNRSAAAMHLTLEAYRRAFYDRAEFLGDPDFSKIPVAQLIDKHYGVAWRKSIDEQHATPSNEVKRPVGFAQLDQYAVLHPPATNVYEPEDTTHYSVVDNAGNAVAVTTTLNGGFGNYVTVSGLGFLLNNEMDDFSSKPGVPNQYGLIQGEANAIGPGKRPLSAMTPTIVLKDGKLFMVLGSPGGPRIITTVANILMGVVDYGLNIQQSVNAPRYHNQWLPDLEYLEPGFSPDTRAALVKMGHHIAKEEEDWGYWSDGECILVDPLSGERQGASDGRNNGHAVGY

SEQ ID NO: 58240 - DNA, 1548 bp, Rubrobacter xylanophilus DSM 9941
  CDS (1)..(1548): transl_table=11
ttgccggcgatggagacctacggcacgccccacgccttcgccgcggccgccggcaccccgtacgccgctgaggccgccgccgaggtctaccgttccggcgggaacgccgtggacgccgcggtggcggcggccgccgccgtgggggtgacggagcccctgatgagctccatcgggggcgggggctttgcgctggtgcgcaccccgcgcggcgaggtcgaggtcgtggacttcttcgacgtcatgccggggaaggggctgccgccctcggcgttcggggcgggggggaacccgcacaccatcctgctggactacggcgccggggtgagctccatcgtcggggggccttcggtggcggtgccgggctcggtgcggggctgggaggagcttctgcggcggcacgggaggctgggcctcgaggaggtgctggccccggcggtgcggctcgccagggagggcttccgcctgtgcaggaccagcgcactgtggttccgcgtggctcgggaggtgctcgccctcaccgaggagacccgtcagaacttctacaaggacgggcgggtctacgaggagggggaggagatgcgcttccccgagctcgcggacacgctggaggccataggccgggagggggcggacctcttctacgagggctggctggggcagaagatctccgcctacgtccgcgagatgggcggcctcgtgaccgagcgggacctcgccgagtacaggcccgagatccggcgccccctcagcgtcgggtaccgggacggcgaggtccacaccaacgggccgccctccgccgggggggccacgctggcccagatgctcctgatcgtggccggctacgacctcccttcgctcccggaggaggagtacgtccgggtggtggccggggcgatgcgcctcgcgctgctcgaccgggaggagagctacgccgacggcccccgcaacgcggaggtggtcgagaggctcctcggggaggagcacatcgcgtcccagcgcaggaggctcttcggaccccacacgacccacctctcgtgcgccgacgcggagggctacgccgtcgccatcaccgccagcatgggctacggctccgggctggtcgtcccgggcaccggcataccgctcaacaacgtgctcggcgagccggagctcaaccccaaggggttccacgcgctcgccccgggggagcgcccggtctccagcatgagccccaccatcgtctgctccgccgaggagggggtcatcgcgctcggctcgccgggggccaccaggatcccgacggcgatcctccagaccatcctgaacgtcgtggacctggggatgccgctggagggtgcggtgctcgcgccccgcttccacgccgaggacggcctgttcgcctacgaggccggagcgcgggccgccgacctcggcccctacgagcgggtgctcgtctacgacgagccctcgatgtacttcgggggggtaaacgccgtccgccggaccccgcaggggaccttcgaggccgccgcggaccccaggcgctcggggggcgcggcgtatgcctga

SEQ ID NO: 58241 - protein, 515 aa, Rubrobacter xylanophilus DSM 9941
MPAMETYGTPHAFAAAAGTPYAAEAAAEVYRSGGNAVDAAVAAAAAVGVTEPLMSSIGGGGFALVRTPRGEVEVVDFFDVMPGKGLPPSAFGAGGNPHTILLDYGAGVSSIVGGPSVAVPGSVRGWEELLRRHGRLGLEEVLAPAVRLAREGFRLCRTSALWFRVAREVLALTEETRQNFYKDGRVYEEGEEMRFPELADTLEAIGREGADLFYEGWLGQKISAYVREMGGLVTERDLAEYRPEIRRPLSVGYRDGEVHTNGPPSAGGATLAQMLLIVAGYDLPSLPEEEYVRVVAGAMRLALLDREESYADGPRNAEVVERLLGEEHIASQRRRLFGPHTTHLSCADAEGYAVAITASMGYGSGLVVPGTGIPLNNVLGEPELNPKGFHALAPGERPVSSMSPTIVCSAEEGVIALGSPGATRIPTAILQTILNVVDLGMPLEGAVLAPRFHAEDGLFAYEAGARAADLGPYERVLVYDEPSMYFGGVNAVRRTPQGTFEAAADPRRSGGAAYA

SEQ ID NO: 58242 - DNA, 1773 bp, Trichodesmium erythraeum IMS101
  CDS (1)..(1773): transl_table=11
atgcctcagattcgattccctcaaactaaaaaccaaatagtaatattgagttgtgtcgctgttttcttatggctgtttagctgtactcccaactctccaaaatctctacctctagcagaattaaaacggagcaaagaaagtatagtagtttcagctcatcccctagctagtgaagcaggaaagttaatgctagaaaaagggggcaatgcagtagatgcagcggtagctacagcctttgctatttctgtagtagaaccattttccgcaggtattggaggtggaggctttttactattaggaactcctccagaaaattctgagactcaacagtataaaattcgagccctagactttcgggaaagagctcctaaagcagcaactcgaaatatgtaccttaacgaaaagggagaagtagagaaaagagcaagtttagatggacatttagcagtcggagtacctggaaccgtagcaggattgtataatattcacaagtccttaggcaagttaccttggaaagaattgctaaaaccagctattcgttatgctcgtgatgggtttgagctaagggatgactttgttagtaaactagaaaaacgcttagaggtaattaacaaaaatccggcagctagggatatatttactaaaaatggccaagcttatgaaccaggagatttgctgattcaaactgatcaagctcaaaccttagaaaccattgctgaaaatcctcaaagcttttatacaggtaaaattgctcaggcgatcgctactgatatggccaaagcaggaggtctaattactttagaagatttacagaactatacaccaatatggcgtgaacctatttgtggcaagtttagacaagcaaaagtttgtgctatgccaccaccatcttctggaggcgtacatttactacaaatattaaatattgtgggagagactaacttgcaacagtggggtagggaaaatgctgatactattcatttacttactgaagccatgcgggttgcttatgccgatcgctctttgcatttaggggacccagattttctggaagtgccagtcaaggagttgactagcttgagttatgctcaacaacgacgtcaggaaattagtctcacaaaagtcagacgttccactgaagtacaaccagtatcaccagaagttctcaggagtaatattttggagtctcctgatactactcatttaaccgtagtagatcaagagcgaaatgttattagtatgacatatacaattaatggtagttttggtgctggagtggtagctgctggtacaggaatattgttaaataatgaaatggatgattttgccgctgctcctgaagcaccaaatttatacggtttggtcggggatgaagcgaatgctatagctccgagaaaaactcctttgtctagtatgactcctactattgttacagacaatggtcggttaattatggcgactggttctcctgggggtagtacgattattaccacagttttgcaggttatattgaatgtgttagagtataaaatgaatgttgctgaagctgtgtcggctccacgttttcaccatcaatggctgccagataagttaatcttggaaacaggggggtttggcgaggcaactgtgaatgagttgaaacagcgcggacataatgtagtaatgcaacgtggttggggtaatgcaaatgtagttttccaggatgagagtgggatgttggaagcagcagcagatcctcgtggggaaggggaggcaatggggactggccagtag

SEQ ID NO: 58243 - protein, 590 aa, Trichodesmium erythraeum IMS101
MPQIRFPQTKNQIVILSCVAVFLWLFSCTPNSPKSLPLAELKRSKESIVVSAHPLASEAGKLMLEKGGNAVDAAVATAFAISVVEPFSAGIGGGGFLLLGTPPENSETQQYKIRALDFRERAPKAATRNMYLNEKGEVEKRASLDGHLAVGVPGTVAGLYNIHKSLGKLPWKELLKPAIRYARDGFELRDDFVSKLEKRLEVINKNPAARDIFTKNGQAYEPGDLLIQTDQAQTLETIAENPQSFYTGKIAQAIATDMAKAGGLITLEDLQNYTPIWREPICGKFRQAKVCAMPPPSSGGVHLLQILNIVGETNLQQWGRENADTIHLLTEAMRVAYADRSLHLGDPDFLEVPVKELTSLSYAQQRRQEISLTKVRRSTEVQPVSPEVLRSNILESPDTTHLTVVDQERNVISMTYTINGSFGAGVVAAGTGILLNNEMDDFAAAPEAPNLYGLVGDEANAIAPRKTPLSSMTPTIVTDNGRLIMATGSPGGSTIITTVLQVILNVLEYKMNVAEAVSAPRFHHQWLPDKLILETGGFGEATVNELKQRGHNVVMQRGWGNANVVFQDESGMLEAAADPRGEGEAMGTGQ

SEQ ID NO: 58244 - DNA, 1767 bp, Alkalilimnicola ehrlichei MLHE-1
  CDS (1)..(1767): transl_table=11
atgagtgaacccttgccaccacccgccccgatgcgccgctggcgcctccgcctgttaccggcggcgtgtgccctggtcgccctgttgatggcagccaacgccagcggcgacgtccagccctgggtaccggaggagaagcgcagcgcccagaccgagggggccatggcggtgaccgccaacccccacgccacccgggcggcccatgaactgctcgccgccgggggcagcgcggtggatgccgccatcgccgcgcagttggtgcttaccctggtggagccccagtccagcggcatcggtggcggcgccttcctgctccatcacgacgccgggaccggtgagaccctggcctacgacggtcgcgagaccgcgccggcggccgctgacgccgggctcttcctgcaggatggcgagcccatggacttccgggaggcggtcagcggcggcctcgccgtgggtgtccccggcgtggtgcggctgttcgagcaggcccatgcgcggcacggcgcccggccctgggcggagctgttccaaccggccatcgagctggcccgggaagggttcgaggtcagtccccgtctgaacgacatccttcagcgggagtgggccatcctcgacaatgaggccgcccgggcctatttccacaccgacgagggcgagcccctgccggtgggccaacgcctgcgcaacccggcactggccgacaccctgagccggatcgccgaggcgggggcggaggccttttacaccggccccatcgccgaggctatcgtcgacgccgtgcagggggcggcccacaacccgggccggttgaccctggaggatatggccggctaccgggcggaggtgcgggagccggtctgtgcgccctacgccgggcaccgggtctgcagcgccccaccccccgccggcggcttcgtcgtgctgcagatcctggggctgctggaacgggccgaggccgtccacccgccggaggatgaggccgatcgggcgcacctgctggcggaggcctcgcgcctggcctacgcggaccgggcccgtttcgccgccgatccggaccacgagccggtgccggtggccgacctgctggacgccgactacctggacgaacgggctgccctgatcgacccggtccggagcatgggcgaggcggaggccgggttagccctggagccggagcaggccgccatgccccggagaccggcgcgcccctccacctcccacctctccatcgtggatgcccaaggcaatgccgtgtccatgacctcgtcggtggagatgcccttcggctccgggctgttcgtgcgcggctttatcctcaacaatcagttgaccgacttcgccttcgaaccggaggacgggaatggcgacccggtggccaaccgggtggcccccggcaagcgccccatgagcgccatgtcgcccaccctggccttcgaggacgatgccctgcgcctggccgtgggctcgccgggcggcccctggatcatcggctacaccgcccgccacctggcgctggtgctgggggagggggcgcccctggccgaggcggtggcggcacccaactggaacaaccgcaacggccccaccaagctggaggcggtggagggcagcgaggcgctggccggggctctgcgcgagcgcggccacgaggtgtcggtgcgggggatgaccagcggggtgcacgccatcttcgtggacggtgacggggtgcgccacggggccgccgacccgaggcgggagggcaccgccctgggcgtggcgccctga

SEQ ID NO: 58245 - protein, 588 aa, Alkalilimnicola ehrlichei MLHE-1
MSEPLPPPAPMRRWRLRLLPAACALVALLMAANASGDVQPWVPEEKRSAQTEGAMAVTANPHATRAAHELLAAGGSAVDAAIAAQLVLTLVEPQSSGIGGGAFLLHHDAGTGETLAYDGRETAPAAADAGLFLQDGEPMDFREAVSGGLAVGVPGVVRLFEQAHARHGARPWAELFQPAIELAREGFEVSPRLNDILQREWAILDNEAARAYFHTDEGEPLPVGQRLRNPALADTLSRIAEAGAEAFYTGPIAEAIVDAVQGAAHNPGRLTLEDMAGYRAEVREPVCAPYAGHRVCSAPPPAGGFVVLQILGLLERAEAVHPPEDEADRAHLLAEASRLAYADRARFAADPDHEPVPVADLLDADYLDERAALIDPVRSMGEAEAGLALEPEQAAMPRRPARPSTSHLSIVDAQGNAVSMTSSVEMPFGSGLFVRGFILNNQLTDFAFEPEDGNGDPVANRVAPGKRPMSAMSPTLAFEDDALRLAVGSPGGPWIIGYTARHLALVLGEGAPLAEAVAAPNWNNRNGPTKLEAVEGSEALAGALRERGHEVSVRGMTSGVHAIFVDGDGVRHGAADPRREGTALGVAP

SEQ ID NO: 58246 - DNA, 1662 bp, Alkalilimnicola ehrlichei MLHE-1
  CDS (1)..(1662): transl_table=11
atgcgccgggtggccctggttgtcggcctgctcctttgctgggccggcgaggcactggcgacgccgccgccggccgttgcctcggcccatccgcgtgccagtgcggccgccatggaggtgatggcccaggggggtaacgccttcgacgcggccgtgaccctgaccgccaccctggcggtggtggagccctatggctccgggatcggtggcggtggcttctggttactgcaccgggccgcggacggccatgaggtgatgcttgacgggcgcgagaccgcacccggtgcggcctacccggacatgtatctggatgacagcggggaactggaccgcgagcgttccctgcagggcgggttggcggccgccatccccggcaccccggcagcgatggtccacctggcccgggagtacggggcgctgccgctcgcggagagcctggcacctgccatccggctggcccgtcagggctttcaggtggacagccagtatcggcgcatggccctgttccgggtgcgggcgctgaatgccgacccggaggcccggcggatcttccttcgtgaccgcataccgccgccccagggcagcctgctgcgtcagccggatctggccgattctcttgagcgcatcgccgagcacggtttggccggcttctacgaggggccggtggccgaggccctggtggccggggtgcgggccaccggcgggatctggaccctggatgacctggccgggtaccgcgtggtggaacgcgagccggtgcgcgggcggatgggggatctgcggatcactgccgcggcaccgccgtcggccgggggggtggggctggtcgggttcctgcagatgctggccgacgacgactggcaagccctgtccagggcggatcgggtccacctgaccagcgaggccatgcggcgggtctatcgtgaccgggcggcctggctgggcgacccggatttcaccgagatccccatggatcgcctgctcagcgcggagtatgcccgcgcgctgcgagcggagatcgacatggcgcaggccacccccagcaccgagctgccggtgccggtggccggcggtgaggggcggcagaccacgcatttctccgtggtggatggccagggcaatcgggtggcggccaccctctccatcaactaccccttcggcgccaccaccgtgccgcccgggaccggggtactgctgaacaacgagatggatgacttcgccacggcgctgggggagggaaacgtctacggcctgctgggcaccgagcccaaccgcatcgagccgggcaagcgcccgctctccagcatgacgcccgcctttctggaggatgagtgccgcacgctcatctacggcacgcccggcggcagccggatcgtcaccatggtgatgctgggtgccctggggtttctcgaggccacccccctggacgagctggttgccgccccccgataccaccaccagtacctgccggacgagatccagcacgagccgggggccttctcccggtccacccgggcggaccttcagggccgaggccatcgcctgcgcaacgtcaaccgccgctacggcgacatgcaggcgctgctctgggaccactgcgagggccgtctgcacgcggcctcggacccgcgcgggatcggtgccgcccgggtggcggagtga

SEQ ID NO: 58247 - protein, 553 aa, Alkalilimnicola ehrlichei MLHE-1
MRRVALVVGLLLCWAGEALATPPPAVASAHPRASAAAMEVMAQGGNAFDAAVTLTATLAVVEPYGSGIGGGGFWLLHRAADGHEVMLDGRETAPGAAYPDMYLDDSGELDRERSLQGGLAAAIPGTPAAMVHLAREYGALPLAESLAPAIRLARQGFQVDSQYRRMALFRVRALNADPEARRIFLRDRIPPPQGSLLRQPDLADSLERIAEHGLAGFYEGPVAEALVAGVRATGGIWTLDDLAGYRVVEREPVRGRMGDLRITAAAPPSAGGVGLVGFLQMLADDDWQALSRADRVHLTSEAMRRVYRDRAAWLGDPDFTEIPMDRLLSAEYARALRAEIDMAQATPSTELPVPVAGGEGRQTTHFSVVDGQGNRVAATLSINYPFGATTVPPGTGVLLNNEMDDFATALGEGNVYGLLGTEPNRIEPGKRPLSSMTPAFLEDECRTLIYGTPGGSRIVTMVMLGALGFLEATPLDELVAAPRYHHQYLPDEIQHEPGAFSRSTRADLQGRGHRLRNVNRRYGDMQALLWDHCEGRLHAASDPRGIGAARVAE

SEQ ID NO: 58248 - DNA, 1737 bp, Rhizobium leguminosarum bv. viciae 3841
  CDS (1)..(1737): transl_table=11
atgggccgcctgcatatcgggacgatctccgtcatatcagcattgtcgctgagcctgacctcggcttttgccgcctcgcctgcgccggtcgaagccgagcacggcatggtcgtcacagcccagcatctggcgaccgatgtcggcgtcgaggtgctgaaaggcggcggcaacgccgtcgatgcagcggttgccgtcggttatgccttagcggtcgtctatccctcggccggcaacctcggcggtggcggcttcatgaccatccgcctgaaggatggcaccaagaccttcctcgatttccgcgaacgcgcgccgcttgccgcaacgaagaccatgtatctcgacgccaagggcgatatcgtgccgcgtgccagcctcgacgggtatcttgccgtcggcgtgccgggctccgtcatgggcttcgagaccgcgcgcgagaaatacggcaccaagtcgcgcgaagaactgatcgcgccggcgctccgcttcgccaaggaaggtttcacgctggaacagggcgacgccgcaagtttcgccggcaacgccaaacgcctcgccaaagatgagacggcggcaaagatcttcctgaaaccggatggcaaaccctatgcatccggcgaaaaactccagcaaccggaccttgccgccgtcctggaaggcatctcggaaaaaggccccgacgccttctacaaggccgcgcccgccgaggcgatcgtcaaggcgagccaggccaagggcggcatccttgccaaggaggacttcgagcaatatgccgtgcgcgagttgaacccgatcgagtgcaattaccgcggctacgacatcatctcctcgccgccgccgtcttccggcggcgtcatcatttgcgagatcctcaacgttctggaaggatacccgctttcctatctcggctataactcggccgaaaccgtgcacatcatggtcgaggcgatgcgctatgcctatgtcgaccgcaatgctgcactcggcgatcccgatttcgtcgagaacccggtcacaaagctgctcgacaagaagtatgctttggagatcgccgccaagatcgacccttacaaggccggcacctcggcgaacctgaagccgctcggcggcaaggaaagcaccgagaccacgcattattcgatcatcgacgacgagggcaatgcggtcgccgtcacctatacgctgaatggctccttcggtgccgcggtcgtagcgcccggcaccggtgttctgttgaacaacgagatggacgacttcacctccaagcccggcgtgccgaacctctacggactggtgcagggcgaggccaatgccatcgccccgaagaagacgccgctctcctcgatgagcccgacgatcgtcacccgagacggcaagcccttcatggtcatcggcagccccggcggctcgcgcatcatcaccatcacgctggaagcgatcctcaatgtcgtcgatttcggcatggatatcagtcaggcggtcaacgccccgcgtctccaccaccaatggcagcccgacaaggtctttctcgaaccctatgcactttcgccggatacggaaaagacgctcgcagccatgggctacagcttcgacggcggcaacgacacgccgcaatggggccaggccgccggcatcctcgtcggcggcaaaagccttgcggccatcgcaaaaggcggcggcgcccggtataacggcgccatggatagccgcgcggcagaagggtctgcaagcggctactga

SEQ ID NO: 58249 - protein, 578 aa, Rhizobium leguminosarum bv. viciae 3841
MGRLHIGTISVISALSLSLTSAFAASPAPVEAEHGMVVTAQHLATDVGVEVLKGGGNAVDAAVAVGYALAVVYPSAGNLGGGGFMTIRLKDGTKTFLDFRERAPLAATKTMYLDAKGDIVPRASLDGYLAVGVPGSVMGFETAREKYGTKSREELIAPALRFAKEGFTLEQGDAASFAGNAKRLAKDETAAKIFLKPDGKPYASGEKLQQPDLAAVLEGISEKGPDAFYKAAPAEAIVKASQAKGGILAKEDFEQYAVRELNPIECNYRGYDIISSPPPSSGGVIICEILNVLEGYPLSYLGYNSAETVHIMVEAMRYAYVDRNAALGDPDFVENPVTKLLDKKYALEIAAKIDPYKAGTSANLKPLGGKESTETTHYSIIDDEGNAVAVTYTLNGSFGAAVVAPGTGVLLNNEMDDFTSKPGVPNLYGLVQGEANAIAPKKTPLSSMSPTIVTRDGKPFMVIGSPGGSRIITITLEAILNVVDFGMDISQAVNAPRLHHQWQPDKVFLEPYALSPDTEKTLAAMGYSFDGGNDTPQWGQAAGILVGGKSLAAIAKGGGARYNGAMDSRAAEGSASGY

SEQ ID NO: 58250 - DNA, 1734 bp, Pseudomonas aeruginosa UCBPP-PA14
  CDS (1)..(1734): transl_table=11
atgtccttcctgaacctgcccgtccgtaccctggtcgccgcctgcggcctgtccctgctcagcctcgcggcgcatgccgacagctttcgcggcgacgcccacgcaccgcagcaggccgccgtcgccacgccacatccggccgcgaccgtcgccggcctggaaaccctggccaatggcggcaacgccttcgacgccgcggcggccatcgccgctgccctggcggtagccgagccttacggctcgggactcggcggcggtggattcttccttctgcgccaggccggcgcgcagccgacctatcgcttcctcgacgcccgcgagcgcgcgccgaaggccgcctacgccgacatgtaccggcgcaacggcaaggtcgaccccaggctgtccgtcgacggcccgctggcggcggcgatccccggcctgccggcggcgctggtcgaattgagcggccgctacggacgcaagcccctggccgacaatctggtgccggcgatccgcctggcggtggatggcgtatccgtcgaccgggtctaccgcgaccgcgtcgccatgcgcctggaagcgatgcgcaaggacccggaaaccgcgcggatcttcctcgacaagggcggaatccccgacgaatggaacctgctccgccaaccgcagttggcacgtaccctggaacgcctcgggcgctacgggcggatcggcttctacgaaggcgagacagcggacaagctgctcaccggggtccgcgccggcggcggcatctggagcgcggccgacctgcgcgactaccgggtgatcgaacgccgcccgctggaggtgaagctggccaacggccgcgaactgatcagcgcaccgccgccctcggccggcggcgtggccctggcgcagagcctgcagatgctggaacagctgccgtggcagaaggccgagccggtacagcgcgcccattacgtgctggaggtcctgcgccgtgcctaccgcgatcgaggcctgctcggcgacccggacttcgtcgccaacccgctgcccagcttgctggcgccggactacctgaagcgccttgccgccggcatcgacccgcgccgcgccacgcccagctcggcgctgccggaagcgccggcctggcgcgaaggcgaccacaccacccacttcgcggtgatcgatgcccagggcaacgcggtggccgccaccctctcggtgaacctgccgttcggcgccgccttcaccgttcccggtaccggcgtggtgctgaacaacgagatggacgatttcgccgccgacacccagggcgccaacagctacggcctggccggcagccaggcgaacgcggtggcggccggcaagcgcccgctgtcgagcatgagcccgagcttcctggaaagcccgaccgacttcgccgccttcggcacccctggcggcagccgtatcccgagcatggtgctgatctccatgctgcagtacttcgacggccgcccggtcggccaatgggtcgccgcgccgcgctaccaccaccagtacaagccggacgtcgtcgagtacgaaccgcgcgccttcagcgatgccgaggccgccgaactgcgccggcgcggctatcagctcaaacgcctggagcgcagctacggcaaccagcaggtgctctactgggacaagcgcagcggccgcgtcgacgccgccagcgacccgcgcgggatcggttattcggcgttttccccggagatgcaggcacagccccaggcgcactga

SEQ ID NO: 58251 - protein, 577 aa, Pseudomonas aeruginosa UCBPP-PA14
MSFLNLPVRTLVAACGLSLLSLAAHADSFRGDAHAPQQAAVATPHPAATVAGLETLANGGNAFDAAAAIAAALAVAEPYGSGLGGGGFFLLRQAGAQPTYRFLDARERAPKAAYADMYRRNGKVDPRLSVDGPLAAAIPGLPAALVELSGRYGRKPLADNLVPAIRLAVDGVSVDRVYRDRVAMRLEAMRKDPETARIFLDKGGIPDEWNLLRQPQLARTLERLGRYGRIGFYEGETADKLLTGVRAGGGIWSAADLRDYRVIERRPLEVKLANGRELISAPPPSAGGVALAQSLQMLEQLPWQKAEPVQRAHYVLEVLRRAYRDRGLLGDPDFVANPLPSLLAPDYLKRLAAGIDPRRATPSSALPEAPAWREGDHTTHFAVIDAQGNAVAATLSVNLPFGAAFTVPGTGVVLNNEMDDFAADTQGANSYGLAGSQANAVAAGKRPLSSMSPSFLESPTDFAAFGTPGGSRIPSMVLISMLQYFDGRPVGQWVAAPRYHHQYKPDVVEYEPRAFSDAEAAELRRRGYQLKRLERSYGNQQVLYWDKRSGRVDAASDPRGIGYSAFSPEMQAQPQAH

SEQ ID NO: 58252 - DNA, 1662 bp, Solibacter usitatus Ellin6076
  CDS (1)..(1662): transl_table=11
atgcgccgcatcctagctctgctgctgatggcggccaccatacccctgtgggccgcgcagcctgtgcgcgcgcgccacggaatggtggtcacccgagaacgccacgccacccaggccggcctccaggttctgaagaacggcggcaatgccatcgatgcggcggtcgcggttggactcgcgctcgcggtcactcatcccagcgcgggcaacataggcgggggcggattcatgctgattcgcctcgccgacggccgcaccaccttcattgatttccgcgaacatgctgcgcagaccgcatcgcgcaacatgtacctggacgcgaccggcaaggctacgcaggattcggtcaccggctatcgcgccgccggagttcccggcactgttcgcggcctcgagtacgccaatcacaaatacggtacgcgtccctgggcggaactggtgcatcccgccgtggagctcgccgctaagggattcccggtctcttacgcgctcgcccaatcgctgcgcggctcacgcggcctcgccgcattcccggaatcccaacgcattttcctcaagggaggcaagttctatgaacccggcgagttgctcacccaacccgacctcgcccgcaccctcgagcgcatcgagaagcaaggctccaaggatttctatgaaggcgagaccgcccgcctgctggcgaaagacatggccacgcacggtggactgatcaccgaagccgacatgaagatgtatgccgttcacgagcgggcgccgctcaccggcatgtatcacggctacaccgtggtcaccgcacctccgccgagttccggcggcgtcggcattctgcaaatgctgggcatgctcgatggcacgggctacgaaaaaggcggcgccggctccgcctccgtggtccactacatgaccgaagccatgcgacggtttttcgccgatcgctccgaacatctcggcgaccccgactttgtcaaggtgccgatgacctccctgctcgatcccaagtacatcgcccgccagcgcgcgtccatcgatcccgaacgcgccaccccaagcgcgcagatcaaggccgccaatttcaccggccacgaatccatggagaccacgcattacaccgtcgccgatgaagccggcaacgtggtcgccgtcacctacacgttgaacggcggcttcggcagcaaagtcaccgcgaccggcctcggcttcctgctcaataatgagatggatgatttcgcgtccaagccgggcgaggccaacatgtacggcctgattcagggtgagttcaacgccatcgcgcccggcaagaccccgctctccgccatgacaccgacgatcgttctcaaagacggaaagcccgtgctggccgtcgggtcgcccggcggacccaccatcatcaacacggttctcgaagtcgtcgtcaacgtgctggatttcgggatgggcgtgcaggacgccgtgaactggccgcgtttccaccatcagtggatgcctgatgaactccgcatggaacccggctattcgccggacacgatcgcgcttctcgaaaagcgcggctacataatcaagcgcacaaacgcgcagggcgaagccgccgccatccgctggaacaacggatggctcgaaggcgcgcccgatccccgtaccgaaggcaccgcggaaggacactaa

SEQ ID NO: 58253 - protein, 553 aa, Solibacter usitatus Ellin6076
MRRILALLLMAATIPLWAAQPVRARHGMVVTRERHATQAGLQVLKNGGNAIDAAVAVGLALAVTHPSAGNIGGGGFMLIRLADGRTTFIDFREHAAQTASRNMYLDATGKATQDSVTGYRAAGVPGTVRGLEYANHKYGTRPWAELVHPAVELAAKGFPVSYALAQSLRGSRGLAAFPESQRIFLKGGKFYEPGELLTQPDLARTLERIEKQGSKDFYEGETARLLAKDMATHGGLITEADMKMYAVHERAPLTGMYHGYTVVTAPPPSSGGVGILQMLGMLDGTGYEKGGAGSASVVHYMTEAMRRFFADRSEHLGDPDFVKVPMTSLLDPKYIARQRASIDPERATPSAQIKAANFTGHESMETTHYTVADEAGNVVAVTYTLNGGFGSKVTATGLGFLLNNEMDDFASKPGEANMYGLIQGEFNAIAPGKTPLSAMTPTIVLKDGKPVLAVGSPGGPTIINTVLEVVVNVLDFGMGVQDAVNWPRFHHQWMPDELRMEPGYSPDTIALLEKRGYIIKRTNAQGEAAAIRWNNGWLEGAPDPRTEGTAEGH

SEQ ID NO: 58254 - DNA, 1740 bp, Shewanella sp. ANA-3
  CDS (1)..(1740): transl_table=11
atgcgccgcgcaggaacttttagacctcttattctcgccatcgccatggcactgcctttgttgtcttcgcccactctccatgccgaagaaccttcaattttcagccaaatggccacggcacaacccgtatgggcaaaacatggtatggtcgccagccaagaagcgctggccagccgcactggcatcgagattttgaagcaaggcggtaatgccgtcgatgctgcggtggcggtcgcattcagtttagccgtcacgctaccccgcgcgggcaatattggtggcggtggctttatgcttgtccatctggccaaagaaaacaaaaccatcgccatcgattaccgtgaaatggcgccatcaaaggcgaaaaaagacatattcctcgatgagaatggcgatgcggtgactaaattaagccgtgaacatggtctggcagtcggcgtccccggcactgtgatgggcatgagtttagcccttgaaaaatatggcactatgaccatggcgcaagtcacggcgcccgccatcaaaatggcacaggaaggcattagcgtgaccccagatcttgcggtatcccttgcaggcttaaagcgccgtatgagccaatggccaagcacagcagccatcttctataaggccgacggtagtgactaccaagtggatgatattttaaaacagccagaactcgcccactccctgcaacttatcgccgagaaaggcactaaaggcttctacgaaggtgaaactgcggagaaactggttaaggccgtgcaagatgctggcggcatcatgaccttagcggatttagaacactataaggccgttgagcgtgaacccgttcgcggtcaataccgtggatatgacgtagtttctatgccaccaccatcctcgggcggcgtgcacattatcgaaatgctcaatgtactgcagcagttccctatcgatcaatttggccataacacggcgcaaaccattcatgtgatggccgaaaccatgaagcatgcctacgccgatcgcagcgaatacttaggcgatcccgatttttacaaggtgccggtcaaacagttaaccaataaggactacgcccaaaaaatcgccagccaaattgcgctaaacaaaaccacgcccagtaccgaaatcaaacccggcaatctagcgccctatgagagtgaccaaaccacgcacttctcggtggtcgataaatggggcaatgcggtgtctaacacttacaccttaaacttcagctacggctcgggtttagtcgccaaaggtacgggcattttactcaataacgaaatggatgatttctccgcaaaacccggcacacctaacggttatggcctagtgggtggcgatgccaacgcggtggaaggtaataaacgtcctttaagttcaatgagcccaaccatagtgatgaaagacggcaaacccttcttagttacaggcagccctggcggttcacgcatcattaccaccacgctgcaaatcattatgaatgtgattgatcacggcttaaatattgccgaagccagcaatgctgcgcgggtacaccaccaatggctgcccgatgaactgcgagtcgaaagcagcctaaaccgcgataccatttcgttactcgaagctaaaggccataaagtgaaagtgcaatcggccatgggcagcacacaatctatcatggtgacagaccaagggatttttggtgcctcagacccacgccattcgggtagcgaagccgtcggttactaa

SEQ ID NO: 58255 - protein, 579 aa, Shewanella sp. ANA-3
MRRAGTFRPLILAIAMALPLLSSPTLHAEEPSIFSQMATAQPVWAKHGMVASQEALASRTGIEILKQGGNAVDAAVAVAFSLAVTLPRAGNIGGGGFMLVHLAKENKTIAIDYREMAPSKAKKDIFLDENGDAVTKLSREHGLAVGVPGTVMGMSLALEKYGTMTMAQVTAPAIKMAQEGISVTPDLAVSLAGLKRRMSQWPSTAAIFYKADGSDYQVDDILKQPELAHSLQLIAEKGTKGFYEGETAEKLVKAVQDAGGIMTLADLEHYKAVEREPVRGQYRGYDVVSMPPPSSGGVHIIEMLNVLQQFPIDQFGHNTAQTIHVMAETMKHAYADRSEYLGDPDFYKVPVKQLTNKDYAQKIASQIALNKTTPSTEIKPGNLAPYESDQTTHFSVVDKWGNAVSNTYTLNFSYGSGLVAKGTGILLNNEMDDFSAKPGTPNGYGLVGGDANAVEGNKRPLSSMSPTIVMKDGKPFLVTGSPGGSRIITTTLQIIMNVIDHGLNIAEASNAARVHHQWLPDELRVESSLNRDTISLLEAKGHKVKVQSAMGSTQSIMVTDQGIFGASDPRHSGSEAVGY

SEQ ID NO: 58256 - DNA, 1911 bp, Mycobacterium smegmatis str. MC2 155
  CDS (1)..(1911): transl_table=11
gtgctgatcgcgtcagggtgctccgacggcgccgaacgcccacgtcggcccgcccccggcccgtgcgagattgtgtcgaacggcacacccgtaccgaaaaccccggaatcaccaccgccacctcccggcgcgcctgccggacgcgacatcgcgacgcaacccgaggtggccacgggctaccgcaccgacatgaccgcggtgcgcaccgcgacgtacgcggtggccaccgcgaatccgctggccaccgaggccgcgtgcaaggtgctgcgcgacggcggcaccgccgcggacgccctcatcaccgcacaggccgtgctgggcctggtggaaccgcaggcgtccggcctcggcggcggcgggttcctgctctatcacgacgccgccacgggcgcggtacgcgccttcgacggccgcgagaccgcaccggccgcggccaccgagaactacctgcgatggatctccgaggccgatcgcaccgaaccgagacccgatgcgcgcgcttcgggccggtcgatcggggtgcccggcatcgtgcgcctgctggacgtggtgcaccgcgagtacggcaagaaggcgtggcgcgaactgttcgaccccgccgtcaacctcgccgaccgcggcttcgacatcagcccgcgcctggccgcggcactgctcgacgccgcgccccagcttcgcctcgatccggaagcgtcggcctacttcctcaaccaggacggcacacccaagcgcgtcggaacgcggctgaccaatcccgcctacgcgaagacgcttggcgccatcgcaaccgacggcgcggacgcgttctacaccggcgacatcgcccgcgcgatcgtcgccgcggcggccgacacgtcaggcgggcgcacgccgtcgctgctcaccgagaacgacctcgccacctacaccgtcaagacccgcgacccgctgtgcacgacgtaccggggccgcgagatctgcgggatgccaccaccgtcgtcaggaggcatcgcggtggccgccacactcggcatcctcgagcacttcgcgatgaagcaacaccggcccaccgacctcgaccgcaacggcggacatcccacggtcatgggcgtgcacctcatctcggaggccgagcgtctcgcgtacgccgaccgggaccgctacgtcgccgacaccgacttcgtcgcgctgcccggtggttccccgaacacgctgctggacagcgcctatctgaccggtcgggccgcactgatctccgaggaccgcacgatgggcaccgcgcaaccgggcagcttcggaccaccggtcaccgcggcgccggtccgcgaacacggcaccagccaggtcagcatcatcgacagcttcggcaacgcggccgcgctgaccaccaccgtggaatcggcgttcggctcgttccacatggtcgacgggttcctgctcaacaaccagctcaccgacttctccgccgaaccggtcagccccgagggcacgccgatccccaaccgggtggaacccggcaaacgcccccgcagcaccatggcgcccacgttgatcttcgaccatgacggcggtgaacgcgggccactgtacgcggtcctgggatcgccgggcggctcggtcatcatccagttcgtcgtcaaaaccgttgtcggccttctcgattggggcctcgacccgcagcaggcggtgtcgatggtcgacttcggggccgccaacacccccaagaccaacgtgggcggcgaacaccccaacgtcgacacgtccgacaacggcgatcacgatccgctcgtgcgcggactgcgccggctgggccacgacgtcaacctcgacgatcagtccagcgggctgtcggcgatcgcacggaccgaatccgggtggatcggcggtgccgatccacgccgggagggactcgtgatgggtgacccgggatga

SEQ ID NO: 58257 - protein, 636 aa, Mycobacterium smegmatis str. MC2 155
MLIASGCSDGAERPRRPAPGPCEIVSNGTPVPKTPESPPPPPGAPAGRDIATQPEVATGYRTDMTAVRTATYAVATANPLATEAACKVLRDGGTAADALITAQAVLGLVEPQASGLGGGGFLLYHDAATGAVRAFDGRETAPAAATENYLRWISEADRTEPRPDARASGRSIGVPGIVRLLDVVHREYGKKAWRELFDPAVNLADRGFDISPRLAAALLDAAPQLRLDPEASAYFLNQDGTPKRVGTRLTNPAYAKTLGAIATDGADAFYTGDIARAIVAAAADTSGGRTPSLLTENDLATYTVKTRDPLCTTYRGREICGMPPPSSGGIAVAATLGILEHFAMKQHRPTDLDRNGGHPTVMGVHLISEAERLAYADRDRYVADTDFVALPGGSPNTLLDSAYLTGRAALISEDRTMGTAQPGSFGPPVTAAPVREHGTSQVSIIDSFGNAAALTTTVESAFGSFHMVDGFLLNNQLTDFSAEPVSPEGTPIPNRVEPGKRPRSTMAPTLIFDHDGGERGPLYAVLGSPGGSVIIQFVVKTVVGLLDWGLDPQQAVSMVDFGAANTPKTNVGGEHPNVDTSDNGDHDPLVRGLRRLGHDVNLDDQSSGLSAIARTESGWIGGADPRREGLVMGDPG

SEQ ID NO: 58258 - DNA, 1722 bp, Azoarcus sp. BH72
  CDS (1)..(1722): transl_table=11
atgcgcgcggcgatcctgttcgcggtctggctgtggcttgcggccacggcggccgcgcagccgcccgcgcccgaggccgcgaccggcttctcaccgcgaccggcggtatgcgcttccaacgcaatggtggtgaccgcccacccgcttgccaccgacgccgcgcttgccgtgttgggcgagggtggttcggccgcggatgccgcgattgccgcggcgctggtgctcaatgtggtcgaaccgcaatcgtccggcatcggcggcggcggtttcctgctccactacgacgctgccgcgcagcgtcttgccgcctgggacggccgcgaaagcgcgcctgcggcggtggaggcggactggttcctggacgaggccgggcgcccgctgcacttcttcgacgcggtggtgggcggccgcgcggtgggtgtgccgggtttgccgcgcctgctcgaagccgcccatcggcgccacggcgtgctgcccttggcgcgcctgttcgcgcccgcgattgcactggcgcgggagggcttcgcggtgtcgccgcgcctgcacgcgcacatcgcgcgcgaccgcttcctgcgcgccgaccccgccgcgcgcctgctgttcttcgatgggggcggtgcgccgctggcggtgggtgcgacgctgcgcaatccggcgctcgccgcgacgctggagctgctcgcgcgcgacggcgccgaggtcttctaccgcggcgaggtggcgcgcgatctcgtcgccgcggtggcgcgtgccccggcgccgggcgcgctcacgctggacgaccttcgcacctacgaggtggtcgagcgcccggcgctgtgcggcccgtaccgcgcctggcgggtgtgcggcatgccgccccccagcgccggcggtgcgagcgtgctggccctgctcggcgtgttgcaacgcttcgacctgcctgcgatcgcgccggattcggcttttgccgcgcacctcttcgccgaggcgggccggcttgcctatgcggaccgcgaagcctggtatggcgaccccgcggagatgacgctagcgcccgcgcagttgctggcgccgcgctacctcgcccaccgcgccgcgctgatcgcgctcgacggcagcatggggaccgcgccggcgggcgtgccggaccccgctgtggcagcggtggcggcgagcagcccggagttgcccgccaccacgcacatatcggtggtggatgcaggcggcaacgcggtgtcgctgaccgcctcgatcgagaacgccttcggcagccggcgcatggtgcgcggcttcctgctcaacaaccagctcaccgatttttcgtttgtcccgggcggtgagcacggggcacatcccaaccgcgccgggccgcgcaagcgcccgctcagctcgatggcgccgacgctggtgtttgcgccggatggacggctgcacgcggtactcggctcgcccggcggcagcgccatcatcaactacgtggcggccgcgctggtgggcgtgctcgactggggcctagcgcccgacgcggcgctggcgcggccgcacgcgggcagccgcaatggcccgaccgaagtggaggacaacgccgccggccgcgcgctggcgggccgactcgcgctgttcgggcaccgcccgcaactgcgtgacctcaccagcggcaccagcctgatcgtgcgtgaagctggaggctgggcgggcgcggccgatccgcgccgcgagggcagcgcggcgggttactga

SEQ ID NO: 58259 - protein, 573 aa, Azoarcus sp. BH72
MRAAILFAVWLWLAATAAAQPPAPEAATGFSPRPAVCASNAMVVTAHPLATDAALAVLGEGGSAADAAIAAALVLNVVEPQSSGIGGGGFLLHYDAAAQRLAAWDGRESAPAAVEADWFLDEAGRPLHFFDAVVGGRAVGVPGLPRLLEAAHRRHGVLPLARLFAPAIALAREGFAVSPRLHAHIARDRFLRADPAARLLFFDGGGAPLAVGATLRNPALAATLELLARDGAEVFYRGEVARDLVAAVARAPAPGALTLDDLRTYEVVERPALCGPYRAWRVCGMPPPSAGGASVLALLGVLQRFDLPAIAPDSAFAAHLFAEAGRLAYADREAWYGDPAEMTLAPAQLLAPRYLAHRAALIALDGSMGTAPAGVPDPAVAAVAASSPELPATTHISVVDAGGNAVSLTASIENAFGSRRMVRGFLLNNQLTDFSFVPGGEHGAHPNRAGPRKRPLSSMAPTLVFAPDGRLHAVLGSPGGSAIINYVAAALVGVLDWGLAPDAALARPHAGSRNGPTEVEDNAAGRALAGRLALFGHRPQLRDLTSGTSLIVREAGGWAGAADPRREGSAAGY

SEQ ID NO: 58260 - DNA, 1722 bp, Burkholderia vietnamiensis G4
  CDS (1)..(1722): transl_table=11
atgactacgctgaaccggttcaaatcatccgccgcggtgctggtaaccgcagcgggcctcggcttcgtgccggccgcgccggcctgggcgaaggcgccccagccggcgctgctgacgagctcggcggtggcggtggccgaccagtacagcgcggacgctgcggagcagatcttcaaggaaggcggcaatgcgatcgacgcggccgtggcgatcgccttcacgctcgccgtcacgtatcccgaggccggcaacatcggcggcggcggcttcatgacgatctacaaggacggcaagccgtacttcatcgactaccgcgagcgcgcgccgctcgccgcgaccaaggacatgtacctcgacaagaacggcaacgtcgtcgagggcatgagcctctacggcccgcgcgcggccggcgtgccgggcaccgtggccggcatgtgggaagcgcagaagcgcttcggcaagctcaaatggaagcaggtgctcgcgccggcgatccactatgcgcgcgacggcttcgtcgtcgacgagcagctcgcgcagcgcggcgtcgacgcatcgaaggagttcggcggcaagaccaacttcgacaagtacttctcgacgatgaaggccggcgagaacttccagcagcccgatctcgccgacgtgctcgcacgcatcgcgaacgacggcgcgaacggcttctacaagggcaagacggccgagctgatcgccgcgtcgatgaagaccggcgacggcaacgggctcatcaccaccgaggatctcgcgcaataccgcgcggtgtggcgccagccggtgcaggcgaaatggaacggctacgacgtgatcaccgcgccgccgccgagctcgggcggcatcggcctcgtgcagctgctgaagatgaaggccgacctgaagcaggacttcgccggcgtgaagctcaactcgccgcagtacatccacctcgtcgccgaaatcgagaagcgcgtgttcgccgatcgcgcgcagtatctcggcgatcccgacttctacaaggtgcccatcgcgcgcttgatcgacgacgcgtatctcgcgaagcgcgcggccgaggtgaacccgtcacggatcagcgatacgaagagcgtccagccgggcctcggcacgtcgatgccggagaaggccgagacgacccacttctcggtcgtcgacaagtggggcaacgcggtgtcgaacacgtacacgatcaacggctatttcggttcgggcgtgatcgccgacggcaccggcatcgtgctgaacgacgagatggacgacttctccgcgaagcccggcgtcgcgaacatgttcggcgtggtcggcagcgacgcgaatgcgatcgagccgaacaagcgcccgctgtcgtcgatgtcgccgacgatcatgacgaagaacggcaaggtgtcgctcgtgatcggcacgccgggcggctcgcggatcttcacgtcgatcttccaggtgatcaacaacatctacgacttcaggatgccgctgaaggacgcggtggccgcgatgcgctttcatcatcagctgctgccgccgaatacgatctactgggagccgtatcgcccgatcgaaggcgaactggcggcacagctcgaagcgcgcggctatacgctgaaggggcaggatttcagcggcgacatccaggtgatcaagatcgacggcaggacgcccgaagcgatggccgacccgcgcgggcgcggcgtcacgcgcatcatccgctga

SEQ ID NO: 58261 - protein, 573 aa, Burkholderia vietnamiensis G4
MTTLNRFKSSAAVLVTAAGLGFVPAAPAWAKAPQPALLTSSAVAVADQYSADAAEQIFKEGGNAIDAAVAIAFTLAVTYPEAGNIGGGGFMTIYKDGKPYFIDYRERAPLAATKDMYLDKNGNVVEGMSLYGPRAAGVPGTVAGMWEAQKRFGKLKWKQVLAPAIHYARDGFVVDEQLAQRGVDASKEFGGKTNFDKYFSTMKAGENFQQPDLADVLARIANDGANGFYKGKTAELIAASMKTGDGNGLITTEDLAQYRAVWRQPVQAKWNGYDVITAPPPSSGGIGLVQLLKMKADLKQDFAGVKLNSPQYIHLVAEIEKRVFADRAQYLGDPDFYKVPIARLIDDAYLAKRAAEVNPSRISDTKSVQPGLGTSMPEKAETTHFSVVDKWGNAVSNTYTINGYFGSGVIADGTGIVLNDEMDDFSAKPGVANMFGVVGSDANAIEPNKRPLSSMSPTIMTKNGKVSLVIGTPGGSRIFTSIFQVINNIYDFRMPLKDAVAAMRFHHQLLPPNTIYWEPYRPIEGELAAQLEARGYTLKGQDFSGDIQVIKIDGRTPEAMADPRGRGVTRIIR

SEQ ID NO: 58262 - DNA, 1752 bp, Burkholderia vietnamiensis G4
  CDS (1)..(1752): transl_table=11
atgagacggctcgtcgtactcaccttgttgtcggccgtcggcgcatgcgcgttcgcggcttcggagcccgcggtggaagccacccacggcatggtcgtgtcgtcgcagcatttcgcgtcgcagatcggcgtcgacatcctgaaggccggcggcaacgcggtggacgcggccgtggcggtcggctacgcgcaggcggtgaccaatccgtgctgcggcaacatcggcggcggcggtttcatgactgtgcatctagcagacggccgcgaccgcttcatcaatttccgcgagacggcgccggccgcggcgtcggcgaacatgtacctcgacgcgaacggcaacgtgattccgaaccagagcctgtacggctatcgggcggtcggcgtgccgggcacggtcgccggcctcgacctcgcgcagcgcaagtacggcaagctcacgcgcaggcaggtgatggagccggcgatccggctcgcgcgcgacggcttcgtgctgacgcgcggcgataccgacatcctcgacacgacgatcgagcgcttcaggaaggacccggaggccgcgcgcatcttcctgcgcgcggacggcacgccgctgcaaccgggcgaccgcctggtgcagaaggacctcgcgcgcacgctcgagcgcatcgcggagcggggcccggacgcgctctatcacggcgagattccgaagctcgtcgaagccgcgtcgacgcgcggcggcggcgtgatcacggcggccgacttcgcgtcgtatcgcgcgcaggacatcgcgccgctgacctgcacgtatcgcggctacgagttcgtgtcggcgccgccgccgagttcgggcggcgtgacgatgtgcgagacgctgaacgtgctcgaaggctacgacctgcgcaagatgggctaccaatcggcggccgtcgtccattacatgaccgaggcgatgcgccacgcatacgaggatcgcaacacgctgctgggcgacccgaacttcatcgacaatcccgtcgcgaagctgaccagcaagcagtatgcggccgagatccgcaagcagatcagcgacgacgcggcgacggcgtcggtcgacgtgcagcccggtatcggcgtgcacgagaagccggagacgacccactattcgatcgtcgatcgcgacggcaacgcggtgtctacgacgtacaccgtcaacggccgcttcggtgcggtcgtgatcgcgccgggcaccggcttcttcctgaacgacgagatggacgacttcaccgtcaaggtcggcgcgcagaacctgttcgggctcgtgcagggtacgcgcaactcgatcgcgccgggcaagcgtccgctgtcgtcgatggcgccgacgatcgtgaagaaggacggcaaggtgttcatggtggtcggctcgccgggcggctcccggatcatcacgatcacgctgcagaccgtgctcaacgtgatcgactacgggatgacgccgcaggatgcggtcggcgcgccgcgcattcaccatcagtggctgcccgacgaggtctattacgaaacccgcggcctgtcgcccgacacgctgtcgatcctgcgcaagatgggctacaagatggtcgagcagacgccgtggggcgccgccgagctgatcctgctgggcctgccgggcaccgaggtggcgagccgccagagctcgggcaacgacgcgtcggtgtcgggcaacgtgcgcgtcggctatctctatggcgtcaacgatccgcgccgtccggccggagccgcgatcgggtattga

SEQ ID NO: 58263 - protein, 583 aa, Burkholderia vietnamiensis G4
MRRLVVLTLLSAVGACAFAASEPAVEATHGMVVSSQHFASQIGVDILKAGGNAVDAAVAVGYAQAVTNPCCGNIGGGGFMTVHLADGRDRFINFRETAPAAASANMYLDANGNVIPNQSLYGYRAVGVPGTVAGLDLAQRKYGKLTRRQVMEPAIRLARDGFVLTRGDTDILDTTIERFRKDPEAARIFLRADGTPLQPGDRLVQKDLARTLERIAERGPDALYHGEIPKLVEAASTRGGGVITAADFASYRAQDIAPLTCTYRGYEFVSAPPPSSGGVTMCETLNVLEGYDLRKMGYQSAAVVHYMTEAMRHAYEDRNTLLGDPNFIDNPVAKLTSKQYAAEIRKQISDDAATASVDVQPGIGVHEKPETTHYSIVDRDGNAVSTTYTVNGRFGAVVIAPGTGFFLNDEMDDFTVKVGAQNLFGLVQGTRNSIAPGKRPLSSMAPTIVKKDGKVFMVVGSPGGSRIITITLQTVLNVIDYGMTPQDAVGAPRIHHQWLPDEVYYETRGLSPDTLSILRKMGYKMVEQTPWGAAELILLGLPGTEVASRQSSGNDASVSGNVRVGYLYGVNDPRRPAGAAIGY

SEQ ID NO: 58264 - DNA, 1554 bp, Crocosphaera watsonii WH 8501
  CDS (1)..(1554): transl_table=11
atgaatcgaaaaactcgtggagcgatcgccgccggacatcccaaaacagcagaggcaggtcagatcatcttggaattagggggtaatgcttttgatgcagcgatcgctgccatgttagcctcttttgtggtggagtccactttaacttctgcgggggggggtggatttttattggcacatacacaagaccaagaaagtattttatttgatttcttttgtcaaacccctcaactaaaaaaatccctctctgaaatcgaattttatcccgttgatattaactttgggggagcaacccaagtatttcatattggtcggggttctgttgccgttccgggtagtttgatgggcttgtttacagtgcatcaggaactaggtcaattacccttttctgtgttggtagaaccagccattaactatgctagaaatggttaccaagtcaacgattataaccgagttacgtttgaagtcttagaacctattttaagggcttcccatgagtcaagaaaaatctatttatcaaataatgagttatttaatatcggagatatagcttatatcaaagactttgctaatatcttagaagaatttgctaaaaaaggaatccaagagttttatcaaggagatattggtcagcaaattttgcaagatatgaaagagggtggctatttaactcaagaagatttagacaattatcgtgttattaaaagaaaacctcttaattttaattatagaggctatcaactattaaccaatcctccccctagttccggcggaatattgattaattatgctctaaaaattctagagaatattaatcttaaatcttaccaatttggaagccaagattatctacaactattggcattggtgatgaatttaactaatgattctagagaaataaattatgacaattatctttaccaagatgatattattagtcaatttttaagcaagaaaaatattagtgatggtcaaaacaaattacaacaaaccattaataaatggggcagtaccactcatattagtgtcatggatgaatatggtaatgcggctagtgtaaccaactctaatggagaaggttcctcttatgttattcctaatacgggaattatgctcaataatatgttaggagaagcagatttgaacccgttagggtttcattgttggcctaataattgccgtatttcttccatgatgtctcctactataattctccaagaaggaaaaccaaaaatcgtcttaggttcagggggttcaaatcgcattaggacagttcttttacaagtcattttcaacttattagattttaatttttccctagaagaagccattaataaaccgagagttcattgggaaaataatctgtttaatctagaacctacaaaacagttagaaaccattgaaaatttacgactgcctccagacactgagattatcctttggcaagaactaaatatgttttttggtggggttcatgctgtcagacttaaggaagataattctttagaagctataggagatcccagacgctcaggggtcggtattatttgttaa

SEQ ID NO: 58265 - protein, 517 aa, Crocosphaera watsonii WH 8501
MNRKTRGAIAAGHPKTAEAGQIILELGGNAFDAAIAAMLASFVVESTLTSAGGGGFLLAHTQDQESILFDFFCQTPQLKKSLSEIEFYPVDINFGGATQVFHIGRGSVAVPGSLMGLFTVHQELGQLPFSVLVEPAINYARNGYQVNDYNRVTFEVLEPILRASHESRKIYLSNNELFNIGDIAYIKDFANILEEFAKKGIQEFYQGDIGQQILQDMKEGGYLTQEDLDNYRVIKRKPLNFNYRGYQLLTNPPPSSGGILINYALKILENINLKSYQFGSQDYLQLLALVMNLTNDSREINYDNYLYQDDIISQFLSKKNISDGQNKLQQTINKWGSTTHISVMDEYGNAASVTNSNGEGSSYVIPNTGIMLNNMLGEADLNPLGFHCWPNNCRISSMMSPTIILQEGKPKIVLGSGGSNRIRTVLLQVIFNLLDFNFSLEEAINKPRVHWENNLFNLEPTKQLETIENLRLPPDTEIILWQELNMFFGGVHAVRLKEDNSLEAIGDPRRSGVGIIC

SEQ ID NO: 58266 - DNA, 1791 bp, Synechococcus sp. WH 5701
  CDS (1)..(1791): transl_table=11
atggcggcagctgaactccgccgccagcgctgggccctgctgcctctgacggccctcgccttgctgccgctgccagcgccggccgatgtgctccaggaggccagtcagcgcttccagccgctctggtcggcgggggggatggtggccagccaggaggtggaggcctcccgggtggggcgtgacgtgctgcgggcaggaggcaatgccgtcgatgcggcggtggccacctccttcgccctggcggtcacccatccccaggcggggaacctgggtggcggcggcttcctcgtgctctggcggccggagcggctcagccgagggcggccgccgcagccccaggaggtgcgggtgggcaagggccgggcggtgacgatcaacttccgcgagagcgctccccaggcggccggccccgatctgctgctcgatgcctccggtgcggtggatcgccgcaaggccacccgcagcctgctcagcagcggggtgcccggcacggtggcgggtctgctgctggctcatcgccactacggccacctgcccctggggcgactgattgccccctcgattcgtctggcggaggagggggtggtggtgagcaaggccctggccgattccctggagactgcggctcccttgttgcggaccgatcccgaatcagctcggctgttcttccgcccagggagccagccttaccggccgggcgagcgtctgcgtcagccccagctcggcgccaccctgcggcgcatcgccgcccagggggagaggggcttctatcaggggccggtggcgcagcagctggtggccttgatgcgccgccggggaggcctgatcaatgctgaggatctgagcagctaccgggcccgccttcagccccccctggtgggcgattggcgcggccatcccgtgatcgccatgcccccgcccagctccggtggggtcaccctgatccagctgctcaacatcctggagggcttcgatctggcgtccctggggcccaacagcgccgcagtcctgcatccgatggcggaggcgatgaacctggcctaccgcgaccgcaaccgctggctgggcgacccccgcttcgtggcgatgcctctggagcggttactgagtcagggctatgccgatgagctgcgacgcacgatccggcccgagcgccaccggcctgcgcgcgacctcgacccgccggctgagggccgctctgccgaaagcctcaacaccacccatctctcggtgatcgatcgtgacggcacgatggtgtccaccaccaccaccctcaacttcccctacggcaacggcgtgagcgtgccgggcgccggcttcctgctcaacaatgagatggacgatttcacggccctcccgggtgccgccaatgccttcggtctggtgcagggggaggccaatgcgatcgcgccgcgcaagcaaccgctgagctcgatggcgcccaccctggtgctcacccccgggggtgacccgctgttggccaccggcagccccggcggcagccgcatcatcaccacggtgctgcaggtgctgctcaaccggctcgagcacggcctcaacctggcctccgcggtggctgccagccggatccacagccagcactggcccgacgagctggcggtggaggagggcttcagccccgacactctcagattgctggaggcgaagggacaccgctggcggctggcaccggccatgggggcggcccattcgctggaggcgctgcccggcggggggaccctgggggcggtcgatccgcggcgggcggaaggggccctggcgggcgagtga

SEQ ID NO: 58267 - protein, 596 aa, Synechococcus sp. WH 5701
MAAAELRRQRWALLPLTALALLPLPAPADVLQEASQRFQPLWSAGGMVASQEVEASRVGRDVLRAGGNAVDAAVATSFALAVTHPQAGNLGGGGFLVLWRPERLSRGRPPQPQEVRVGKGRAVTINFRESAPQAAGPDLLLDASGAVDRRKATRSLLSSGVPGTVAGLLLAHRHYGHLPLGRLIAPSIRLAEEGVVVSKALADSLETAAPLLRTDPESARLFFRPGSQPYRPGERLRQPQLGATLRRIAAQGERGFYQGPVAQQLVALMRRRGGLINAEDLSSYRARLQPPLVGDWRGHPVIAMPPPSSGGVTLIQLLNILEGFDLASLGPNSAAVLHPMAEAMNLAYRDRNRWLGDPRFVAMPLERLLSQGYADELRRTIRPERHRPARDLDPPAEGRSAESLNTTHLSVIDRDGTMVSTTTTLNFPYGNGVSVPGAGFLLNNEMDDFTALPGAANAFGLVQGEANAIAPRKQPLSSMAPTLVLTPGGDPLLATGSPGGSRIITTVLQVLLNRLEHGLNLASAVAASRIHSQHWPDELAVEEGFSPDTLRLLEAKGHRWRLAPAMGAAHSLEALPGGGTLGAVDPRRAEGALAGE

SEQ ID NO: 58268 - DNA, 1887 bp, Synechococcus sp. WH 7805
  CDS (1)..(1887): transl_table=11
atgcgacgggttgggagtcgatgggactgcctctgtcatggtctgatcctgcagccgatcccgaaccccacgctaggcagtgcaggtgcctgtctcgccagactccacatcagccctgccaatcaccgcaccaccttggtgatccgcatcctgctgctgttgctctccctcagcctcacccccggcagcgcagctccggtgagtcgcgaggatcccgagcaagcggacaccagaaaacaaaccatgtccaccgccgccggttcggcggtggtcgtcactgccaaccccttggccagcaaggcagccctgggcgttcttgccagcggtggccacgccgtggatgccctggtcgcagcgcaggcggtgctggctgtggtggaaccgcagagttccggactcggaggcggaggcttcctcttgcactgggatgcccgtcgtcaggccctggaggttttcgatggccgtgaaacggccccggcgcgcagtcgcagcgacgaccttcttcagccctccggtgaaccgctgtcctaccgggcggccacccgccatccgcatgcgatcggagtgcccggaaccgtagccctgctctgggaggcccatcaacagctggggcaacggccatggtccagcaccctcacgcctgccatccgtctggcccgcgatgggttcctgcccagcccgcggctgcgccgctccgtggccctggcccagcgcctcggtgccagccataaccatgcttttcaacagctttacctgcctggcggaacgccgctgccagcaggccgtctgttccgcaacccagccctggcccgcaccctggaggtcctggcccaggaggggggccgagccttttaccaaggcccgctggcacaacggatccagcgcggcgtcaacgctctgcagagtcaagaaccaggcttcaaaggctggaccgccgcggatcttgcctcctattccgtggtgcgccgagctcccctctgccgggtgcaaatgaaacaccgcgtctgcacagtgccccctccgagcagcggcggactggcggtgttgcagaccctggccctgctcgatgcaaccggcagcttcaacgatccatcgaacccacaaagctggcgccatctggtcctggcggaatcctgggccgacgccgatcgcctctactgggttcacgatccaattgatggcaccattcccacccagggactactggatccggcttacatccgggcccgtgtccaggccatgcaggcctcacccgaacgcgtggcgcagccgggtctgccgccagggatgaagcggtttcccttcggtcgccccgggcccggcaccgaactgggcacctctcacgtcacgatcgtggacgggaggggcaatctcgccagctacaccacaacggtggaaaccgttttcggcagccgcaatctggtggagggcatggtgatgaacaaccagctcactgatttcgactggcggccagtggtcgggggcctccccgtggccaaccgccgccgtccagggcgcaggccggtgtcgtcgatggcacccacgatcgtgttcaacggtgaccagccggtcctggcgctgggcagtccggggggaaagcgcatcccccactacatcagtcgggtgctgctggccgcactgccgtgggctgagcctccggcccgatcggttgggctgccgttggtgtctccccagggaaacacccttgtgatcgagaggaaaccgccgctcccctggcccgtcaatcccaatgaactcaatgcacccggccgcgagctgcgcctccagaccctgggcagcggcatcggcttggtgcaacggatcggcaatcgctggcatggagccgccgaccctcgtcgggaaggaacagccctggccctgccgtga

SEQ ID NO: 58269 - protein, 628 aa, Synechococcus sp. WH 7805
MRRVGSRWDCLCHGLILQPIPNPTLGSAGACLARLHISPANHRTTLVIRILLLLLSLSLTPGSAAPVSREDPEQADTRKQTMSTAAGSAVVVTANPLASKAALGVLASGGHAVDALVAAQAVLAVVEPQSSGLGGGGFLLHWDARRQALEVFDGRETAPARSRSDDLLQPSGEPLSYRAATRHPHAIGVPGTVALLWEAHQQLGQRPWSSTLTPAIRLARDGFLPSPRLRRSVALAQRLGASHNHAFQQLYLPGGTPLPAGRLFRNPALARTLEVLAQEGGRAFYQGPLAQRIQRGVNALQSQEPGFKGWTAADLASYSVVRRAPLCRVQMKHRVCTVPPPSSGGLAVLQTLALLDATGSFNDPSNPQSWRHLVLAESWADADRLYWVHDPIDGTIPTQGLLDPAYIRARVQAMQASPERVAQPGLPPGMKRFPFGRPGPGTELGTSHVTIVDGRGNLASYTTTVETVFGSRNLVEGMVMNNQLTDFDWRPVVGGLPVANRRRPGRRPVSSMAPTIVFNGDQPVLALGSPGGKRIPHYISRVLLAALPWAEPPARSVGLPLVSPQGNTLVIERKPPLPWPVNPNELNAPGRELRLQTLGSGIGLVQRIGNRWHGAADPRREGTALALP

SEQ ID NO: 58270 - DNA, 1752 bp, Pseudoalteromonas tunicata D2
  CDS (1)..(1752): transl_table=11
atgtataaattaagttcttatttattatgcgcgttactgccactaagtgtattaagccaaacacctgtccgcgaagatcgtgaacccgaagcaaaaactggttttgaaattaaaaaaactgtgattggacaaaaatacatggtcgcggctgcaaacccttatgcagtaaaagccggacaagccatgcttgagcaaggcggtagtgcggtcgatgcagcaattgcggtgcaattagtactgactttagtggaaccacaatcatctggcattggtggtggggcgtttattctccattatgatcagcaaaaaaatacgctgatcacttacgatggtcgtgaaacggcacccgcaactgcaacccctgaattatttttagataataatggcaaagcggtgccttggataaaagcggttgttggtgggcgctctgtaggagtgccgggtgtacttgccgcacttgcaaaagcacatgctaaagatggaaaactgccatgggctagtttatttaaacctgccattgaattagcagaacaaggttttgttgtatcacctcgactagctttgttgttgaaaaagcagtttaacccaggtgttcatcagctagctgttacaaaagactatttttttcctaatggagaagccttaaaagcgggcacaattaagaaaaaccctgagttagccgctttttatcgtacacttgccaaagaaggtatcagtgctttttaccaaggtgataatgctaaaaagttagccgaaactgttcagaattcagcagtcgctcctggtttattaaccgaacaagacgttaataactaccaagcaaaactgcgtgaaccagtttgtgcgccatatcatcagtataaagtatgctctatggggccgccgagttccggtggcattgccgtgcttgaaatgttaagtcttcttgagcaaaaaaacttaaagcaatatcaacctaatgatgtaatggcattacattattttactcaagcatcgcgccttgcttttgccgatcgcgatgtctatctgggagatccagattttgtctcgcttgatgtcatgcgattacttgataaagagtatattaatacccgagcaaaattaattactgacaaagacatgggtgaagcttcggtaggtgagcctaatattaaactggcctttgccaaagatgatgcgtatgaaatgccatccacaagtcatatgtcaatcattgatgcaaaaggcaatgctatttcgatgaccacttcaattgaaatggcgtttggttcggccttgatgaccaatggttatttattaaataatcaattaaccgattttgcgctttcaccacataaaaatggtaaacctctgattaatcgtgttgaaggaaataaacgaccacgtagttcgatgtcaccgatgatggtgtttaatgccgatggttcgcttcggttaattgtcggttctccaggcggcagtcgtattattaattacgttgcacaaaccattataggggtactcgattggcaattaagccttcagcaagcgattgatttacccaaaatcaccaatagaaacaaaatcacttctcttgaaaaagacacagctcttgttgatgcaaaaacaacgtttgagcaacttggtcatactgtacaaatggttgatttgaactctggtttacatggtatcgaagttattaatggcaaatattatggtggagcggatcctcgaagagagggtatcgttttatctgatttgacaacccactaa

SEQ ID NO: 58271 - protein, 583 aa, Pseudoalteromonas tunicata D2
MYKLSSYLLCALLPLSVLSQTPVREDREPEAKTGFEIKKTVIGQKYMVAAANPYAVKAGQAMLEQGGSAVDAAIAVQLVLTLVEPQSSGIGGGAFILHYDQQKNTLITYDGRETAPATATPELFLDNNGKAVPWIKAVVGGRSVGVPGVLAALAKAHAKDGKLPWASLFKPAIELAEQGFVVSPRLALLLKKQFNPGVHQLAVTKDYFFPNGEALKAGTIKKNPELAAFYRTLAKEGISAFYQGDNAKKLAETVQNSAVAPGLLTEQDVNNYQAKLREPVCAPYHQYKVCSMGPPSSGGIAVLEMLSLLEQKNLKQYQPNDVMALHYFTQASRLAFADRDVYLGDPDFVSLDVMRLLDKEYINTRAKLITDKDMGEASVGEPNIKLAFAKDDAYEMPSTSHMSIIDAKGNAISMTTSIEMAFGSALMTNGYLLNNQLTDFALSPHKNGKPLINRVEGNKRPRSSMSPMMVFNADGSLRLIVGSPGGSRIINYVAQTIIGVLDWQLSLQQAIDLPKITNRNKITSLEKDTALVDAKTTFEQLGHTVQMVDLNSGLHGIEVINGKYYGGADPRREGIVLSDLTTH

SEQ ID NO: 58272 - DNA, 1749 bp, marine gamma proteobacterium HTCC2207
  CDS (1)..(1749): transl_table=11
gtgatcggcagcagctttgcctggagcaatgacaacgcgattattgattccagcacccgttttcatccggttatgagcgattcgggtatggtcgtctctcaagagatattcgccagccaagtgggcgccgaaatacttgccctaggcggtaatgcagtcgatgcagccgtagccacagggtttgccctcgcagttaccttgccgcgggcggggaatttaggtgggggcgggtttatgcttatccacctggccgaagaaaacaaaaccctgagcattgattatcgagaaatggcgccaaccgaggcctctagagatatgtttctcgacactgaaggggacgttgataacgctaaggcacgttttagtattcagtcatcaggcgtgcccggtacagtcgccggcctgcttcacgcactggataactacggtactctgagtttaaaacaggtcttacagccggccatcgacttggcccgcaatggttttcccgtcagcactgatctagcggcgtcactgcaggcacggcaaccgaccctgcataaaaacccagcgtctaaaagctacttttataaagccgatggctccggctataagtatggtgaaagcctggtgcaatccgatttggcggcgacccttgagcgcatcgcaaaaagtggcaagcgcggattttataaaggtagaacagcacagctaatcattgcagaaatgcggcgcagcggcggcctgatcaatcacagagatctggcggactacagggtggttgaacgagccccgatttgtggtgattatcgcggtaatcgggtgtgcacaatgccgccgccctcatctggtggtgtgcatatgcttcagatgctcaatattcttgagggctgggatcttcaggccttggaccacaacagcgcggcgtatattcaccgtttagttgaatctatgcgccgagcctatgccgatcgcagttattatctgggcgacccagacttctttccagtgccggtcgctgaactaaccgataagaaatatgccgattttttacgtggccaaattgatctgcagagtgccagccgttcgaaggatattagccccggtctcgccagcgctgctgcacataatcagagtcaagtggacaagctccgcagtattcctcaggagagcaccgagacaactcactttagcgcttgggatcgctggggtaatgtggtcagcaacacttacacgcttaacttttcctacggtaatggcatctctgtcgctggcgcaggttttctgctcaataatgagatggatgatttttctgcaaagcccggctcgccaaatggctacggtcttataggcggcgcagccaacgccatagaacctaaaaaacggcctctgtcttcgatgacgccgaccattgtgtttaatcgcgatggtgcgccggtactggctacaggcagtcccggtggcagcactattatcaccgttgttatgcagatgattttaaatattgtcgattttgatatgaacgtggctgaggcaactgccgcgccgcgcattcatcatcaatggttgcctgacagggtgttctatgagtccggagtctctgctgacacgctgggtctgttgcgaggtatggggcaccagctcagtgataaaacaagacgactgggtgccaccgagagtattcaatctgatggcagtacgccgtttctctacggcacagcggaccaccgtcgcgatggttctggtgtcgctgtgcccgctgcggactaa

SEQ ID NO: 58273 - protein, 582 aa, marine gamma proteobacterium HTCC2207
MIGSSFAWSNDNAIIDSSTRFHPVMSDSGMVVSQEIFASQVGAEILALGGNAVDAAVATGFALAVTLPRAGNLGGGGFMLIHLAEENKTLSIDYREMAPTEASRDMFLDTEGDVDNAKARFSIQSSGVPGTVAGLLHALDNYGTLSLKQVLQPAIDLARNGFPVSTDLAASLQARQPTLHKNPASKSYFYKADGSGYKYGESLVQSDLAATLERIAKSGKRGFYKGRTAQLIIAEMRRSGGLINHRDLADYRVVERAPICGDYRGNRVCTMPPPSSGGVHMLQMLNILEGWDLQALDHNSAAYIHRLVESMRRAYADRSYYLGDPDFFPVPVAELTDKKYADFLRGQIDLQSASRSKDISPGLASAAAHNQSQVDKLRSIPQESTETTHFSAWDRWGNVVSNTYTLNFSYGNGISVAGAGFLLNNEMDDFSAKPGSPNGYGLIGGAANAIEPKKRPLSSMTPTIVFNRDGAPVLATGSPGGSTIITVVMQMILNIVDFDMNVAEATAAPRIHHQWLPDRVFYESGVSADTLGLLRGMGHQLSDKTRRLGATESIQSDGSTPFLYGTADHRRDGSGVAVPAAD

SEQ ID NO: 58274 - DNA, 1785 bp, Aspergillus niger
  CDS (1)..(1785)
atgtcgaccaagccagactgttatgcgcaattcatgccttttccaagcagaagaagcactgttcacagtactaatggaatagtctcgtgcactcaaccgcttgctgcaaatgcaggtgtccaaatcttgatgaagggcggaaatgcagcagatgctgcagtcgcagtggctgctgctttgaacgtcaccgagccttgctcaacaggaattggcggcgatatgttctgcttattctctgaggcaaagaccaagaggatccgcgcccttaacggttctggacgctatcccatgggtgctacggttgaccagattcggcatgatctcaacgtatcttcaaaatatagaggctcgattcctcttgacagtgcgttgtctataaccacaccaggcgccgctgctgggtgggttgacacgctagaaaaattcgggagtggaaaactgtcattaggacaggttttggagcctgccatcaaactagcagaagagggttttccgtcagaaagcagtactgacaaaggtctctcaaagtggaaattaaacgaagatatgatccgaaaagcctctcccaacttccgtgaaatgctgaagccggaccctgcggcaaaagacggggtaagattccctagtccaggagaaataatcagaaatccgaatcttgctcaaacgtttcgcaaattggctacagaaggaaagaagggattctatgagggaagagttgccgaagaaatggtaaaggtggtgcaggatcttggtggttatctctcccttgaagacttaaagaagcacgcggagactggaagccaactggttaatccaatttcactgaagctgaacccgaagtgcttccgcgatattcaggctgagagtgatgagatcgtccaagtctgggagcatcctcctaatggccaaggaattgttgctcttatagctctgggcattcttgaggagctgcaacacaccggaaatctcccaaagttccaatcacaacatcacaacagtacggaatatctgcacgctataatcgaaagcctgagaattgcgttcgcggatgcgagctggtgggtgactgatccagacgtggtcaaggttcctgtccaagaaatgctcactcgctcctatctttctgagcgtgccaaacatttcgatccaggaagagcttcctctctctatacccacggcagcccagctcataatcactgcgacactgtctattttgcagttaccgacaaagacggtaacggggcatcctttataaacagcaactatgaagactttggctcatgcattatcccaaagcagtgcggtttcacattacaaaatcgtgggtcgaacttcagacttgacgacggtcatcctaacatccttgcaccgggaaaacgaccttatcataccataattcctgcgatggtaacaaaccaggatggatcattacattccgttttcggagtgatggggggcttcatgcaaccccaagggcatgtgcaggttctccttaatatgttggtattcaaccttagcccccaagcggccattgatgcccctcggatatgcattgggcctacatcaagcgaggaaggtagtccgacaatctttgtggaagagggaattgaacagcggactattgatggtctgactcatctcggacacaatattgtcgtattgaaaggtcacggcagatcagtttttggtcgcggtcaactaattcgatgccgccttgttgatggaaaaattatattcagcgcagggagcgatccccgcggcgacgggcaggcaattccggtttag

SEQ ID NO: 58275 - protein, 594 aa, Aspergillus niger
MSTKPDCYAQFMPFPSRRSTVHSTNGIVSCTQPLAANAGVQILMKGGNAADAAVAVAAALNVTEPCSTGIGGDMFCLFSEAKTKRIRALNGSGRYPMGATVDQIRHDLNVSSKYRGSIPLDSALSITTPGAAAGWVDTLEKFGSGKLSLGQVLEPAIKLAEEGFPSESSTDKGLSKWKLNEDMIRKASPNFREMLKPDPAAKDGVRFPSPGEIIRNPNLAQTFRKLATEGKKGFYEGRVAEEMVKVVQDLGGYLSLEDLKKHAETGSQLVNPISLKLNPKCFRDIQAESDEIVQVWEHPPNGQGIVALIALGILEELQHTGNLPKFQSQHHNSTEYLHAIIESLRIAFADASWWVTDPDVVKVPVQEMLTRSYLSERAKHFDPGRASSLYTHGSPAHNHCDTVYFAVTDKDGNGASFINSNYEDFGSCIIPKQCGFTLQNRGSNFRLDDGHPNILAPGKRPYHTIIPAMVTNQDGSLHSVFGVMGGFMQPQGHVQVLLNMLVFNLSPQAAIDAPRICIGPTSSEEGSPTIFVEEGIEQRTIDGLTHLGHNIVVLKGHGRSVFGRGQLIRCRLVDGKIIFSAGSDPRGDGQAIPV

SEQ ID NO: 58276 - DNA, 1734 bp, Arabidopsis thaliana
  CDS (1)..(1734)
atgtcgctggttcgaacagtgacgatcgttctttttataatcgcgtttctgcaaaacgctgcggctcagaaaagacagcaaagtattgttaagtctcgcggtgcggttgcgacagatgatggacggtgttctgttatcgggatgcgtgttcttcgtgaaggaggaaacgcgattgatgcgtctgtggctgctgctctgtgtttgggcgttgtaagtcccgcgtctagcggtataggcggtggagcgtttacagtggttaagatagctggtgggaaagaaattgcttatgattctagagaaaccgctcctctaagagccactgaggtaaaacgcgttttaaatatgtatggaggtaatgttgacctaaagaagaaaggagccttatcagtaggcgttcccggggaagttgcaggtctattcacggcttggaaacaacatgggaagctaccgtggaagcggttagtgactcctgcagagaaacttgcagagggattcaagatttccaagtatctttatatgcagatgaacgcgactagaagcgatatcttagcagacaaaggtctctctgacctatttgtttcaaatggagagctcaagaaaccagggacgatttgccataacccaaaattggctttaaccttgaagctaattggagagtacggtccaaaagcattttacaatggcacagttggggttaacctagcgagagatatcaaaaaatctggaggaataataactttgaaagatctgcaaagttatagagttaagattaaagaaccgttgtctgcagacattcttggatatagagtccttggtatgcctcctccttcatctggtggcgctgcaatgatgcttgttttgaacattctttctcaatatgggattccatcaggtgtttcaggccctctcggtgttcatcgactaatcgaggctctgaaacatgcattcgcagttagaatgaacctcggggatccagatttcactgatgttaccaaggttgtttcggatatgttgtcgccaaagtttgcaaaagacttgaagagcaagataaacgaccaaaaaacttttgatccaaaatattacgggggcatgtggaatcagatcgacgaccacgggacaagtcatttatcgatcatagaccgcgagaggaacgctgtgtctatgactagtacaataaatggttactttggggcattgatgctatctccgagcacaggaatagttctgaacaacgaaatggacgatttctcaatccctatgaaatctaacggtaacttagatgttccaccaccagcaccagctaacttcatccgtcctggaaaacgacctttgtcctctatgtcacccaccattgtactcaaggacggtaaagtgaaagccgctgtgggtgcgagcggaggagccaacattattgccgggacaacggaagtttacttgaatcattttttcctcaagatggatcctctttcttccgtcttagctccaagaatctaccatcagctgataccaaacagagcttcgtacgagaactggacaacagtattcaatgatcatttcgagattcctaaagcaacaagagttgtgttggagaagaaaggtcatgtcctatctcctattgccggagggacgattgctcagttcatagttcaagaatccggtgagaactccggtggaagaagtgagcttgtggcagttagtgatcctcgaaaaggagggttcccttcaggatattga

SEQ ID NO: 58277 - protein, 577 aa, Arabidopsis thaliana
MSLVRTVTIVLFIIAFLQNAAAQKRQQSIVKSRGAVATDDGRCSVIGMRVLREGGNAIDASVAAALCLGVVSPASSGIGGGAFTVVKIAGGKEIAYDSRETAPLRATEVKRVLNMYGGNVDLKKKGALSVGVPGEVAGLFTAWKQHGKLPWKRLVTPAEKLAEGFKISKYLYMQMNATRSDILADKGLSDLFVSNGELKKPGTICHNPKLALTLKLIGEYGPKAFYNGTVGVNLARDIKKSGGIITLKDLQSYRVKIKEPLSADILGYRVLGMPPPSSGGAAMMLVLNILSQYGIPSGVSGPLGVHRLIEALKHAFAVRMNLGDPDFTDVTKVVSDMLSPKFAKDLKSKINDQKTFDPKYYGGMWNQIDDHGTSHLSIIDRERNAVSMTSTINGYFGALMLSPSTGIVLNNEMDDFSIPMKSNGNLDVPPPAPANFIRPGKRPLSSMSPTIVLKDGKVKAAVGASGGANIIAGTTEVYLNHFFLKMDPLSSVLAPRIYHQLIPNRASYENWTTVFNDHFEIPKATRVVLEKKGHVLSPIAGGTIAQFIVQESGENSGGRSELVAVSDPRKGGFPSGY

SEQ ID NO: 58278 - DNA, 1725 bp, Arabidopsis thaliana
  CDS (1)..(1725)
atgtcgctcgttcgtactgcgacgatcgctcttcttctaatcgcgtttctgcaaaacgctaacgctgtgaaaaatctgcaaagtattgttgcgtatcacggtgcggttgcgacagacgatggacggtgttctgcaatagggacgaatgttcttcgtcaaggaggaaacgcgattgatgcgtcggtggctgctgccctttgtttgggcgttgtcagtcccgcatctagcggtataggcggtggagcgtttacaatgattaagctagctaatggcacggaagttgcttatgattccagagaaaccgctcctctaagcgccactgaggatatgtatggtgataatcctgagcgaaagaagaaaggatccttgtcagtaggcgttcccggggaagtcgcgggtctatacacggcttggacacaacacgggaagttaccgtggaagcagttagtagaacctgctgagaaacttgcagctgaaggattcaagatttcaaaatatctctatatgcagatgaatgcgactagaagcgatatcttagcggacaaaggtctctctgagctatttgtttcaaatggagagctcaagaaaccaggggcgatttgccgtaacccgaaattggctgatacactaagccaaatcgctgaatacggtccaaaagcgttttacaatggcacggttgggtttaacctagtgagtgatatacaaaaagccggagggataataactttgaaagatttgcagaattacaacgttaaggttaaagaaccattatctacggagattcttggataccgattactcggcatgcctcctccttcatctggtggccctgcaatgatgcttattttgaacattcttgctcaatatggtattccatcgggtgtttccggccccctcggtgttcatcgactagttgaggctctcaaacatgcattcgcagttagaatgaacctcggggatccagattttgtccctgaagttactaatgttgttgcagatatgttatctccaaagtttgcacaagacttgaagagcaagataaacgatgagaagacctttgatccaaaatattacggtggcaaatggggtcagatcaaggatcatgggacgagccatttatcgataatagattctgagagaaatgctgtttcaatgactagtacaatcaacggatactttggggcaataatgctgtctccgagcaccggaatcgttctaaacaacgaaatggacgatttctcgatcccgacgaaatccggaggtgacccagatgtgcccccaccagcaccggctaacttcatccgaccggggaaacgacctttgtcctctatgactcccaccattgtactcaaggacggtaaagtgaaagcagcattgggtgcgagtggaggaatgtacatcatcgccggtacaacacaagtttacttaaatcatttcttcctcaacatggatcctctctcttccgttgttgctccaagaatctaccaccagctgataccgaacaaagcttcgtatgagaattggacgacagtgtatagtgaccatttcgagattcctgaagagataagacttgtgttggagaagaaaggtcaagtcctaacgccgatcgccggagggacgatttctcagctcatagttgaacaatccgatggaaaatccggtggaattagtaagcttgtggcggttagtgatccaaggaaaggagggttcccttcaggatattga

SEQ ID NO: 58279 - protein, 574 aa, Arabidopsis thaliana
MSLVRTATIALLLIAFLQNANAVKNLQSIVAYHGAVATDDGRCSAIGTNVLRQGGNAIDASVAAALCLGVVSPASSGIGGGAFTMIKLANGTEVAYDSRETAPLSATEDMYGDNPERKKKGSLSVGVPGEVAGLYTAWTQHGKLPWKQLVEPAEKLAAEGFKISKYLYMQMNATRSDILADKGLSELFVSNGELKKPGAICRNPKLADTLSQIAEYGPKAFYNGTVGFNLVSDIQKAGGIITLKDLQNYNVKVKEPLSTEILGYRLLGMPPPSSGGPAMMLILNILAQYGIPSGVSGPLGVHRLVEALKHAFAVRMNLGDPDFVPEVTNVVADMLSPKFAQDLKSKINDEKTFDPKYYGGKWGQIKDHGTSHLSIIDSERNAVSMTSTINGYFGAIMLSPSTGIVLNNEMDDFSIPTKSGGDPDVPPPAPANFIRPGKRPLSSMTPTIVLKDGKVKAALGASGGMYIIAGTTQVYLNHFFLNMDPLSSVVAPRIYHQLIPNKASYENWTTVYSDHFEIPEEIRLVLEKKGQVLTPIAGGTISQLIVEQSDGKSGGISKLVAVSDPRKGGFPSGY

SEQ ID NO: 58280 - DNA, 1725 bp, Oryza sativa
  CDS (1)..(1725)
atgaacgctcgacgccttcacaaatgggcggccaccgcgcggctggtgctcctcctcttagccgctgctgcggcggcggcggcggcggcggcggggcgcagggaggtggtgacctcgccgcacggcgccgtggcggcggacgacgggcggtgctcgaggatcgggcgcgacgcgctccgcgacggcggtaacgccgtggacgccgccgtcgccgcgtcgctctgcctcggcgtcgtcagcccggcgtccagcggggtcggcggcggcgccttcatgctcgtccggctcgccgacggcaccgccctcgcgtacgactcccgcgagaccgcccccctcgccgcctcccaggatatgtatggtggcaacgaaacgctgaaagcaaggggagctctatccatagcagttccaggggaaattgcaggtctgtatgaggcatggaagcgccatggcaagcttccttggaagaggttagtgatgccagcagcaaagcttgcccgtgcattcagagtgtcaccttatctgaggaagcagatggaggcaaccagagatggaattctccaaaataagggaataagtggagtgtacacctcaaatggagatatccttaatgttggagatgtatgccgcaacattaggcttgcaagaacactggtggctgtcgcggagaaagggccggatgtgttctacaaaggcgcagttggtgatcagctggcgaaggatattcaggaagttggagggatcataacaatggaagatctgaagaaataccaagttaagatacgtcggccacttttagagaatgtattgggactgacagtattaagcatgcctcctccttcagctggtggtgctgggctaatgcttgttctgaatatccttactcagtatggcctccctgctggtttttctggctcacttgggatccatcgtctaattgagtccttgaagcattactttgcaataaggatgaaccttggcgaccctgagtttgtaaatgttaacgaagtcgtctctgatatgatgtcccctaaatttgctgctgacctgaagaaaaccatctatgataacatgacatttgaccctaaacactatggtggcaggtggaacatccttcaggaccatggaacaagccacctgtccatcgtcgacagcgagaggaacgccgtttcgatgaccaccactgtcaacgcgtactttggatccctgatcctgtctccgagcacaggcattttgctcaacaacgagatggacgacttctccatgccggcgaacacgtcggccaactctccgccgcctgcccccgccaatttcgttaggcctctgaaacggcctctctcctcgatgactccgacgataatactcaaggatggcaatctgaaggctgcggttggagctagtggtgggagcatgatccctgctggaaccatggaagtgctcctcaaccatttcgtcaagaacatggacccgttgtcctctgtcatggcgccaagagtgtatcaccagctgatcccgaacgtggtccagtacgagaactggacgacggtgaccggcgaccacttcgagctggacgccgcgacgagagccgacctgcggaggaaaggccacgtcttggagccgctcgccggagggaccatcagccagctcgtcgtggacgacgtcgagcgccacggcggtctgaccgccgtcagcgaccccaggaaaggcggcttcccggccggctattag

SEQ ID NO: 58281 - protein, 574 aa, Oryza sativa
MNARRLHKWAATARLVLLLLAAAAAAAAAAAGRREVVTSPHGAVAADDGRCSRIGRDALRDGGNAVDAAVAASLCLGVVSPASSGVGGGAFMLVRLADGTALAYDSRETAPLAASQDMYGGNETLKARGALSIAVPGEIAGLYEAWKRHGKLPWKRLVMPAAKLARAFRVSPYLRKQMEATRDGILQNKGISGVYTSNGDILNVGDVCRNIRLARTLVAVAEKGPDVFYKGAVGDQLAKDIQEVGGIITMEDLKKYQVKIRRPLLENVLGLTVLSMPPPSAGGAGLMLVLNILTQYGLPAGFSGSLGIHRLIESLKHYFAIRMNLGDPEFVNVNEVVSDMMSPKFAADLKKTIYDNMTFDPKHYGGRWNILQDHGTSHLSIVDSERNAVSMTTTVNAYFGSLILSPSTGILLNNEMDDFSMPANTSANSPPPAPANFVRPLKRPLSSMTPTIILKDGNLKAAVGASGGSMIPAGTMEVLLNHFVKNMDPLSSVMAPRVYHQLIPNVVQYENWTTVTGDHFELDAATRADLRRKGHVLEPLAGGTISQLVVDDVERHGGLTAVSDPRKGGFPAGY

SEQ ID NO: 58282 - DNA, 1816 bp, Aedes aegypti
  CDS (1)..(1722)
atggcagccaccatcgtaggggtgtccttgattactctgtccgccgtttacgttctgcacgaggaggaggtggaagatgttctggacattgatgacgaagatagggatgtccacaaacgggttggagcagttgcgtccaatgcctacgagtgtgcttcgataggagcggatattctacgggctaatggctcggcagctgatgctgctatcgcaatgatgatatgtgaagagatcgcctgtccggagagtgctggaattggtggtggattccttcttacgctgtatcagcgtgaaactggcaaagtgctggtaatggatgctcgagagattgccgcccgcgcatcggcggaagatatgttcgtcaacttcaagaatgggacagctcacggagcgttggccatagcaacacccggagccctgaaaggttactgggtgctgcatgagaagtttggaaaattgccttggagaaaactgatcgaaccgtcgattgaactttgttacagaggtcatattgtgaatccatacatggaagatgctttgctggatgtacggaaagagatactggaaactccttccttgcgagatatatacgtcaatccggaaactggagatgtgtggagggatggtgatcgaatttataggccagactttgcggagagtctgaaagtaatcgccaaagaaggagcagatgcattgtattctcgaaaaggatctctgcttccgaaacttatgcaagacctcaaagagttcgggagcattctagcagaagaagacttttatagctatgaacctaggtggtttgccccggtatcaaccaaagtgcgaggtgataacactgtctacagcgccgctttacccgggggaggaaccattttggtccacatgctgaacgtcctcgatggatacccagatctcgacccgtatgacccggtaacatggcaacgaatcgtcgaaacgttcaagcacgcctacggtatccgcactcgtcttggcgacccatcgtttgtaccgggtatcgaggagctgattcgcaatctcacggatcggggttatgccaatcttatcagggataagatcaaggatgatcatacgttctacgactacgactactacggcgcggatttctctccgtctgaagatcacggaacggcacacgtgtctgtgttggcacccaatggagatgccatagctgtcacgagtacaatcaacgactactttggcgcccaactgcgatcccctcggacggggatcatcctcaacggagaaatggacgacttctcggttcccggggtgatcaacatcttcggcgttccggcttctccagcaaacttcatcgctccgggaaagcggccactttcttccatggcccctagcatcgtagttgatggccgaggaaacgtgcggctgatcgcaggaggtgccggcggaaccagaatcaccacggctacgcttcaggttatcctgcgaaaggtgtttttcggtcagaatttacggacggcgatggatggatttcgagtgcatcaccagctggccccgatggaagtggaatacgagcatgacgtggatccagctgtattggaacagctggaagcgcggggacattctttgagaagagttaaaagggtagcaaccatgactgcagtggcgagagaggacgatggcacggtaacggctgccttcgatccgaggaggccaggcagtgttgcgatagtggagctctagaaggtagttaataacaatactgaatgtgatatttggtttatctcaaaacgtagggtaataaaggtaaaaggtggtaaaatgccaccgtgcgttt

SEQ ID NO: 58283 - protein, 573 aa, Aedes aegypti
MAATIVGVSLITLSAVYVLHEEEVEDVLDIDDEDRDVHKRVGAVASNAYECASIGADILRANGSAADAAIAMMICEEIACPESAGIGGGFLLTLYQRETGKVLVMDAREIAARASAEDMFVNFKNGTAHGALAIATPGALKGYWVLHEKFGKLPWRKLIEPSIELCYRGHIVNPYMEDALLDVRKEILETPSLRDIYVNPETGDVWRDGDRIYRPDFAESLKVIAKEGADALYSRKGSLLPKLMQDLKEFGSILAEEDFYSYEPRWFAPVSTKVRGDNTVYSAALPGGGTILVHMLNVLDGYPDLDPYDPVTWQRIVETFKHAYGIRTRLGDPSFVPGIEELIRNLTDRGYANLIRDKIKDDHTFYDYDYYGADFSPSEDHGTAHVSVLAPNGDAIAVTSTINDYFGAQLRSPRTGIILNGEMDDFSVPGVINIFGVPASPANFIAPGKRPLSSMAPSIVVDGRGNVRLIAGGAGGTRITTATLQVILRKVFFGQNLRTAMDGFRVHHQLAPMEVEYEHDVDPAVLEQLEARGHSLRRVKRVATMTAVAREDDGTVTAAFDPRRPGSVAIVEL

SEQ ID NO: 58284 - DNA, 1683 bp, Aedes aegypti
  CDS (1)..(1683)
atggtctgtaatcgaaatgtattcgctttgttggtttgcgtaacagctgtagcgatagcttggttctatgtgatcaatcagaagcaagatgtggagcgtgtgcggcgtgaaggagcggtggcttccaatgcctacgaatgcgcctccgtaggtgcggatattctacgccagggaggttctgtagcggatgttgctgtggccatgatgttatgtgaggaagtagcttgccctgagagtgccgggattggaggtggcttcctacttacatactaccaccgtgattcgggcaaagttgaagtattcgatgctcgtgagattgctgcgcaggccgcctcgcaagacatgttcgttgatcacaagaatgagacggcacatggtggcttggccattgcgactcctggagcattgaaaggttattgggtgttacatcaacggtatgggaagctgccttggagacgtctggtggaaccttcgattgagctttgctacagtgggcatacggttgatccttacatggcacaggcattgcaggacaggcgggataagatatttgttgacccacaaacaggggatgtttggaaacaaggggaccgattcaggaggcctctgttcgccgagacgctcaaggttgtggccgacgaaggtgccgatgctctgtattcagcgaaaggttctctacttcccaaggtcatgtccgatttgaaggattttggaagtattgttacggagaacgacttctatgactacgatcctcgatggctatcaccggtttcaaccgaaatgcgtgacgggaaaacagtgtacagtgctgcccttcccggcggtggaacaatattagttcatatgctgaaggttctagatgggttcaaaaaccttaatccagacgacccaataacttggcaacgtgtggtagagactttcaagcacgcatatggtgtccgtaccagactaggggatcctccattcgtcgtcggaattgaggatctcatccagaatctcaccagctcggactacgctgattttataagggataaaatcagcgatgataaaacctacctaaactatgatttctacggtgcagatttcactacgcctgatgatcgcggaacggcgcacgtgtcaattttgggaccaaacggagacgcgataggtgtgaccagtaccgttaacgatttctttggcgcccacttgcgatcgcctcgaacggggatcatcttcaacggagagatggacgacttttcgacccccggagtcgtcaatatcttcggcgttccggcatcaccggcgaactacattgcgcctgggaagcgacctctatcatcaatgtcgccaacgatcgttgtggaccaaaacggggacgtccgtttgatagcgggtggtgctggtggaacacgaatcaccactgccactcttcaggtggtgctgaggaagattatatttgggcagagtctggcggaggcaatggatggccctcgagtgcaccatcaactggcaccgatggaagtagagtacgaaggatctgtagacactcggatcatcgatggactgatagcccgagggcattcgctgaggaaagtgaaacgagttgccacgatgacggccgtggcgagggaggatgacggtcgggttacggcagcgttcgatcccaggaggccgggaagtgttgagattgtagaattttga

SEQ ID NO: 58285 - protein, 560 aa, Aedes aegypti
MVCNRNVFALLVCVTAVAIAWFYVINQKQDVERVRREGAVASNAYECASVGADILRQGGSVADVAVAMMLCEEVACPESAGIGGGFLLTYYHRDSGKVEVFDAREIAAQAASQDMFVDHKNETAHGGLAIATPGALKGYWVLHQRYGKLPWRRLVEPSIELCYSGHTVDPYMAQALQDRRDKIFVDPQTGDVWKQGDRFRRPLFAETLKVVADEGADALYSAKGSLLPKVMSDLKDFGSIVTENDFYDYDPRWLSPVSTEMRDGKTVYSAALPGGGTILVHMLKVLDGFKNLNPDDPITWQRVVETFKHAYGVRTRLGDPPFVVGIEDLIQNLTSSDYADFIRDKISDDKTYLNYDFYGADFTTPDDRGTAHVSILGPNGDAIGVTSTVNDFFGAHLRSPRTGIIFNGEMDDFSTPGVVNIFGVPASPANYIAPGKRPLSSMSPTIVVDQNGDVRLIAGGAGGTRITTATLQVVLRKIIFGQSLAEAMDGPRVHHQLAPMEVEYEGSVDTRIIDGLIARGHSLRKVKRVATMTAVAREDDGRVTAAFDPRRPGSVEIVEF

SEQ ID NO: 58286 - DNA, 1734 bp, Aedes aegypti
  CDS (1)..(1734)
atgctcttcaacctcagcaagaagaaactcttgctgttttcgacacttgcagctatcgttgtggtggcgttagtcctaggcttgtacttcggtctccgcagtgatgactccgatgagaagaaatatcttcctggagcagcggtagtctccaatggagatgaatgcgccgcaatcggtgcaggtattctgaggaaaggcggctcggcagtcgatgcagcgatcactcttatgatatgcgaagagctcacatcgccccaaagcacaggaatcggtggtggatttctggctacggtatacaaccggcagacgggagttgtagagacgatggatgctcgagaaatggcgcccgcagccgctacagaagatatgtttgtaggtgatggggatgctgctgtattgggagggctagcgatcggcactccgggcgttatcaaaggtttctgggagcttcatgaacgttacggaagcttaccatggaaggatttgttcgaaccggtgattgagttagctaggaatggtattagtgtaaatgagttcctcgtgagtgccttacaagcgcagcgaacaaatctacggacgattccatcgctccgagaattgttcgtaaatccagacactgacgacgtgtggaaactaggtgataacttgaaatacaccgcttttggtgataccttggaggttattgccaacgagggagctaacgcactgcatgcagcaaatggaacattattgccgaagatcctagaggacttgaaaagctttggcagcatcataacaaaggaagacttcctgaactacaaaccacgttggcttccaccagcgtacacaaagctacacgaaggatcaagcgtctacagtatgcctcttccgggaagtggatccattgccatcaatatcctaaacatactcgatggctatgaaaaccttcaggcagatgatcctctcacgtggcatcgggtggtggagagcttcaagcatgcctacggattgcgaacgcgagttggcgatcctgatttcatcccggagatccaagaactggtacagaatcttaccagcaaggattttgccacgttggtacgggaaaagatcgacagcaatcgcacgttcaccgattaccagtactacggagcagagttctctgaggaagaagatcacggaacggcacacatttccgtgttggctccgaacggtgatgcggtcgccatgaccggaaccatcaacacttacttcgggtgcaaacggcgatcaccatccaccgggatcatattcaacaatatcatggatgacttctcgactcctggagtgatcaactcgttcggagttcccgcttctccggcgaattacgtggcacccggaaaacggccactgtcgtcgatgaccccgaccatcgtagtagatgccgagggtgatgtccggatggttgtggggggagctggtggaacgcggatcactaccgctactgttctgttggttcttcaaagtgtatttttcggtcgggacctggaggagtcaatgaatgcaccgagattgcaccaccagctggcgccgatggcagccgatgtggagcaaagttttgatcaggaagtgatcaatggactgagggaacgaggtcatgaagtgagattgtcgacggggataggcactatgactgctatcgctagggaacgtgataataaggtaactgctgctttcgacccgaaaagaggtggtagttttgaggttttggacttgtga

SEQ ID NO: 58287 - protein, 577 aa, Aedes aegypti
MLFNLSKKKLLLFSTLAAIVVVALVLGLYFGLRSDDSDEKKYLPGAAVVSNGDECAAIGAGILRKGGSAVDAAITLMICEELTSPQSTGIGGGFLATVYNRQTGVVETMDAREMAPAAATEDMFVGDGDAAVLGGLAIGTPGVIKGFWELHERYGSLPWKDLFEPVIELARNGISVNEFLVSALQAQRTNLRTIPSLRELFVNPDTDDVWKLGDNLKYTAFGDTLEVIANEGANALHAANGTLLPKILEDLKSFGSIITKEDFLNYKPRWLPPAYTKLHEGSSVYSMPLPGSGSIAINILNILDGYENLQADDPLTWHRVVESFKHAYGLRTRVGDPDFIPEIQELVQNLTSKDFATLVREKIDSNRTFTDYQYYGAEFSEEEDHGTAHISVLAPNGDAVAMTGTINTYFGCKRRSPSTGIIFNNIMDDFSTPGVINSFGVPASPANYVAPGKRPLSSMTPTIVVDAEGDVRMVVGGAGGTRITTATVLLVLQSVFFGRDLEESMNAPRLHHQLAPMAADVEQSFDQEVINGLRERGHEVRLSTGIGTMTAIARERDNKVTAAFDPKRGGSFEVLDL

SEQ ID NO: 58288 - DNA, 1722 bp, Aedes aegypti
  CDS (1)..(1722)
atgacgggcaccatcgtaggggtgtccttgattactctagccgccgtttacgttctgcacgaggaagaggtggaggacgttctggacattgatgacgaagatggggatgcacaaaaacgggttggagcagttgcgtccaatgcctacgaatgtgctacgataggagcggatattctacgggctaatggctcggcagctgatgctgcaatcgcaatgatgatatgtgaagagatcgcatgtccggagagtgctggaatcggtggtggattcctgcttacgctgtatcagcgtgaaactggcaaagtgctggtaatggatgcccgagagattgccgcccgagcatcggcggaagatatgttcgtcaacttcaaaaatggaacagctcatggagcgttggccatagcaacacccggagccctgaaaggctactgggtgctgcatgagaagtttggaaaattgccttggagaaaactgatcgaaccgtcgattgaactttgttacaggggtcatattgtgaatccatacatggaagatgctttgcttgatgtacgtaaggagattctggaaactccttccttgcgagagatatacgtcaatccggatactggagatgtgtggagggatggtgaccgtatttacagaccagactttgcggagagcctgaaagtaatcgccgacgaaggagcagatgcattgtattctcgaaaaggatctctgcttccgaaacttatgcaagacctcaaagagttcgggagcattctaacagaagaagacttttatagctatgaacctcggtggtttgctccggtatcaacgaaagtgcgaggtgacaacactgtcttcagtgccgctctcccaggcggaggaaccattctggtgcacatgctggaagtcctcgatggatacccaaatcttgacccgaatgacccggtaacatggcaacgaatcgtcgaaacgttcaagcacgcctacggtatccgcactcgtcttggcgacccatcgtttgtaccgggtatcgaggagctgattcgcaatctaacagatcggagctatgccgaccttatcagggataagatcaaagatgatcatacgttctacgactacgactactacggtgcggatttctctccgtctgaagatcacggaacggcacacgtgtctgtgttggcacccaatggagatgccatagctgtcacgagtacaatcaacgactactttggtgcccaactgcgatcccctcggacggggatcatcctcaacggagaaatggacgacttttcggttcccggggtgatcaacatcttcggcgttccggcttctccagcaaacttcatcgctccgggaaagcggcctctttcctccatggcccctagcatcgtagttgatggccgaggaaacgttcggctgatcgcaggaggcgccggcggaaccagaatcaccacggcaacgcttcaggttatcctgcgaaaggtgtttttcggtcagaatttacggacggcgatggatggatttcgagtgcatcaccagctggcaccgatggaagtggaatacgagcatgacgtggatccagctgtattggaacagctagaagcgcggggacattctttgagaagagttaaaagggtagcaaccatgactgcagtggcgagagaggacgatggcacggtgacggctgccttcgatccgaggaggccaggcagttttgcgatagttgagctctag

SEQ ID NO: 58289 - protein, 573 aa, Aedes aegypti
MTGTIVGVSLITLAAVYVLHEEEVEDVLDIDDEDGDAQKRVGAVASNAYECATIGADILRANGSAADAAIAMMICEEIACPESAGIGGGFLLTLYQRETGKVLVMDAREIAARASAEDMFVNFKNGTAHGALAIATPGALKGYWVLHEKFGKLPWRKLIEPSIELCYRGHIVNPYMEDALLDVRKEILETPSLREIYVNPDTGDVWRDGDRIYRPDFAESLKVIADEGADALYSRKGSLLPKLMQDLKEFGSILTEEDFYSYEPRWFAPVSTKVRGDNTVFSAALPGGGTILVHMLEVLDGYPNLDPNDPVTWQRIVETFKHAYGIRTRLGDPSFVPGIEELIRNLTDRSYADLIRDKIKDDHTFYDYDYYGADFSPSEDHGTAHVSVLAPNGDAIAVTSTINDYFGAQLRSPRTGIILNGEMDDFSVPGVINIFGVPASPANFIAPGKRPLSSMAPSIVVDGRGNVRLIAGGAGGTRITTATLQVILRKVFFGQNLRTAMDGFRVHHQLAPMEVEYEHDVDPAVLEQLEARGHSLRRVKRVATMTAVAREDDGTVTAAFDPRRPGSFAIVEL

SEQ ID NO: 58290 - DNA, 1707 bp, Arabidopsis thaliana
  CDS (1)..(1707)
atgtcgctggttcgaacagtgacgatcgttctttttataatcgcgtttctgcaaaacctgcggctcagaaaagacagcaaagtattgttaagtctcgcggtgcttgcgacagatgatggacggtgttctgttatcgggatgcgtgttcttcgtgaaggaggaaacgcgattgatgcgtctgtggctgctgctctgtgtttgggcgttgtaagtcccgcgtctggactaggcggtggagcgtttacagtggttaagatagctggtgggaaagaaattgcttatgattctagagaaaccgctcctctaagagccactgagaatatgtatggaggtaatgttgacctaaagaagaaaggagccttatcagtaggcgttcccggggaagtcgcaggtctattcacggcttggaaacaacatgggaagctaccgtggaagcgttcagtgactcctgcagagaaacttgcagagggattcaagatttccaagtatctttatatgcagatgaacgcgactagaagcgatatcttagcagacaaaggtctctctgacctatttgtttcaaatggagagctcaagaggccagggacgatttgccataacccaaaattggctttaaccttgaagctaattggagagtacggtccaaaagcattttacaatggcacagttggggttaacctagcgagagatatcaaaaaatctggaggaataataactttgaaagatctgcaaagttatagagttaagattaaagaaccgttgtctgcagaacttcttggatatagagtccttggtatgcctcctccttcatctggtggcgctgcaatgatgcttgttttgaacatctttctcaatatgggatcatcagtgttcaggcctctcggtgttcatcgactaatcgaggctctgaaacatgcattcgcagttagaatgaacctcggggatccagatttcactgatgttaccaaggttgtttcggatatgttgtcgccaaagtttgcaaaagacttgaagagcaagataaacgaccaaaaaacttttgatccaaaatattacgggggcatgtggaatcagatcgacgaccacgggacaagtcatttatcgatcatagaccgcgagaggaacgctgtgtctatgactagtacaataaatggttactttggggcattgatgctatctccgagcacaggaatagttctgaacaacgaaatggacgatttctcaatccctatgaaatctaacggtaacttagatgttccaccaccagcaccagctaacttcatccgtcctggaaaacgacctttgtcctctatgtcacccaccattgtactcaaggacggtaaagtgaaagccgctgtgggtgcgagcggaggagccaacattattgccgggacaacggaagtttacttgaatcattttttcctcaagatggatcctctttcttccgtcttagctccaagaatctaccatcagctgataccaaacagagcttcgtacgagaactggacaacagtattcaatgatcatttcgagattcctaaagcaacaagagttgtgttggagaagaaaggtcatgtcctatctcctattgccggagggacgattgctcagttcatagttcaagaatccggtgagaactccggtggaagaagtgagcttgtggcagttagtgatcctcgaaaaggagggttcccttcaggatattga

SEQ ID NO: 58291 - protein, 568 aa, Arabidopsis thaliana
MSLVRTVTIVLFIIAFLQNLRLRKDSKVLLSLAVLATDDGRCSVIGMRVLREGGNAIDASVAAALCLGVVSPASGLGGGAFTVVKIAGGKEIAYDSRETAPLRATENMYGGNVDLKKKGALSVGVPGEVAGLFTAWKQHGKLPWKRSVTPAEKLAEGFKISKYLYMQMNATRSDILADKGLSDLFVSNGELKRPGTICHNPKLALTLKLIGEYGPKAFYNGTVGVNLARDIKKSGGIITLKDLQSYRVKIKEPLSAELLGYRVLGMPPPSSGGAAMMLVLNIFLNMGSSVFRPLGVHRLIEALKHAFAVRMNLGDPDFTDVTKVVSDMLSPKFAKDLKSKINDQKTFDPKYYGGMWNQIDDHGTSHLSIIDRERNAVSMTSTINGYFGALMLSPSTGIVLNNEMDDFSIPMKSNGNLDVPPPAPANFIRPGKRPLSSMSPTIVLKDGKVKAAVGASGGANIIAGTTEVYLNHFFLKMDPLSSVLAPRIYHQLIPNRASYENWTTVFNDHFEIPKATRVVLEKKGHVLSPIAGGTIAQFIVQESGENSGGRSELVAVSDPRKGGFPSGY

SEQ ID NO: 58292 - DNA, 1821 bp, Neisseria meningitidis
  CDS (1)..(1821): transl_table=11
atgccttgtatgaatcatcaatcaaactcaggcgaaggagtgcttgtggctaaaacatatttattgactgcattgataatgtctatgacaatctctggatgtcaagtcatccatgccaatcaaggtaaggttaatactcattctgctgtcatcacaggtgcagacgctcacacgcctgaacatgcaacgggactgaccgaacaaaagcaggtgattgcaagtgattttatggtagcgtcagccaatccattagcaacacaagctggctatgatatcttaaagcaaggcggtagcgctgcagatgcgatggtggcggtgcagacgacactaagcttggtagagccacagtcgtcaggcttgggcggtggtgcatttgtgttgtattgggataataccgccaaaacattgaccacatttgatgggcgtgagacggcaccgatgcgtgcgacgccggaattatttttggataaagatggtcaaccattgaaatttatggaagcggtggtcggtggtcgctcggtgggtacgcctgctatccctaaactgatggagacgatacatcagcgatacggtgtattgccttggggaaaattatttgatacgccgatccgcttggcaaaacaaggctttgaggtgtcgccaaggcttgccatctcggttgagcaaaatcagcagcatttggcacgctatccaaaaacagccgcttattttttgccgaatggtgtgccgctacaagcaggcagcttgctgaaaaatttagaatttgctgacagtgttcaggcgttagcagctcaaggtgcaaaagctctgcatactggtaaatatgcccaaaatatcgtttcagttgtccaaaatgctaaggataaccccggtcaattatccttacaagatttatctgattatcaagtggtggaacgcccgcctgtttgtgtgacttatcgtatttatgaagtatgcggtatgggtgcaccaagctcaggtgggattgctgtgggtcaaattttggggattttaaatgaattttcacccaatcaggtggggtatgatgctgaaggtttacgtctcttgggcgacgcttctaggcttgcgtttgcggatcgtgatgtatatttgggcgaccctgattttgtaccagtacccattcgccagttgatttctaaagactacctaaaacatcgcagccagctgcttgagcagtcggataaggcattgcctagcgtatctgcaggcgattttattcatgagtgggtgtcctcacaagcgattgagttaccttctaccagtcatatatcaattgtggataaggcgggcaatgtgctatcaatgacgacttccattgaaaatgcgtttggctcaactttgatggcaaatggctacctgctgaataatgagctgacagactttagttttgagccaataaagcagggcaaacaggtcgccaatcgtgtcgagcccggcaagagaccacgctcctcaatggcaccaaccatcgtatttaaagcaggcaagccttatatggcaatcggctccccaggtggtagccgtatcattggctatgtcgctaagacgattgtggcacatagtgactggaatatggatatccaagatgccatcagtgcacccaatttattaaatcgctttggtagctatgaactagaaacgggtacaaccgccctccagtggcaacaagcattaaatgatttgggctataagactgacgtgcgtgagctaaattcaggtgttcaagccattattatcgagccaagcaggctggttggtggtgccgatccacgccgagaaggtcgagtgatgggtgattag

SEQ ID NO: 58293 - protein, 606 aa, Neisseria meningitidis
MPCMNHQSNSGEGVLVAKTYLLTALIMSMTISGCQVIHANQGKVNTHSAVITGADAHTPEHATGLTEQKQVIASDFMVASANPLATQAGYDILKQGGSAADAMVAVQTTLSLVEPQSSGLGGGAFVLYWDNTAKTLTTFDGRETAPMRATPELFLDKDGQPLKFMEAVVGGRSVGTPAIPKLMETIHQRYGVLPWGKLFDTPIRLAKQGFEVSPRLAISVEQNQQHLARYPKTAAYFLPNGVPLQAGSLLKNLEFADSVQALAAQGAKALHTGKYAQNIVSVVQNAKDNPGQLSLQDLSDYQVVERPPVCVTYRIYEVCGMGAPSSGGIAVGQILGILNEFSPNQVGYDAEGLRLLGDASRLAFADRDVYLGDPDFVPVPIRQLISKDYLKHRSQLLEQSDKALPSVSAGDFIHEWVSSQAIELPSTSHISIVDKAGNVLSMTTSIENAFGSTLMANGYLLNNELTDFSFEPIKQGKQVANRVEPGKRPRSSMAPTIVFKAGKPYMAIGSPGGSRIIGYVAKTIVAHSDWNMDIQDAISAPNLLNRFGSYELETGTTALQWQQALNDLGYKTDVRELNSGVQAIIIEPSRLVGGADPRREGRVMGD

SEQ ID NO: 58294 - DNA, 1908 bp, Raphanus sativus
  CDS (1)..(1908)
atgggtcacaagatcctcgccgatcatcttctagaaaccaaccaaataacggtcggagaaaccaagaaacagagaactaacctgaccattactctttctctggttttgtttctttttctgggaactacaggtttttactgctttagtgacaacataacactttggttgtcgagacatgcgaccaatagtcacagtcttagccatgaaaaccttggtgacgcgatcgagtcagagaacggtgttgttgctgcggacgacggtcggtgctctgagattggcgcttctttcctcagaaaaggaggtcacgcggtggacgccgccgtagctacaaccttatgcgtcggtgttgttaatccgatggctagtggcatcggtggtggatcgttcttgatcgttagccaaggttccaaagctgaggcttttgacatgagagaaactgctccattagctgcttctaaggatatgtacaagaacgatgcaaatgcaaagtccataggcgcactgtcaatgggagtccctggagagttagcaggacttcacgaggcttggaaacgttacggacgtctcccatggaaaccactattcaaaccagctatcaaactagcgcgagacggtttcatcgtagctccatatctaggacgcgccatatcaacccactcttcaaagatactcaatgacaaaggcctgcgaagcatcttctcaagaaacggacaagttttgaagccaggtgacacttgctacaaccgggagctagctcggagcctagggacggtctccgagctaggaccggaggccttctacaacgggacggtaggcgagaagctcgtcgacgacgtgaaaacgatgggaggggtcatgacgatggatgatctaagaagctatagagttcgagtgacggatgcgatggctgtggatgttatggggtatactattcacgggatgccacctccttcgagcggaacagttggtttcacgatggtgatcaacatcttggagttatacactgcttcggggcatgatcttggtctgcaccgtttgatagaagcgatgaaacatatgttagctgctcgtatggatcttggagaccctgagttcgttaacgtaacaaactctataaaccaaatgctctcgaagcctaatgctgaagagatacggaagaggatcttggacaacactacgttccctcctgagtactatttgagccgttggagccagctgagagaccaagggacgagccatttctgcattgtggatgggaacaggaacactgtgtccatgacgacgaccgtgaactacccttttggcgctggagtcttgtctccttctacagggattctgctcaacaacgagatggatgatttctctgtgcctgagagcatcactactcctgatcatctccctcctgcgcctactaacttcatcgagccgaacaaaagacccttgtcttccatgacgcctctcgttatcaccaaggagggtgagttggtggcggtgcttggaggaagcggagggacgaatatcattgcggcggtgattcaagttttccttaactgctttgtgttgaagatgaaacctttagaagctgtagcgagtgctagagtttaccataagttggtaccgaatgttgttcgatatgagaacttcactgctattaatggggatcacatagggtttagtaaagatagcaagatgtttcttgaagagaagggacatgaacttgaggagatgtcaagtggaggagctattgttcaacttattgttcagagttttaaggaagaagaagagatggtcattgactttggaaggagacttggtaaagataatactattaagaaaacaaaaacattcaagggattactcactgcagttagtgatcctcgtaaagatgggaagccagctgcagtttga

SEQ ID NO: 58295 - protein, 635 aa, Raphanus sativus
MGHKILADHLLETNQITVGETKKQRTNLTITLSLVLFLFLGTTGFYCFSDNITLWLSRHATNSHSLSHENLGDAIESENGVVAADDGRCSEIGASFLRKGGHAVDAAVATTLCVGVVNPMASGIGGGSFLIVSQGSKAEAFDMRETAPLAASKDMYKNDANAKSIGALSMGVPGELAGLHEAWKRYGRLPWKPLFKPAIKLARDGFIVAPYLGRAISTHSSKILNDKGLRSIFSRNGQVLKPGDTCYNRELARSLGTVSELGPEAFYNGTVGEKLVDDVKTMGGVMTMDDLRSYRVRVTDAMAVDVMGYTIHGMPPPSSGTVGFTMVINILELYTASGHDLGLHRLIEAMKHMLAARMDLGDPEFVNVTNSINQMLSKPNAEEIRKRILDNTTFPPEYYLSRWSQLRDQGTSHFCIVDGNRNTVSMTTTVNYPFGAGVLSPSTGILLNNEMDDFSVPESITTPDHLPPAPTNFIEPNKRPLSSMTPLVITKEGELVAVLGGSGGTNIIAAVIQVFLNCFVLKMKPLEAVASARVYHKLVPNVVRYENFTAINGDHIGFSKDSKMFLEEKGHELEEMSSGGAIVQLIVQSFKEEEEMVIDFGRRLGKDNTIKKTKTFKGLLTAVSDPRKDGKPAAV

SEQ ID NO: 58296 - DNA, 2829 bp, Bacillus subtilis
  CDS (549)..(2312): transl_table=11
aagctttacatctcttgggtacttatccccctactaatcatcaaaaaacctcttaaaacgaaatctgaagctcccaattttctggagcttccgcaaaaaacatacaaaaaaagacacaatttcaaattgtgtcctaatcctcatcctttacatcaatatcttccgggatcggttcatttaatatttcctgcaccagtgctttgtaattctccagctgttcgagatgcgttttgaactgttccttataaatcaaaaattgctccccgtcatgaacggctctgattttcccttcgagcaccaagcttttaatataatcctctgaaagatttgtatattctgctgtttcttcaatcgttaaatacatatagcagtcccttcttaatccgtatgctgattctaatatagcacatggctcatatcaatataatcaattttgcacagaaaaacggctttatgtactatataatataccatttgtcacttgtgaaaacgctgtaatttttttacgctaagattgtaacaatacaacttcatataggagggagaacatgaaaagaacgtggaacgtctgtttaacagctctgcttagtgttctgttagtcgctggaagtgtcccttttcacgcggaagctaaaaaaccgcccaaaagctacgatgagtacaaacaagtagatgttggaaaagacggcatggttgcgaccgcacatgctcttgcttctgaaatcggtgctgatgtgctgaaaaaaggaggaaatgctattgacgcagcggttgccattcaatttgcactcaatgtaacagagccgatgatgtcaggtattggcggcggcggttttatgatggtgtatgacggaaaaacgaaggatacaacgataatcgacagccgtgagcgtgctccagcaggcgcaactcctgatatgtttctggacgaaaacggcaaagcaattcctttctctgaacgtgtaacaaaaggtactgccgttggtgttccaggcactctgaaagggctggaagaagccttggacaaatggggaacccgttcgatgaagctattaattaccccttctattaaactcgctgaaaaaggctttccgattgattcggtgttggcagatgccatttctgattatcaggaaaaactttcacggactgccgcaaaagatgtatttttaccaaatggcgaaccgcttaaagaaggagatacccttattcaaaaggatttggctaaaacatttaagcttattcgctccaaaggcactgacgctttttataaaggaaaattcgccaagacgctttctgacactgtccaggatttcggcggatcaatgacagaaaaagatttagaaaattacgacattacaattgatgaaccgatttggggagactatcaaggctatcaaatcgctactactcctcctccaagctccggcggtattttcttattgcaaatgctgaaaatccttgatgattttaacctttcacaatacgatgtccgctcatgggaaaaatatcagctgcttgctgaaacgatgcatttgtcatatgccgaccgtgcgtcttacgcaggtgatcccgaatttgtaaatgttcctctcaaaggcctgcttcaccccgattatattaaagaacgccagcaattaatcaacctagatcaagtgaataaaaaaccgaaagccggtgacccttggaaataccaagaaggatcagcaaactataaacaagttgaacagccgaaagacaaagtagaaggccaaacaacccactttacagttgctgatcgatggggaaatgttgtttcttacacaacaacaatcgaacagctattcggaacgggtattatggtccctgattacggtgttattttaaacaatgaattaacggattttgatgcgataccaggcggagctaacgaagtacagccaaacaaacggcctttaagcagcatgaccccgacgattttatttaaggatgacaagcctgtcctcactgttggatctcctggcggggccacaattatttcatccgttttgcaaaccattctctaccacattgaatatggtatggaattaaaagcagctgttgaagagccgagaatttacacaaacagtatgagctcttaccgttacgaagacggagttcctaaagatgtcctcagcaagctgaacggtatgggccacaaattcggcacaagtccggtggatatcggaaacgtgcaaagcatatcgatcgaccatgaaaacggaacctttaaaggcgtagctgattcaagcagaaacggcgcggcgatcggcattaatttaaaacgtaaataaattaaaaaactgtactcgcttcaaatgagtacagttttttcatgcagatcttaacattaccgatgagatcgcgccgagagtcggtgtttgggtaggctccggtatcggaggacttgaaacactagagtctcaatttgaaatcttcttaacaaaaggctcaagacgggtaagcccgtttttcgtgccaatgatgattcctgacatggcgacaggccagatttctattgcattaggagcaaaaggggtgaactcttgtacggttacagcatgtgctacaggaacgaactccatcggtgacgcgtttaaggttattcagcgcggtgatgcagacgtgatggtcacaggcggaacagaagcgccgctgacaagaatgtcattcgccggctttagtgccaacaaagcgctgtctactaatccagatccgaaaacagcgagccgcccgttcgataaaaaccgtgatggctttgtcatgggggaaggtgcagggattatcgttcttgaagaacttgagcatgcc

SEQ ID NO: 58297 - protein, 587 aa, Bacillus subtilis
MKRTWNVCLTALLSVLLVAGSVPFHAEAKKPPKSYDEYKQVDVGKDGMVATAHALASEIGADVLKKGGNAIDAAVAIQFALNVTEPMMSGIGGGGFMMVYDGKTKDTTIIDSRERAPAGATPDMFLDENGKAIPFSERVTKGTAVGVPGTLKGLEEALDKWGTRSMKLLITPSIKLAEKGFPIDSVLADAISDYQEKLSRTAAKDVFLPNGEPLKEGDTLIQKDLAKTFKLIRSKGTDAFYKGKFAKTLSDTVQDFGGSMTEKDLENYDITIDEPIWGDYQGYQIATTPPPSSGGIFLLQMLKILDDFNLSQYDVRSWEKYQLLAETMHLSYADRASYAGDPEFVNVPLKGLLHPDYIKERQQLINLDQVNKKPKAGDPWKYQEGSANYKQVEQPKDKVEGQTTHFTVADRWGNVVSYTTTIEQLFGTGIMVPDYGVILNNELTDFDAIPGGANEVQPNKRPLSSMTPTILFKDDKPVLTVGSPGGATIISSVLQTILYHIEYGMELKAAVEEPRIYTNSMSSYRYEDGVPKDVLSKLNGMGHKFGTSPVDIGNVQSISIDHENGTFKGVADSSRNGAAIGINLKRK

SEQ ID NO: 58298 - DNA, 1728 bp, Raphanus sativus
  CDS (1)..(1728)
atgaattcaatgtggctggttcgaacagcgatcgctcttcttctaatcgtttttctgcaaaacgctgcggctcagaaaagaccgcaacaaagtatagtcaagtctcgaggtgcggttgcgaccgacgatggacggtgttctgtgatcgggatgagtgttcttcgccaaggaggaaacgctattgatgcgtccgtggcagctgctctctgtttaggcgttgtgagtccagcctctagcgggataggaggtggagcttttacagtggttaagatagctggcgggaaggctattgcttatgattctagagaaacagctcctctccgcgccactgaggatatgtatggaagcaatcctgatctaaagaagaaaggagccttatcagcaggcgttccaggggaagtcgcaggactattcacagcttggaaacaacacggaaagctcccatggaagcagttagtgactcctgcagagaaactcgcagaaggattcagggtttcaaagtatctctacatgcagatgaacgccacaagaagcgatatcttggcagacaaaggtctctctgagctattcgtttcaaatggagagctcaagaaaccaggaacgatcatccataacagaaaattggctttcacactcaagcaaatcggtgaatatggtccaaaagcgttttacaatggcacggttggagtaaacctagctagagatattattaaagcgggcgggataataactttgaaagatctgcaaagttatagagttaaggttagcaaaccgttgtcagcgaacattcttggatacgaactactcggtatgcctccaccttcatccggtggcgctgcaatgatgcttgttttgaacattctttctcaatatgggattccatcaggtgtttctggctctctaggtgttcatcgactaatcgaagctctgaaacatgctttcgcggttaggatgaaccttggtgatccagacttcgtcaatgttactaaggttgtttcagatatgttgtctccagaatttgcaaaagacttgaagaagaagataaacgatgataaaacctttgatccaaaatattatggcggcatttggaatcaaatcaatgatcacgggacaagccatttatcgatcatagatcgtgagaggaacgctgtttcgatgactagtacaataaatggttactttggggcagtgatgttatctccaagcactggaatcgttctaaacaacgagatggatgatttctccatccctacgaaatccaccggtaacctaaatgtgccgccaccggcaccagctaacttcatccgaccagggaaacgaccattgtcttcaatgtcacccaccattgtactcaaggacggtaaagtgaaagctgcggtgggtgcgagcggtggagcgaacatcatctccgggacaatagaagttttcttgaatcattttttcctcaacatggatcctctttcttccgttttggctccaagaatctaccatcagctgataccaaacagagtttcgtttgaaaattggacgacagtgttcagtgatcatttcgaggttcctaaagagacaagagttgtgttggaaaagaaaggtcatgttctaacgccaatcgccggagggacgattgctcagttcattgttcaagaatccgatagaaatgccgggggaatgagtaagcttgtggcagttagtgatccaaggaaaggagggttcccctctggatattga

SEQ ID NO: 58299 - protein, 575 aa, Raphanus sativus
MNSMWLVRTAIALLLIVFLQNAAAQKRPQQSIVKSRGAVATDDGRCSVIGMSVLRQGGNAIDASVAAALCLGVVSPASSGIGGGAFTVVKIAGGKAIAYDSRETAPLRATEDMYGSNPDLKKKGALSAGVPGEVAGLFTAWKQHGKLPWKQLVTPAEKLAEGFRVSKYLYMQMNATRSDILADKGLSELFVSNGELKKPGTIIHNRKLAFTLKQIGEYGPKAFYNGTVGVNLARDIIKAGGIITLKDLQSYRVKVSKPLSANILGYELLGMPPPSSGGAAMMLVLNILSQYGIPSGVSGSLGVHRLIEALKHAFAVRMNLGDPDFVNVTKVVSDMLSPEFAKDLKKKINDDKTFDPKYYGGIWNQINDHGTSHLSIIDRERNAVSMTSTINGYFGAVMLSPSTGIVLNNEMDDFSIPTKSTGNLNVPPPAPANFIRPGKRPLSSMSPTIVLKDGKVKAAVGASGGANIISGTIEVFLNHFFLNMDPLSSVLAPRIYHQLIPNRVSFENWTTVFSDHFEVPKETRVVLEKKGHVLTPIAGGTIAQFIVQESDRNAGGMSKLVAVSDPRKGGFPSGY

SEQ ID NO: 58300 - DNA, 1719 bp, Raphanus sativus
  CDS (1)..(1719)
atgatgccaaaagcgacggtggttctgcttcttctagtcgtcgccgctgtgggaaatgcgacggctgagaaaagacagccaagaattgtcaagcacaacggcgtcgttgcgacagacgatgaacgctgctctgagatagggacgcgcgttcttcggcagggaggtaacgcagttgatgcctcagtggctgctgctttgtgtttaggagttgtgagtccggcttcaagcggtttaggaggtggagcgtttatggttgtgaagttggccgatggagatgagatcgcttatgactctagagaagtcgctccccttcgcgcaaccgagaatatgtatggtggccacgttgatctgaagaggaaaggagccttgtctgtagacgttcccggggaactagcgggtctcttcaccgcttggaaacagcacggaaagctgccgtggaagcaactcgtctatcctgctgagaaactcgctaagggattcaagataacgaaatatctccacatgcagatgaatgctacccgaggaggcatcttacaagacaaaggtctctccgagcttttcgtttcgaatggagagctcaagacaccagggacgatttgccacaaccctatactggcttcaacgctaaggaaaatcgccgagtacggtccaaaagcgttttacaacggaactgttgcgtttgacatcgtcaaagacgttagtaacctgggagggatactaacgttggaagacttgcgaagatacagagttaaagtcaaacgtcctttgtcaacagagattcttgggtacagagtgcttggcatgcctcctccatcatccggtggtcctgcaatgatgctggttttgaacatgctttctccgtatgggattccatcaggtgtttcgggatctctcggggttcatagattagttgaggctctgaaacacgcctttgcagtcagaatgaaccttggagatccagatttcgtggacgttaccaaagtcgtttcagacatgctctccatagagtttgcagaatcgttgaagaagaagataaacgacaatacaacttttgatccaaagtactatgggggcaggtggaatcaaatcgaggatcacgggacaagccatttatccataatagacagtgagaggaatgccgtctcgatgactaccacaatcaacggctattttggagcattaattctttctccgagcactggaattgtcatgaacaatgagatggacgacttttcaatcccaatgaagtctgacggtaatgaatctgtaccgccaccagcgccggctaacttcatcagaccaggaaaacggccgttgtcctctatgacaccaactattgtactcaaggatggtaaagtgaaagccgcagtgggtgcaagcggaggtgtgaacatcattgctggaactatcgaagtttatctaaactattttttccttaagagggatcctctttctgccgtcttggctccaaggatctaccatcagctggtaccaaacatagtctggtatgagaactggacgacagtgttcagtgatcatttcgagattcgtaaggaaacaagagttgtgttggaaaaaaaaggtcatctactaaggcctagccctggagggacgattgctcagttcgtagttcaggaatctggtgcaaattccggtggactgagtgagcttgtggcggtaagtgatccacgaaaaggaggcttcccttcaggatactga

SEQ ID NO: 58301 - protein, 572 aa, Raphanus sativus
MMPKATVVLLLLVVAAVGNATAEKRQPRIVKHNGVVATDDERCSEIGTRVLRQGGNAVDASVAAALCLGVVSPASSGLGGGAFMVVKLADGDEIAYDSREVAPLRATENMYGGHVDLKRKGALSVDVPGELAGLFTAWKQHGKLPWKQLVYPAEKLAKGFKITKYLHMQMNATRGGILQDKGLSELFVSNGELKTPGTICHNPILASTLRKIAEYGPKAFYNGTVAFDIVKDVSNLGGILTLEDLRRYRVKVKRPLSTEILGYRVLGMPPPSSGGPAMMLVLNMLSPYGIPSGVSGSLGVHRLVEALKHAFAVRMNLGDPDFVDVTKVVSDMLSIEFAESLKKKINDNTTFDPKYYGGRWNQIEDHGTSHLSIIDSERNAVSMTTTINGYFGALILSPSTGIVMNNEMDDFSIPMKSDGNESVPPPAPANFIRPGKRPLSSMTPTIVLKDGKVKAAVGASGGVNIIAGTIEVYLNYFFLKRDPLSAVLAPRIYHQLVPNIVWYENWTTVFSDHFEIRKETRVVLEKKGHLLRPSPGGTIAQFVVQESGANSGGLSELVAVSDPRKGGFPSGY

SEQ ID NO: 58302 - DNA, 1968 bp, Corynebacterium glutamicum
  CDS (1)..(1968): transl_table=11
gtgacccaaagcacattccttaaatcggtagctgcgttcactgtcgcagccttaaccctgaccatctcttcgtgttccagcggtgaagacacctccgcaagctccacggatactgaaaactcctcaacccaagcagcagcgtctcccccacttgcgccttgtgaacttcccgccgacgcttctgctgaagaggaagtagaaggcactcacacaggtgaagatatttctgttgccccggaaatcggtaccggctaccgcgagggcatgacccctgttcaaacccaaggttatgcggtggcaactgcaaaccccatcgcttctgaagcagcctgcgcggtgttaagagaaggcggcactgcagctgatgctcttgtcaccgcgcagtttgttttgggactgacggaaccgcagtcgtctggccttggtggtggcggatacattctgtactacgacgccgaagccaatgcggtgacagccattgatggccgtgaaacagcgccagttgctgctgatgaaaactatctcattcatgtttctgcagaggatcaaacggcacctgttcctgatgcccgacgttccggcaggtcaattggtgtgccaggaatcgtggcagcccttggacagctgcatgattcattcggaaagacctcctggcaggacgtgctgacaactccgcagcagctcgcaactgatggtttttccatcagccctcgcatgtcagcatcaattgctaactccgctgaggatctctcccacgatccggaagctgccgcatatttccttgatgaaaacggtgatgcgaaggcacccggcacacttttacaaaaccctgactatgcagaaacgattcgtctcatctctgaaggtggccccgatgcgttctacacgggtgagattgcagcagacatcgtggaacgcgccacccgtgaggttgacggtttcacaccatcactgatgagcacggcagatttggctgcctacactccggaaactcgtgaagctttgtgtgctccctaccgcgacaagattgtttgtggcatgccaccgtcatcatcgggtggcgtcacagtgatggaaaccctgggtatcttgaacaactttgatctcgcccaatacccacccactgaggttggtttggatggcggattgccaaatgcggaagctgttcacctgatttcagaggctgagcgcctggcttatgctgatcgcgatgcttacatcggtgatcctgctttcgtggaagttccagcaggtggtgtcgaagagttgatcagcgatgtctacacgggtgaacgctcagaacttattgatccagagcattcaatgggtcaggcaactgctggtctgagccaggaaccagtcatggctgccctgccggaaagtggcaccagccatatttccatcatcgattcctatggcaacgcagcatcgttgaccaccagtgtggaagctgctttcggttccttccacttcacccgtggtttcattttgaataatcagctgacagatttctccgctgaaccacttgatgaggacggcgagcccgtggccaatcgtgtcgagtcagcaaagcgcccacggtcttccatgtcgccaatgctagtgttcaacgccagtggcgatggtgaaatcgcggatctgaatatggtgctgggctcccctggcggatccttgattattcagtacgtggtgaaaaccctggtcaacatcatcgactgggatatggatccacagcaggcagtgtctgcgcccaactttggtgcgatgaaccagcctaagactggactgggaagcgagcatccgctgatcgccaatgattcagcagagcttgtatctgaactggaaagcaaaggccacgaagttaatgtgggcgagcaatccagtggcctatcggcgttggtgaaaaacggcgacaccattgtcggtggcgccgatccacgtagagaaggcgtggtcttgggtggctaa

SEQ ID NO: 58303 - protein, 655 aa, Corynebacterium glutamicum [sequence omitted]

SEQ ID NO: 58304 - DNA, 1704 bp, Helicobacter pylori
  CDS (1)..(1704): transl_table=11
atgagacggagttttttgaaaacgattggcttgggtgtgatagcgctctctttgggtgtggtaagccctttgagtgcagcgagttacccccccattaaaaacactaaagtaggcttacccctttctagccacccgctagctagtgagatcggtcaaaaggttttagaagatggaggtaatgcgattgatgcggctgtagcgataggttttgctctagcggtcgtccatcctgcagcaggcaatattggtggtgggggttttgcggttatccatttggctaatggtgaaaatgttgccttagattttagagaaaaagcccccttaaaagccaccaaaaacatgtttttagacaagcaaggcaatgtagtccctaaactcagcgaagatggctatttggcggctggggttcctggaacggtggcgggcatggaggcgatgttgaaaaaatacggcacaaaaaaactatcgcaactcattgatcctgccattaaattggctgaaaatggttatgcgatttcacaaagacaagcagaaaccctaaaagaagcaagggagcggtttttaaaatacagttctagcaaaaagtatttttttaaaaaaggccatcttgattatcaagaaggggatttgtttgtccaaaaagatttagccaagactttgaatcaaatcaaaacgctaggcgccaaaggcttttatcaagggcaagtggctgagcttattgagaaagacatgaaaaaaaatggagggattatcactaaagaagatttagccagttacaatgtgaaatggcgcaaacctgtggtagggagttatcgtgggtataagatcgtttctatgtcgccgccaagttcaggaggcacgcatttgattcagattttaaatgtcatggaaaatgcggatttaagcactcttgggtatggggcttctaagaatatccatatcgctgcagaagcgatgcgtcaagcttatgcggacagatcggtttatatgggagattctgattttgtttcagtgccggtggataaattgatcaataaggcgtatgccaaaaagatttttgacactatccagccagatacggttacgccaagctctcaaatcaaaccaggaatggggcagttgcatgaggggagcaataccacgcattattctgtagcggacaggtgggggaatgcagtcagcgttacttacaccattaacgcttcttatggaagcgctgctagtattgatggggcaggatttttattgaacaatgaaatggatgatttttccataaagccaggaaatcctaatctctatggtttagtagggggtgatgcgaatgcgattgaagccaataagcgccctttaagctccatgtcgcctacgatcgtgttgaaaaacaataaggttttcatggtggtaggaagccctggagggtctaggattatcactacggtgttgcaagtgatttccaatgtcattgattacaatatgaatatttctgaagcggtctcagcccctagattccacatgcaatggttgcctgatgaattaaggattgaaaagtttggcatgcccgctgatgtgaaagataacctcactaaaatgggctatcaaatcgttactaagccggtcatgggtgatgtgaatgcgatccaggttttgcctaaaactaaagggagcgttttctatggatcaacggatccaaggaaagaattttaa

SEQ ID NO: 58305 - protein, 567 aa, Helicobacter pylori
MRRSFLKTIGLGVIALSLGVVSPLSAASYPPIKNTKVGLPLSSHPLASEIGQKVLEDGGNAIDAAVAIGFALAVVHPAAGNIGGGGFAVIHLANGENVALDFREKAPLKATKNMFLDKQGNVVPKLSEDGYLAAGVPGTVAGMEAMLKKYGTKKLSQLIDPAIKLAENGYAISQRQAETLKEARERFLKYSSSKKYFFKKGHLDYQEGDLFVQKDLAKTLNQIKTLGAKGFYQGQVAELIEKDMKKNGGIITKEDLASYNVKWRKPVVGSYRGYKIVSMSPPSSGGTHLIQILNVMENADLSTLGYGASKNIHIAAEAMRQAYADRSVYMGDSDFVSVPVDKLINKAYAKKIFDTIQPDTVTPSSQIKPGMGQLHEGSNTTHYSVADRWGNAVSVTYTINASYGSAASIDGAGFLLNNEMDDFSIKPGNPNLYGLVGGDANAIEANKRPLSSMSPTIVLKNNKVFMVVGSPGGSRIITTVLQVISNVIDYNMNISEAVSAPRFHMQWLPDELRIEKFGMPADVKDNLTKMGYQIVTKPVMGDVNAIQVLPKTKGSVFYGSTDPRKEF

SEQ ID NO: 58306 - DNA, 1893 bp, Schizosaccharomyces pombe
  CDS (1)..(1893)
atgggtatcaatacgtcttctgctcagagttcaggggctgcttccatcgctcgaagttctgtaaatgtgaagtctggaaatcggcatttatcatctaataagaaatcagccacttcagctctagaagaacgggcttctcgtccctctattcttgtcacatttcttgttttggcaggcacaatactttctttatacatctggccaattttatctcccgaccttttttttgcaaatcaacggtgctccttcaaatataaaaacaaaggctcgcagagagtagtagttgaaggaaaaaatggagttgtggctacggaggaagagacatgctcccaaattggtgttggcatcttgaaggccggtggaaatgcagtggatgcggctatcgcatcgggaatttgcattggagctgtcaattcattttcaagtggtattggcggtggtggatttatgttaatacgccatccaaatggtacagcacattccttgaactttcgcgagactgctccagcgggtgccagcaaaaatatgtttcatggtaactctaccctgtcacaggtaggtggtctttccgttgccgtccctggtgaaattgctggctacgagcgtgcttggaaaatgtatggctctctaccttggcataagttgtttgaaccaaccatacgtcttatgagagatggaatgccaatgcccaaggaacttgcgtctcgcatcagacgacccgagttttcctatttcaagactcatccagattggtctaaaatatttgctccagaaggtgtttttttacacgttggagaaaagttttatcggcctgctctagcgtctaccctcgaagaaatagctaagtttggtcctgaagtgttttacacaggaaaaattgcagaaaggcttgtaaagtttgttcaacagcaaggaggtatactaaccatggaggatatggccaatttttcagttgttgtggaggaacctatttatggtaacttctatgatcgtgaggttattacttgtggatccccttgtagtggagaggctttgattttaggtttaaatgttctttcaaaagtagatttaagtgaaggtacttctatccttggttgtgaaatgacggatattggcgtgcaccatctaattgaaacaatgaaatggatgtccgctggacggactgtattagcagacccaactttttacaataatacagatcatgttgaacagttactttctttggaatatgctgatgaaattcgcaataatatttctaacgagaggacttttgattttactcactacaaggccgaatacgatttccctaacgatcacggcactactcatctttccgttatcgacaaagacaatatggcagtcggactcacagcttctatcaatttgatgtttggttcacaacttttggaacctgaaacgggtattatactgaatgatcacatggacgattttgcttctccaggaatagtgaatgctttcggtttgagtccatcgccatacaactttattgcccctggtaagcgaccacaaagctccgcggtgcctacgattttggtatataatggtgaagttgaaatggttcttggtggtagcggtggcagccgaatcgtgacagctgtgttagacacaattattaaaaaatataaatggggcaagtcattgttagaatctgttgagagtcctagatttcatcatcagctaatgcctaatatcgtctatatcgatgaaactgttgaaattgaagttcttagagctttagaaaagtttggtcatatagtggatttaatccccgttcaatatcctttcagtgaaattcaagctgttttccgcaccaacggcacattgtacggtttaagtgatagccgaaaacaggctgttgctgctgcctattaa

SEQ ID NO: 58307 - protein, 630 aa, Schizosaccharomyces pombe
MGINTSSAQSSGAASIARSSVNVKSGNRHLSSNKKSATSALEERASRPSILVTFLVLAGTILSLYIWPILSPDLFFANQRCSFKYKNKGSQRVVVEGKNGVVATEEETCSQIGVGILKAGGNAVDAAIASGICIGAVNSFSSGIGGGGFMLIRHPNGTAHSLNFRETAPAGASKNMFHGNSTLSQVGGLSVAVPGEIAGYERAWKMYGSLPWHKLFEPTIRLMRDGMPMPKELASRIRRPEFSYFKTHPDWSKIFAPEGVFLHVGEKFYRPALASTLEEIAKFGPEVFYTGKIAERLVKFVQQQGGILTMEDMANFSVVVEEPIYGNFYDREVITCGSPCSGEALILGLNVLSKVDLSEGTSILGCEMTDIGVHHLIETMKWMSAGRTVLADPTFYNNTDHVEQLLSLEYADEIRNNISNERTFDFTHYKAEYDFPNDHGTTHLSVIDKDNMAVGLTASINLMFGSQLLEPETGIILNDHMDDFASPGIVNAFGLSPSPYNFIAPGKRPQSSAVPTILVYNGEVEMVLGGSGGSRIVTAVLDTIIKKYKWGKSLLESVESPRFHHQLMPNIVYIDETVEIEVLRALEKFGHIVDLIPVQYPFSEIQAVFRTNGTLYGLSDSRKQAVAAAY

SEQ ID NO: 58308 - DNA, 1836 bp, Schizosaccharomyces pombe
  CDS (1)..(1836)
atgagccctacagacactaccccattgctgtattcatgggacgatcaatcaagacatcaagaccccgattggcataagctccgtaattatcatggtgcgtggtatcggaggatctcaagacggcggttcagccaatttatttttgcttttggactgatgactctgtttgttttagtgtattcaatcagttccaatttgcatactccaacacaattcacaggtcataaagttagaggaaggcgaggtgccgttgcctcagaagtgcctgtttgctctgacatcggtgtgagcatgcttgcagacggtggtaatgcagtagatgctgccatagcatccactttttgcattggagttgttaatttcttctcgagtggaattggtggaggtggtttcatgttaatcaaacatcccaacgaaaccgcgcagtccttgacgtttcgcgaaatagctcctggaaatgtgagtaaacatatgttcgataaaaatccgatgcttgctcaagttgggcccctttccattgctattcctggtgaattagctggcctctacgaggcttggaagagtcatggtctgctcgattggtcgaaattgctggaacccaatgttaaacttgctagagaaggatttcctgtgactcgagcaatggaaagagttttgaaattgccagaaatggcccatcttcttaaagatccaatttggcagcctatccttatgccaaatgggaaagtacttagggctggcgataaaatgtttcgtccggcatatgctaagactttggaaataattgccaataaaggtattgaacccttttataggggtgagttaactaattctatggtaaagtttattcaggacaatggtggaattgttacggtcgaagatttcggaaattattcaacggttttcgcggatgctctgcatacatcctacagaggccatgatgtgtatacatgcaccctgccgacgagtggacctgctttaattgagggcctcaacattcttgatggttatcctttaaacacaccttctttagcatttcctaagcgtctccatttagaagttgaagcaatgaaatggctttctgcaggcagaactcaattcggtgatccagattttttacctcttgatcatttggatgttgtatcaaaattgctctctaaagagtttgcgtctcaaattcgcaataacatctcccttagtaaaacatacccttgggaacattacaatccttcttacgatcttcctataagtcatggtaccacccacgtttccactgtggacagcaacaacttggcagtttcaataacctctactgtaaatctccttttcggctcacaattgatggatccagttacaggtgttgtctttaacgatcaaatggacgatttttccataccaggtgcttctaatgcatttaacttgtccccttctccttggaactttattgagccatttaagcggcctcagtcttcttcagcaccaaccatccttaccgatataaatggagattttgagatggctctgggtgctagcggtggtagccgtattgtcaccgctgtccttgactccatcataaagcgaattgacatggactatgatatagaatcgatggttgccagtgctcgtcctcatcatcaattattacctgatattttaatccttgaatcaggcttctccaaatcagttgctactcgtatgaaaaaatacggtcataaagtctggcgactgaagcagcatgacacaccgttgagtcaaattcaagccgttacaaggcatcacagtgagtattacggaatgagtgatcctaggaagtacggtcaggctgccgcttattaa

SEQ ID NO: 58309 - protein, 611 aa, Schizosaccharomyces pombe
MSPTDTTPLLYSWDDQSRHQDPDWHKLRNYHGAWYRRISRRRFSQFIFAFGLMTLFVLVYSISSNLHTPTQFTGHKVRGRRGAVASEVPVCSDIGVSMLADGGNAVDAAIASTFCIGVVNFFSSGIGGGGFMLIKHPNETAQSLTFREIAPGNVSKHMFDKNPMLAQVGPLSIAIPGELAGLYEAWKSHGLLDWSKLLEPNVKLAREGFPVTRAMERVLKLPEMAHLLKDPIWQPILMPNGKVLRAGDKMFRPAYAKTLEIIANKGIEPFYRGELTNSMVKFIQDNGGIVTVEDFGNYSTVFADALHTSYRGHDVYTCTLPTSGPALIEGLNILDGYPLNTPSLAFPKRLHLEVEAMKWLSAGRTQFGDPDFLPLDHLDVVSKLLSKEFASQIRNNISLSKTYPWEHYNPSYDLPISHGTTHVSTVDSNNLAVSITSTVNLLFGSQLMDPVTGVVFNDQMDDFSIPGASNAFNLSPSPWNFIEPFKRPQSSSAPTILTDINGDFEMALGASGGSRIVTAVLDSIIKRIDMDYDIESMVASARPHHQLLPDILILESGFSKSVATRMKKYGHKVWRLKQHDTPLSQIQAVTRHHSEYYGMSDPRKYGQAAAY

SEQ ID NO: 58310 - DNA, 1743 bp, Escherichia coli
  CDS (1)..(1743): transl_table=11
atgataaaaccgacgtttttacgccgggtggccattgctgctctgctctcaggaagttgttttagcgccgccgccgcgcctcctgcgccgcccgtctcgtatggtgtggaggaagatgtcttccacccggtacgcgcgaaacagggaatggtagcgtctgtggacgccactgccactcaggtgggggtggatattctcaaggagggcgggaatgccgttgatgccgccgtggcggtgggctacgcgctggcggtaacgcatccgcaggcagggaatctgggcggtggtggttttatgttaatccgctcgaaaaatggcaataccacggctatcgatttccgcgaaatggcacccgccaaagcgacccgcgatatgttcctcgatgatcagggcaacccggacagcaaaaaatcactcacttcgcatctggcttccggcacaccgggtacggtagcaggtttctcgctggcgctggataaatacggcaccatgccgctgaacaaagtcgtgcagcccgcgtttaaactggcacgcgatggttttatcgttaacgacgcgctggctgacgatctcaaaacctacggtagcgaagtgttgccgaatcacgaaaacagtaaagctatcttctggaaagagggcgagccgctgaaaaagggcgacacgctggtgcaggcgaacctggcaaagagcctggagatgattgctgaaaacggcccggacgaattctataaaggcacgattgcggaacagatcgcccaggagatgcagaaaaacggtggcttgatcactaaagaagatttagcagcctataaagcggtcgaacgcactccgataagcggcgattatcgcgggtatcaggtttactccatgccaccgccatcctccggcgggatccatatcgtacaaatcctcaatattctggaaaacttcgatatgaagaaatacggctttggcagcgccgatgcgatgcaaatcatggcagaagcggagaaatacgcctacgccgaccgctcggaatatcttggcgacccggattttgtcaaagtaccgtggcaggcgctgaccaataaagcctatgccaaatctattgccgatcaaattgatatcaataaagcgaagccatccagcgaaattcgccccggcaagcttgcgccttatgagagtaatcaaactacccattactcagtggtggataaagatggtaacgcggtggcggtgacctatacgctgaacaccaccttcggtacgggcattgtcgcgggcgagagcggtattctgcttaataaccagatggatgatttctccgccaaaccgggcgtaccgaacgtttacgggctggtgggcggtgatgccaacgccgtcgggccgaacaaacgcccgctgtcgtcgatgtcgccgaccattgtggtgaaagacggtaaaacctggctggttaccggtagcccaggcggtagccggatcatcactacagtgctgcaaatggtggtgaatagcatcgattatggcttgaacgtcgccgaagcgaccaatgcgccgcgtttccaccatcagtggttgccggacgagctgcgtgtcgaaaaagggtttagcccggatacgctcaagctgctggaagcaaaaggtcagaaagtggcgctgaaagaggcgatgggcagtacacaaagcattatggttgggccggacggtgagttgtacggcgcatccgacccgcgctcggtggatgatttaacggcggggtactaa

SEQ ID NO: 58311 - protein, 580 aa, Escherichia coli [sequence omitted]

SEQ ID NO: 58312 - DNA, 1677 bp, Pseudomonas sp
  CDS (1)..(1677): transl_table=11
atgaacgctcccgtccccgtcccgcgcgtcgccgatttcacctgcgagaagaagcctgcgagcggctcgcgcggcatggtcgtcaccaaccacccgctcgcctcggcagccggcgcgcagatcctgctcgccggcggcaatgccatcgacgcggctgtcgcgtcgctcttcgcgctgacggtggccgagccgatgatggtcggcatcctcggcgggggcctgagccatatccggctcgccgacgggcgtcatgtcgtgatcgacaatctctcgaccgcgccgggcaaggcgacggccgagatgtacgagtgcctgtccgacgagatcggcaagcagcgcgacacgcgcgaccgccagaacgtggtcggagccaaggcggtcgcggttcccggcgcgctcaagggctggtgcgaggcgctcgcccgcttcggcacgctgccgctcgccgaggttctccagccggcgatcgggctggcggagcgcggcttcgtggtcacgccctatctctcgaactgcatcaccgacaacgcgggcgatctcgcccgcgaccccggcctcgcggcgatgctgctgccgggcggaaagccgctccagccgggcatgcggctcgtccagtccgactatgccgcgagcctcaaactgatcgcggctgaggggccggacgcgctctatggcggcaagctcggccgggcgctgaccgattacatggcggccaatggcggcctgatcgatcaggccgacctcgccaattaccgcatcgaactgcgcgagccgattcgcggctcctatcgcggctacgagatcatcggcccgccgccgccctcgtcatcgggcgtgcatatcacgcagatgctcaacattctcgaaggctatgatatcggctcgctcggcttcggctcgacggacgctgtgcatctgctcgccgaagccctgaagatcgccttcgccgaccgcgccgtggcgacagccgatccggccttcgtcaaggttccggtcgcgcgattgatcgacaaggcctatgccgacgagcgccgcgcgctcattgagatggagcaggcgaagagctggacggccgggctctctggcggcgaatccgccgacaccactcatgtcaccgtcgctgacgccatggggaatgtcgtcagcgcgacgcagacgatcaacgggctgttcggcgcctgcgtgcagattccgggcaccggcatgatcgccaacaactacatgtacaacttcgatccgcatcccggccgggcgctctcgatcgcgccgggaaagagggtcttcacctcgatggcgccgatgatggcgttgaaggagggacggatcgcctttgcgctcggcttgcctggcgcgctccgcatcttcccctcggcgctgcaggcgatcgtcaacctgatcgaccaccgcatgagcctgcaggaggcggtcgaggcgccacgcgtctggacggagggcggcgtgctcgaactcgaggaagcgatccccgaggccgtggcacaagcgctgatcgcgcgcggccataaggtggtgcgctcgccccgcgtggccggtggcatgaacgccatcgccttcaatccggacggtaccttgaccggtgccgcctgctggcgcgccgacggcacacccgtcgccatctccggcgggctcgcccgtgccggtgcccgcttcaccatctga

SEQ ID NO: 58313 - protein, 558 aa, Pseudomonas sp
MNAPVPVPRVADFTCEKKPASGSRGMVVTNHPLASAAGAQILLAGGNAIDAAVASLFALTVAEPMMVGILGGGLSHIRLADGRHVVIDNLSTAPGKATAEMYECLSDEIGKQRDTRDRQNVVGAKAVAVPGALKGWCEALARFGTLPLAEVLQPAIGLAERGFVVTPYLSNCITDNAGDLARDPGLAAMLLPGGKPLQPGMRLVQSDYAASLKLIAAEGPDALYGGKLGRALTDYMAANGGLIDQADLANYRIELREPIRGSYRGYEIIGPPPPSSSGVHITQMLNILEGYDIGSLGFGSTDAVHLLAEALKIAFADRAVATADPAFVKVPVARLIDKAYADERRALIEMEQAKSWTAGLSGGESADTTHVTVADAMGNVVSATQTINGLFGACVQIPGTGMIANNYMYNFDPHPGRALSIAPGKRVFTSMAPMMALKEGRIAFALGLPGALRIFPSALQAIVNLIDHRMSLQEAVEAPRVWTEGGVLELEEAIPEAVAQALIARGHKVVRSPRVAGGMNAIAFNPDGTLTGAACWRADGTPVAISGGLARAGARFTI

SEQ ID NO: 58314 - DNA, 1905 bp, Oryza sativa
  CDS (1)..(1905)
atggccgcgcgcggcggcctggagaaccccctcctcggcggcggcccggtttcttctcagggcagtcggcgccgccgcccgtggaccgcgctcgccatcgccgtggcgctgctcgccgtggcgtgcgtcgtgctgctgctcctgagctcggggggagcggagcaaggcggtgatcggagcagggtggtgtccggcggcggcggcgggggcgtggggctgagcccgcacgaggtggaggccggggtgggcgcggtggcggcggacgacgggaggtgctcggaggtgggcgccgcggcgctgcgcgccggcgggcacgcggcggacgcggccgtggcggcggcgctctgcctcggcgtggtgcacccgatgtcgagcggcgtcggcggcggcgcgttcatcgtcaccagggacgccgcctccggcgacgccgtcgccttcgacgcccgcgagaccgcgccggccgcggccacgccggacatgtacgcgggcaacccgacctccaagtacaagggcgcgctcgccatgggcgtccccggcgagctcgccggcctccacgccgcgtggtcccgctacggcaggctgccgtggaaggacctcttcgcgccggcgatcaagctagcgcgggacggcttcacggtggtgccgcccgtcgccggcgcgctcaaggaggcggagcgggacgtgctcgccgacccgggcctccgcgccgtgttcgcgccgcaggggaggatcctcgccgccggcgaggtgtgccgcaacccggcgctcgcggacacgcttgaggccgtcgccagcggcggcgtcgaggcgttctacggcggcgccatcggcgagaggttcgtcgccgacgtgcggcgcgccgggggcatcgcgacggtggacgacctgagggcgtacaaggtcgaggtgagcgacgccatgcgcgccgacgccatgggatacactttcctcggcatgccgccgccttccagcggcacagtcggaatggctctggttttgaacatcttggatggatacaaatcgctcgagttcttgaaagggtttcttggcgtgcaccggttcatcgaggcgctgaagcacatgctggccatcaggatggctctcggcgaccctgactacgtcaacgtcgccggcaacgtctcccagatgctctcgccggcgttcgccgacaaaatccggcagcggatcgtcgacaacactacgttccctcccagttactacttcccaaaatggagccagctgaatgaccacgggacgagccacctctgcgtcgtcgacggcgaccggaacgcggtggcgatgacgacgacggtgaactcttacttcggggcgcacgtgctgtcgccgtcgacgggcatcgtgctgaacaacgagatggacgacttctccgtgccggcggagcggacgccggaccacctcccgccggcgccggcgaacttcatcgctccgggaaaacggcctctctcctccatgacgccgacgatcatactaaagaacggacagctcgccggagtagtcggcggcagtggcgggacgaacatcatcgcgacggcggcccaggtgttcgtgaaccatttcatcgtcggcatgcacccgctcgccgccgtccagcatcccagagtctaccacaagctggtgccgaacgtggtggtgtacgagaacgagacggtggtcggcggcgaggtgatcgagctcagcggcgaggcgagggagttcctgcggcggaggggccaccggctgaggagcacgggctccggcgccgtctgccagttcatcgtgcaggacttgctggcgccggtcggctcggccgccgaccgtcggcagcacggcggcgggaacgtcttccacgggatgctcaccgccgtcagcgacccgaggaaaggcggcagacctgccggaatgtga

SEQ ID NO: 58315 - protein, 634 aa, Oryza sativa
MAARGGLENPLLGGGPVSSQGSRRRRPWTALAIAVALLAVACVVLLLLSSGGAEQGGDRSRVVSGGGGGGVGLSPHEVEAGVGAVAADDGRCSEVGAAALRAGGHAADAAVAAALCLGVVHPMSSGVGGGAFIVTRDAASGDAVAFDARETAPAAATPDMYAGNPTSKYKGALAMGVPGELAGLHAAWSRYGRLPWKDLFAPAIKLARDGFTVVPPVAGALKEAERDVLADPGLRAVFAPQGRILAAGEVCRNPALADTLEAVASGGVEAFYGGAIGERFVADVRRAGGIATVDDLRAYKVEVSDAMRADAMGYTFLGMPPPSSGTVGMALVLNILDGYKSLEFLKGFLGVHRFIEALKHMLAIRMALGDPDYVNVAGNVSQMLSPAFADKIRQRIVDNTTFPPSYYFPKWSQLNDHGTSHLCVVDGDRNAVAMTTTVNSYFGAHVLSPSTGIVLNNEMDDFSVPAERTPDHLPPAPANFIAPGKRPLSSMTPTIILKNGQLAGVVGGSGGTNIIATAAQVFVNHFIVGMHPLAAVQHPRVYHKLVPNVVVYENETVVGGEVIELSGEAREFLRRRGHRLRSTGSGAVCQFIVQDLLAPVGSAADRRQHGGGNVFHGMLTAVSDPRKGGRPAGM

SEQ ID NO: 58316 - DNA, 1914 bp, Brassica napus
  CDS (1)..(1914)
atggttcacacaatcctcgctgatcctcttctaggaatcaaccaagaaacggtcgcagagactaagaaacacagaaacaatctgaggcttgctcttactctgcttcttctgactctagtctcaatctcaggttattgctttagtaaaaacataacagtttggttggcgagagaagctaccaaccgtcacagccatgcaaccagaagtgacgcggttgagtcagagaacggtgttgtcgcggcagacgacggcaggtgctcggatattggtgtctccgttctcagaagaggtggacatgcggttgacgccgccgtggctacttccttatgcgtcggtgttgttaatcccatgtctagcggaattggcggtggagccttcttgatagttagctccatggaagattctaaagctgaggcctttgacatgagagaaaccgctccattagctgcttctaaggacatgtataagagcgatgaggacgcgaagttcatcggcgcgttgtcaatgggagtcccaggagagatagctggactctacgaggcctggaaacggtatggccgtcttccatggaagccgcttttcgagccagctattgagctggcgcgaggcggcttcgtggtggctccgtatctcggacgagccatatcgaaacactcttcgatgatactcaaagacccgggtttgcgtaatgtcttctcaagaaacggacaggttttgaacccaggtgagactggctataacccggaactagctcggagtctagagatgatctccgagctaggaccggcagcgttttacaacgggacagtaggccaaaaactcgtcaacgatgtgaaaaaggccggagggatcataactatggatgacttgagaagttacaaagtcagagtaaccaatgcaatggcttcggatgttatgggttacaagatatacggaatgccaccaccgtcgagcggaacggttggtttctcgatggttatgaacatattggacagctactcggagctatacactggttcaggtactgatcttggtctgcaccgtttgatagaagcaatgaaacacatgttcgcagctcggatggatcttggagaccctgagtttgtcaacataacaaacgctatgaagcagaggctatcaaagcctcgtgcggaaagtataagagagaggatcttggacaacacaacgttccctcctgagtactatttgaaccggtggagccagcttagagaccaagggacgagtcatttctccattgtggattcggacagaaacactgtgtctatgacaacaaccgtgaactatgtttttggtgctggagtcttgtctccttccacggggattgtgcttaacaacgagatggatgatttctctgtaccgacggagaacactcctgacaatctccctcctgctcctacaaacttcattgaaccaaacaaaagaccattgtcttccatgacacctcttgttataaccaaggacggtgaattggtggcgacgcttggaggaagcggaggaacgaagataatcccggcggtgattcaagtcttccttaactgctttgtgttgaagatgaaaccgttagaagctgtagagagtgcaagagtttaccataagttaataccgaacgttgttcaatacgagaacttcacggcgattaacggtgatcacataggagttactaaaaatagcaagatgtttttagcagagaggggacatgagcttgaggaggtatcaggtggagctattgttcaacttattgtgcagagtttcaaggaagaagaagataaagagataatcactgaacttggaaggaaacttggtaaagactctagcaagaaaccaaaacctttcaagggattgctcactgcagttagtgaccctcgtaaagatggtaagccagctgcagtttga

SEQ ID NO: 58317 - protein, 637 aa, Brassica napus
MVHTILADPLLGINQETVAETKKHRNNLRLALTLLLLTLVSISGYCFSKNITVWLAREATNRHSHATRSDAVESENGVVAADDGRCSDIGVSVLRRGGHAVDAAVATSLCVGVVNPMSSGIGGGAFLIVSSMEDSKAEAFDMRETAPLAASKDMYKSDEDAKFIGALSMGVPGEIAGLYEAWKRYGRLPWKPLFEPAIELARGGFVVAPYLGRAISKHSSMILKDPGLRNVFSRNGQVLNPGETGYNPELARSLEMISELGPAAFYNGTVGQKLVNDVKKAGGIITMDDLRSYKVRVTNAMASDVMGYKIYGMPPPSSGTVGFSMVMNILDSYSELYTGSGTDLGLHRLIEAMKHMFAARMDLGDPEFVNITNAMKQRLSKPRAESIRERILDNTTFPPEYYLNRWSQLRDQGTSHFSIVDSDRNTVSMTTTVNYVFGAGVLSPSTGIVLNNEMDDFSVPTENTPDNLPPAPTNFIEPNKRPLSSMTPLVITKDGELVATLGGSGGTKIIPAVIQVFLNCFVLKMKPLEAVESARVYHKLIPNVVQYENFTAINGDHIGVTKNSKMFLAERGHELEEVSGGAIVQLIVQSFKEEEDKEIITELGRKLGKDSSKKPKPFKGLLTAVSDPRKDGKPAAV

SEQ ID NO: 58318 - DNA, 1878 bp, Glycine max
  CDS (1)..(1878)
atgttattacagcaaactgaactgaagcaagttccatccatgtctcggcttcaaaagtcaacaacaggtcagcagcaaaagtttcattccctacaccaaatcctgtccccatacatgtcaagtgttgttgtatccgtgttattatggcatgccattgctgtgcttttgctttcaaatttggcctctgctgaaagcattgaggaaacaaatggacacacaaaacacaaaggtgaggtgatctatgcccacaatggcgctgttgccactgatgaccgtagatgctcaaggattgggaaggatgttctgagagaaggagggcatgcagtggatgcagcagtggcttcttccctttgtttgggggttgtgagtcctgcttcaagtggccttggtggtggtgcctttatgcttctcaggttgaataatggggtagcaaaggcttttgatatgagagaaactgctcctgctcttgcctccaaggatatgtatgctggaaatactactttgaaggccaaaggtggcctatctgtagcagttcctggagaacttgctggccttcatgaggcgtggaaacaacatgggaagcttccatggaaaagacttgtaaagccagctgagattctagcacgtagagggtttaaagtatcaccatacctccacaagcagatggaagaaacagagtcagatatattggaagacaagggtcttcgtagcatatttgcaccaaatggaaaactcttaaagataggtgacatttgctacaataacaaactagctgagactctcagaacaatatccgagtctggtccaaaagccttctatgatggattgattggtcttaatttagttaaagatgttcagaatgctggagggatattgagcatgaaagacctcaaaagttacactgttaaacagaaggaacccatatctaatgatgttcttggtctaaagctccttggcatgcctcccccttcaggtgggcatccaatgatgctactgctgaacattctagatcaatataaactcccttctggcctttctggtgcccttggcttccatcgagaaattgaagctttgaagcatgtatttgccgtgagaatgaatcttggtgaccctgattttgtaaatataactggggttctttctgatatgctttctcataggtttgctaaagtgttgaaaaatgacataaatgataataaaacttttggccccagtcattacggcagcaggtggaatcagataaatgatcatggtacaagtcatttaagtataatagatcccgagagaaatgccatttccatgactagcactgtgaatgcatattttggttcaaagatcctttcaccaagtacaggaatagtactgaacaatgaaatggatgatttttccatgcctagaaatgttaccaaggatgttccaccaccagctcctgccaatttcatcatgccaggaaagcggccactatcatccatgtcacccactattgcccttaaggatgggaagctaaaagctgtagtaggtgcaagtggaggtgctttcatcattggtggaactgcagaagttcttttgaatcacttcgttaaaggaatggatcctttttcttctgtaacagctccaagggtctatcatcagctactacctaacgtggttaattatgagaattggaccactttaggtgaacactttgaacttcctgctgatatcagggaagcccttaaaagtaagggtcatgtcctaaagggccttgccggtgggactatttgccaatttattgttctagacaattctgtgccgtccagacaaaataaagggattggaaatggaaagcttgtggcagtgagtgacccaagaaagggtggttttcctgcaggcttttga

SEQ ID NO: 58319 - protein, 625 aa, Glycine max
MLLQQTELKQVPSMSRLQKSTTGQQQKFHSLHQILSPYMSSVVVSVLLWHAIAVLLLSNLASAESIEETNGHTKHKGEVIYAHNGAVATDDRRCSRIGKDVLREGGHAVDAAVASSLCLGVVSPASSGLGGGAFMLLRLNNGVAKAFDMRETAPALASKDMYAGNTTLKAKGGLSVAVPGELAGLHEAWKQHGKLPWKRLVKPAEILARRGFKVSPYLHKQMEETESDILEDKGLRSIFAPNGKLLKIGDICYNNKLAETLRTISESGPKAFYDGLIGLNLVKDVQNAGGILSMKDLKSYTVKQKEPISNDVLGLKLLGMPPPSGGHPMMLLLNILDQYKLPSGLSGALGFHREIEALKHVFAVRMNLGDPDFVNITGVLSDMLSHRFAKVLKNDINDNKTFGPSHYGSRWNQINDHGTSHLSIIDPERNAISMTSTVNAYFGSKILSPSTGIVLNNEMDDFSMPRNVTKDVPPPAPANFIMPGKRPLSSMSPTIALKDGKLKAVVGASGGAFIIGGTAEVLLNHFVKGMDPFSSVTAPRVYHQLLPNVVNYENWTTLGEHFELPADIREALKSKGHVLKGLAGGTICQFIVLDNSVPSRQNKGIGNGKLVAVSDPRKGGFPAGF

SEQ ID NO: 58320 - DNA, 20 bp, Artificial sequence
  primer
atggcgggtaaaaccactgg

SEQ ID NO: 58321 - DNA, 21 bp, Artificial sequence
  primer
ttattccagactgtaggccac

SEQ ID NO: 58322 - protein, 693 aa, Artificial sequence
  consensus sequence
  Variant (2)..(11): Xaa in position 2 to 11 is any amino acid
  Variant (13)..(15): Xaa in position 13 to 15 is any amino acid
  Variant (17)..(18): Xaa in position 17 to 18 is any amino acid
  Variant (21)..(21): Xaa in position 21 is any amino acid
  Variant (23)..(23): Xaa in position 23 is any amino acid
  Variant (26)..(27): Xaa in position 26 to 27 is any amino acid
  Variant (29)..(37): Xaa in position 29 to 37 is any amino acid
  Variant (39)..(42): Xaa in position 39 to 42 is any amino acid
  Variant (43)..(43): Xaa in position 43 is any or no amino acid
  Variant (47)..(47): Xaa in position 47 is any amino acid
  Variant (49)..(59): Xaa in position 49 to 59 is any amino acid
  Variant (60)..(78): Xaa in position 60 to 78 is any or no amino acid
  Variant (80)..(80): Xaa in position 80 is any amino acid
  Variant (83)..(83): Xaa in position 83 is any amino acid
  Variant (86)..(106): Xaa in position 86 to 106 is any amino acid
  Variant (107)..(122): Xaa in position 107 to 122 is any or no amino acid
  Variant (125)..(136): Xaa in position 125 to 136 is any amino acid
  Variant (138)..(146): Xaa in position 138 to 146 is any amino acid
  Variant (147)..(150): Xaa in position 147 to 150 is any or no amino acid
  Variant (153)..(155): Xaa in position 153 to 155 is any amino acid
  Variant (157)..(157): Xaa in position 157 is any amino acid
  Variant (158)..(158): Xaa in position 158 is any or no amino acid
  Variant (160)..(177): Xaa in position 160 to 177 is any amino acid
  Variant (178)..(192): Xaa in position 178 to 192 is any or no amino acid
  Variant (194)..(195): Xaa in position 194 to 195 is any amino acid
  Variant (196)..(202): Xaa in position 196 to 202 is any or no amino acid
  Variant (204)..(206): Xaa in position 204 to 206 is any amino acid
  Variant (207)..(208): Xaa in position 207 to 208 is any or no amino acid
  Variant (210)..(217): Xaa in position 210 to 217 is any amino acid
  Variant (219)..(220): Xaa in position 219 to 220 is any amino acid
  Variant (222)..(226): Xaa in position 222 to 226 is any amino acid
  Variant (227)..(227): Xaa in position 227 is any or no amino acid
  Variant (229)..(231): Xaa in position 229 to 231 is any amino acid
  Variant (232)..(233): Xaa in position 232 to 233 is any or no amino acid
  Variant (236)..(236): Xaa in position 236 is any amino acid
  Variant (238)..(256): Xaa in position 238 to 256 is any amino acid
  Variant (257)..(268): Xaa in position 257 to 268 is any or no amino acid
  Variant (270)..(272): Xaa in position 270 to 272 is any amino acid
  Variant (274)..(293): Xaa in position 274 to 293 is any amino acid
  Variant (294)..(309): Xaa in position 294 to 309 is any or no amino acid
  Variant (313)..(313): Xaa in position 313 is any amino acid
  Variant (316)..(320): Xaa in position 316 to 320 is any amino acid
  Variant (321)..(321): Xaa in position 321 is any or no amino acid
  Variant (323)..(350): Xaa in position 323 to 350 is any amino acid
  Variant (351)..(371): Xaa in position 351 to 371 is any or no amino acid
  Variant (373)..(402): Xaa in position 373 to 402 is any amino acid
  Variant (403)..(455): Xaa in position 403 to 455 is any or no amino acid
  Variant (457)..(457): Xaa in position 457 is any amino acid
  Variant (459)..(462): Xaa in position 459 to 462 is any amino acid
  Variant (464)..(465): Xaa in position 464 to 465 is any amino acid
  Variant (467)..(471): Xaa in position 467 to 471 is any amino acid
  Variant (473)..(476): Xaa in position 473 to 476 is any amino acid
  Variant (477)..(478): Xaa in position 477 to 478 is any or no amino acid
  Variant (481)..(489): Xaa in position 481 to 489 is any amino acid
  Variant (490)..(491): Xaa in position 490 to 491 is any or no amino acid
  Variant (494)..(497): Xaa in position 494 to 497 is any amino acid
  Variant (500)..(505): Xaa in position 500 to 505 is any amino acid
  Variant (506)..(517): Xaa in position 506 to 517 is any or no amino acid
  Variant (519)..(521): Xaa in position 519 to 521 is any amino acid
  Variant (523)..(523): Xaa in position 523 is any amino acid
  Variant (527)..(527): Xaa in position 527 is any amino acid
  Variant (531)..(531): Xaa in position 531 is any amino acid
  Variant (533)..(544): Xaa in position 533 to 544 is any amino acid
  Variant (545)..(551): Xaa in position 545 to 551 is any or no amino acid
  Variant (553)..(554): Xaa in position 553 to 554 is any amino acid
  Variant (557)..(558): Xaa in position 557 to 558 is any amino acid
  Variant (560)..(578): Xaa in position 560 to 578 is any amino acid
  Variant (579)..(579): Xaa in position 579 is any or no amino acid
  Variant (581)..(583): Xaa in position 581 to 583 is any amino acid
  Variant (585)..(595): Xaa in position 585 to 595 is any amino acid
  Variant (596)..(603): Xaa in position 596 to 603 is any or no amino acid
  Variant (605)..(609): Xaa in position 605 to 609 is any amino acid
  Variant (610)..(625): Xaa in position 610 to 625 is any or no amino acid
  Variant (627)..(627): Xaa in position 627 is any amino acid
  Variant (628)..(629): Xaa in position 628 to 629 is any or no amino acid
  Variant (631)..(655): Xaa in position 631 to 655 is any amino acid
  Variant (656)..(684): Xaa in position 656 to 684 is any or no amino acid
  Variant (687)..(688): Xaa in position 687 to 688 is any amino acid
  Variant (689)..(692): Xaa in position 689 to 692 is any or no amino acid
VXXXXXXXXXXGXXXLXXGGXAXDAXXAXXXXXXXXXPXXXXXGGGXFXXXXXXXXXXXXXXXXXXXXXXXXXXXXXXDXREXAPXXXXXXXXXXXXXXXXXXXXXXXXXXXXXXXXXXXXXPGXXXXXXXXXXXXGXXXXXXXXXXXXXPAXXXAXXGXXXXXXXXXXXXXXXXXXXXXXXXXXXXXXXXXFXXXXXXXXXGXXXXXGXXXXXXXXAXXLXXXXXXGXXXXXFYXGXXXXXXXXXXXXXXXXXXXXXXXXXXXXXXXDXXXYXXXXXXXXXXXXXXXXXXXXXXXXXXXXXXXXXXXXPPSXGGXXXXXXLXXXXXXXXXXXXXXXXXXXXXXXXXXXXXXXXXXXXXXXXXXXXXXXXXRXXXXXXXXXXXXXXXXXXXXXXXXXXXXXXXXXXXXXXXXXXXXXXXXXXXXXXXXXXXXXXXXXXXXXXXXXXXXXXXXXXXTXHXXXXDXXGXXXXXTXXXXXXFGXXXXXXXXXXXLNXXXXDFXXXXXXXXXXXXXXXXXXNXXXPXKRPXSSMXPXXXXXXXXXXXXXXXXXXXGXXGGXXIXXXXXXXXXXXXXXXXXXXXAXXXPXXXXXXXXXXXXXXXXXXXEXXXXXXXXXXXXXXXXXXXXXLXXXGXXXXXXXXXXXXXXXXXXXXXXXXXXXXXXXXXXXXXXXXXXXXXXXXXXXXXXDPXXXXXXR

SEQ ID NO: 58323 - protein, 21 aa, Artificial sequence
  protein pattern
  Variant (2)..(2): Xaa in position 2 is any amino acid
  Variant (4)..(4): Xaa in position 4 is any amino acid
  Variant (5)..(5): Xaa in position 5 is Ala, Cys, Asn, Ser, Thr or Val
  Variant (6)..(7): Xaa in position 6 to 7 is any amino acid
  Variant (9)..(13): Xaa in position 9 to 13 is any amino acid
  Variant (14)..(14): Xaa in position 14 is Ala, Ile, Leu or Val
  Variant (15)..(15): Xaa in position 15 is Ala, Gly, Ser or Val
  Variant (16)..(16): Xaa in position 16 is any amino acid
  Variant (18)..(18): Xaa in position 18 is any amino acid
  Variant (19)..(19): Xaa in position 19 is Ser or Thr
  Variant (20)..(20): Xaa in position 20 is any amino acid
  Variant (21)..(21): Xaa in position 21 is Glu, Gly, Asn or Gln
TXHXXXXDXXXXXXXXTXXXX

SEQ ID NO: 58324 - DNA, 1980 bp, Synechocystis sp.
  CDS (1)..(1980): transl_table=11
atgggggaagaacctgtgccggcggataaagcattaggcaagaaattcaagaaaaaaaatgcctcctggagcattgaagaaagcgaagctctgtaccgggttgaggcctggggggcaccttattttgccattaatgccgctggtaacataaccgtctctcccaacggcgatcggggcggttcgttagatttgttggaactggtggaagccctgcggcaaagaaagctcggcttacccctattaattcgtttttccgatattttggccgatcgcctagagcgattgaatagttgttttgccaaggcgatcgcccgttacaattaccccaacacctatcaggcggtttatccggtcaaatgtaaccagcaacgacatctggtggaagccctggttcgctttgggcaaacttcccagtgtggattggaggcaggttccaaaccggaattgatgattgccctcgcaactctaccacctcccttagaccgtcaggacaagcataccaagcccctaatcatttgtaatggctacaaagaccaggattatctagaaacagctctgttagccaaacgcttaggccatcgtcccatcatcatcattgaacaactacgggaactggaatgggtactacacatctctcagcagttaaacattaaacccatgttgggggtacgggcccggttaagttgtcagtcgctcaaatcctcggaaatttcctctggcaacggcgatcgggctaagcttggtctgaccatgccggacattgtgaccgtaattcatcgtctagaggaaaataattgtctcgattgcctgaaaatgcttcattttcatctgggaacgcaagtttcggacattgctctgattaaagaagctatgcgggaagccagccaactctatgtggaattggtcaagctgggggcaaaaatgcgctacctcaatgtggggggcggtttggcggtggattatgacggttccaagaccaactatcccgcctcgaaaaattacaacatgcaaaactacgccaacgacattgtggcggccattcaagatgcctgtgagcttgggcaggtttcccctcccattcttgtgagcgaaagtgggcgggcaattatggcccatcagtcggtgctagtttttgatgtgctaggcagcaaccaaacaggcttcagtgaaccccatccccccgatgaaaatgcccatcccctgctaaaaaatctctgggaatgttacgaaacaattacagcggaacaataccaggagcaataccatgatgctctgcaattaaagacggaggctagtagtctttttaacttcggctatttaagtctgacggaacggggacaagcagagcaaattcactgggcttgttgtcgtaaaatttttgaaatcaccagacaactagagtatattcccgaagattttcaagcgctggataaaataatgaccgatatttattacgttaacttatcggttttccagtcagcaccggaatcctggtctttagatcaactttttcccattttgcccattcaccatctcaatgagaaacctagtcaaagggtgattttagccgatttaacctgtgacagtgatggtaaaattgaccgttttattgacctgtgggatgtcaagtcatacctagaagttcaccccctagaaaatgacggcaatccttactatttaggtatgtttttagtcggtgcttaccaagaaattatgggcaatttacataatttatttggtgacattaatgtagttcacattgccactactccccaaggttatcagattgaatcggtggtgcggggagataccatgacggaggttttgggttatgttcagtacgattctgatgatttactcgaaggcctgcggcgtcatacggagttagccttgagcaatggacaaattaccctggaggaatctcggcgcttattggaagattatgagcaaagtttacggcgctacacctatctaagttaa

SEQ ID NO: 58325 - protein, 659 aa, Synechocystis sp.
MGEEPVPADKALGKKFKKKNASWSIEESEALYRVEAWGAPYFAINAAGNITVSPNGDRGGSLDLLELVEALRQRKLGLPLLIRFSDILADRLERLNSCFAKAIARYNYPNTYQAVYPVKCNQQRHLVEALVRFGQTSQCGLEAGSKPELMIALATLPPPLDRQDKHTKPLIICNGYKDQDYLETALLAKRLGHRPIIIIEQLRELEWVLHISQQLNIKPMLGVRARLSCQSLKSSEISSGNGDRAKLGLTMPDIVTVIHRLEENNCLDCLKMLHFHLGTQVSDIALIKEAMREASQLYVELVKLGAKMRYLNVGGGLAVDYDGSKTNYPASKNYNMQNYANDIVAAIQDACELGQVSPPILVSESGRAIMAHQSVLVFDVLGSNQTGFSEPHPPDENAHPLLKNLWECYETITAEQYQEQYHDALQLKTEASSLFNFGYLSLTERGQAEQIHWACCRKIFEITRQLEYIPEDFQALDKIMTDIYYVNLSVFQSAPESWSLDQLFPILPIHHLNEKPSQRVILADLTCDSDGKIDRFIDLWDVKSYLEVHPLENDGNPYYLGMFLVGAYQEIMGNLHNLFGDINVVHIATTPQGYQIESVVRGDTMTEVLGYVQYDSDDLLEGLRRHTELALSNGQITLEESRRLLEDYEQSLRRYTYLS

SEQ ID NO: 58326 - DNA, 2076 bp, Glycine max
  CDS (1)..(2076)
atgcctgccctggcttgttgcgtggatgctgcagcacctcccggctatgcatttgccggtgacatctcttttccggcgccggtcgcccttactggcgtacctccggccacgacagacgacagcaacaacaaccgttggtcgccgtccctctccgctgcgctctacaacgtcgacggctggggcggcccctactttgccgtcaacaccgccgggaacatctccgtgcgcccacacggttccgacacgctgtcgcaccaggagatcgatttgctgaagattgtgaagaaggcctccgatcccaaatctcttgggggtctcagcctccagcttcctctcattgcccgcttccctgacgttctgaagaaccggttggagtccctccagtcggcgttcgattatgcaatccaatctggagggtacgagtctcattaccaaggagtttaccccgtgaaatgcaaccaggaccggttcgtggtggaggatatcgtgaaattcggttcacccttccggttcggtctggaggccgggtctaagccggaactccttctggccatgagctgtctttgcaaaggcaaccccgacgcgcttttgatttgcaacggcttcaaggacgcggagtacatttctcttgccctggttgccaacaaacttgccctcaacaccgtgattgttgtggagcaggaggaggaggttgatttgatcgttgaattgagcaagaagctctgtattaagcccgtgattgggcttcgtgcgaagcttcggaccaagcattccggccatttcggtgggacttcaggagagaaggggaagtttgggctgaccaccgctcagattcttagggttgtgaagaacctggacctcgcgggcatgctggattgcctgcaactgctgcattttcatattggttctcagattccctcaacagcgttgcttgctgatggtgtgggagaggctgcgcagatctactgcgagttggttcggctcggggcgaacatgcgagtcatcgatattggaggtggactgggcatagattacgacggttccaaatcgtgtgactctgatatttccgttgagtacagtctcgaggattatgcagtcgcggttgttcacgcggttcagtgtgtgtgcgaccgaaggtccgtgaaacacccagttatctgcagcgagagtgggagagccatcgtgtctcatcattcggtcttgattttcgaggcggttggcaccagcagcaccaccgggggaggagcttcccctgcattgtccgctcaatatctggcggaggagctgtcggaggattaccgcaatctgtcggagctggcttttagaggggaatatgaaacgtgtctggtgtacacggaggagatgaaggagcgatgcgtggaacagttcaagcaggggacggtgtgtatggaacagctggcagcggtggaaggattgtgcgagttggcgaggaaggcggttggggcgggggaatcggttcggagatatcacgtgaacctgtctgttttcacgtccgttccagacgcgtggggaattgaacaggtgtttcccattatcccaattcaccgtttggacgaaaagccttcggtgaggggtattctctcggacttgacttgtgacagcgacgggaagattgacaagttcatcaacggagagtccagcctgccgcttcatgagatggaaggaggaagaacttactatctgggaatgtttttgggtggggcttacgaggaggcgctcggtggagtccacaacttgttcggcggccccagcgtggtcagggtgtcgcagagcgatggccctcacagctttgcggtcacgcgtgccgtgccggggccatcctgtggagatgttcttcgagtgatgcagcaccagcccgagctcatgttcgagacactcaagcaccgcgcgcaggagtatgtcagccacgacaacgcagcagcgcttctggctgctggccttgctcgcacctttgacagaatgccttatctgctgtctctgtcttcctttgtggctgacgatgttgccgctgctgttcctgctgctcaagatctgggggagcagtggtcttattaa

SEQ ID NO: 58327 - protein, 691 aa, Glycine max
MPALACCVDAAAPPGYAFAGDISFPAPVALTGVPPATTDDSNNNRWSPSLSAALYNVDGWGGPYFAVNTAGNISVRPHGSDTLSHQEIDLLKIVKKASDPKSLGGLSLQLPLIARFPDVLKNRLESLQSAFDYAIQSGGYESHYQGVYPVKCNQDRFVVEDIVKFGSPFRFGLEAGSKPELLLAMSCLCKGNPDALLICNGFKDAEYISLALVANKLALNTVIVVEQEEEVDLIVELSKKLCIKPVIGLRAKLRTKHSGHFGGTSGEKGKFGLTTAQILRVVKNLDLAGMLDCLQLLHFHIGSQIPSTALLADGVGEAAQIYCELVRLGANMRVIDIGGGLGIDYDGSKSCDSDISVEYSLEDYAVAVVHAVQCVCDRRSVKHPVICSESGRAIVSHHSVLIFEAVGTSSTTGGGASPALSAQYLAEELSEDYRNLSELAFRGEYETCLVYTEEMKERCVEQFKQGTVCMEQLAAVEGLCELARKAVGAGESVRRYHVNLSVFTSVPDAWGIEQVFPIIPIHRLDEKPSVRGILSDLTCDSDGKIDKFINGESSLPLHEMEGGRTYYLGMFLGGAYEEALGGVHNLFGGPSVVRVSQSDGPHSFAVTRAVPGPSCGDVLRVMQHQPELMFETLKHRAQEYVSHDNAAALLAAGLARTFDRMPYLLSLSSFVADDVAAAVPAAQDLGEQWSY

SEQ ID NO: 58328 - DNA, 3037 bp, Cucurbita ficifolia
  CDS (541)..(2661)
gtttattaaacgcattctattgtctctccgagggctctccaattcttcccgttaggtttccgtttgttcctctttttctccgcctttttcccggaaaatctgtttgttgaagcaattgcatcctcttttgttttgtttttcttcttttgttgaatccctggtttgaatttttgtgtggattctttgatttccagatctgcatggtgaagagcggtttcggtgtttgatgtttgattggttttgaattcgtagcttgatttttgtgtttgttgttatcaaattcttcttctgagcggatcgcggtgggatattggaagtgtataggggagcgcggtggatttgacggtggaaatagctactttttttgcttcttttgagggggtagccggggcctcggcctcggcgggttttaaagcccccacttggacgaactctggatttaccattcctttctcttaacaatttctctaactaatcttttcgttttttaaattttccgtctccattttcttattcttttcttgatccgtcgtcggagagatgccggccctagcttattgcgtggaagctgctgcagctcctcctcctggctgcgcttttgctggggatagctctcttccgtcgccggtcttattttccggcggacctccggagactaccatcttcacctctcccgctgctgctcccatttctgaaaatccctcttggtctccttctctgtcttcctccctttacaagatagatggatggggtgccccttatttctctgtcaatggctctgggaatatggccgttcggccttacggtacagccaccttgccccatcaggagattgatctcttgaaaattgtgaagaaggcttcagatccgattagctctggtgggcttggcttgcagcttcctcttattgtgcgccttcctgatgtgcttaagaaccgtttggagtctctccaatcggcatttgattgtgctattcaatctcagggatatgggtctcattaccagggcgtttatccggtcaaatgcaaccaggacaggttcgttgttgaagacatcgtgaaattcggttctcctttccgtttcggtctcgaggctggatcgaaaccggagctcctcctggcaatgagctgtttgtgcaaagggaatagagatgcccttttggtgtgtaatggtttcaaggatgcggagtacatttctctggctcttattgctaggaagctcgctttgaacactgtgattgtgcttgaacaagaggaagagcttgatttggttatcgatttgagtaaaacgctcttcgttcgccctgtgatcggcatgcgtgcgaagctaagaaccaagcattctggtcattttgggtctacatcaggcgagaaagggaaatttggtcttacgaccacacaaattcttcgtgtggttaggaagcttaaacaggctgatatgcttgattgtcttcaattgctccattttcatattggttcccagatcccctccaccgtgttactcaccgatggcattagcgaggctgctcaaatctattgtgaattggttcgtctcggtgccaacatgctagttattgacattggaggtggtcttggtatcgactatgacgggtcgaagtcaggggattctgagttatctgttgcttatgaactcggagagtatgcctctacggttgttgatgcagtccgctgtgtatgcgaccgtagggccgttaagcacccgataatttgcagtgaaagtggccgagcaatcgtctctcatcactctgttctgatatttgaggctgtttctgctagttcttatgaggtcccatccatgagctcgattgaacgtcagtatcttgtcgatggactaaccgacgatgctcgtattgattatcagaaccttttgactgcagcttatatgggtgagtacaaggcgtgcttgctatatgcagatcaattgaagcaatgctgtgttgagaaattcaaggatgggtgtttgggaatggaagaactagctgcggtagatgggctttgtgcccttgtttcaaaggcaattggagagttggatgctgtaagaacttaccatgtgaacctctccattttcacctctatcccagatttctggggtattgaccagctgtttccaattgtccctattcatcgtctcgatcaaagaccgtcagtgaggggcattctatccgatctaacctgtgacagtgacggtaagatcgataggtttatcaatggcgagtcgagcttgccgttgcatgagctcaaaggcaacagcagtttatcaggtggaggtgggcgatactatcttgggatgtttctaggtggggcttatgaggaggctctcggtggtgttcacaacctgtttgggagcccgagcgtgattcgggtaatgcagagcgatggaccgcatagctttgcggtgactcgcactgtgcctgggccatcatgtgcggatatcctccgagtgatgcagtacgagcccgagctcatgtttgagaccctcaagcatcgagctgaggagtttgggcaggaggaggaggatgatgttggaggcattgccaatagcttggccatgtccttccgcaacatgccttatttggctagcgcatcttcctgcgccaatggtgctggcgatgccgagcagtggacttactgctatgcttgatgaataatgtttgaaggtttagtcgttagccacatccctaaataagctattggtctgttttcgttgtcgtggtcgtcgtcgtcgtaggtccgtcaacctttttttttttcttctttggcttgttgcaaagggttatgagagcacagcaacagcagccaagctcctcttcctttggctttatttttgtttagataggagaggggattagtagaacaccgaatccacccttttgttaattcgggatcttgatctctcttggttatatcatggtgtacaacttttaagaagccgtcaatggctgtttttcttttagatctcaactttggatggctcaaccccacttcgaattataaaaaaaaaaaaaaaaaaaaaaaaa

SEQ ID NO: 58329 - protein, 706 aa, Cucurbita ficifolia
MPALAYCVEAAAAPPPGCAFAGDSSLPSPVLFSGGPPETTIFTSPAAAPISENPSWSPSLSSSLYKIDGWGAPYFSVNGSGNMAVRPYGTATLPHQEIDLLKIVKKASDPISSGGLGLQLPLIVRLPDVLKNRLESLQSAFDCAIQSQGYGSHYQGVYPVKCNQDRFVVEDIVKFGSPFRFGLEAGSKPELLLAMSCLCKGNRDALLVCNGFKDAEYISLALIARKLALNTVIVLEQEEELDLVIDLSKTLFVRPVIGMRAKLRTKHSGHFGSTSGEKGKFGLTTTQILRVVRKLKQADMLDCLQLLHFHIGSQIPSTVLLTDGISEAAQIYCELVRLGANMLVIDIGGGLGIDYDGSKSGDSELSVAYELGEYASTVVDAVRCVCDRRAVKHPIICSESGRAIVSHHSVLIFEAVSASSYEVPSMSSIERQYLVDGLTDDARIDYQNLLTAAYMGEYKACLLYADQLKQCCVEKFKDGCLGMEELAAVDGLCALVSKAIGELDAVRTYHVNLSIFTSIPDFWGIDQLFPIVPIHRLDQRPSVRGILSDLTCDSDGKIDRFINGESSLPLHELKGNSSLSGGGGRYYLGMFLGGAYEEALGGVHNLFGSPSVIRVMQSDGPHSFAVTRTVPGPSCADILRVMQYEPELMFETLKHRAEEFGQEEEDDVGGIANSLAMSFRNMPYLASASSCANGAGDAEQWTYCYA

SEQ ID NO: 58330 - DNA, 1872 bp, Oryza sativa (japonica cultivar-group)
  CDS (1)..(1872)
atggcgaagaagaactacggtcaagtgtacaacatcctcgggtggggcgacccctacttcaccgtgaactcccatggccacctcgccgtcaagccccatggccgcgacaccatgtccggccaggacatcgacgtccactccgtcatccacagagctctcgccaccaccatcaccaccaacgacggcgacaagaagccccagttcccgatgatcctccgcttccccgacgtgctcaagaaccgcctcgactccctccacgccgccttccatggcgccgtcgacagcaccggctacgcgtccaggtaccagggcgtgttccccatcaaggtgaaccagaacaaggccgtcgtccaggacctcgtcaccttcggccatggctacagctacggcctcgaggctggctccaagccggagctgctcatcgccatgagctgcctcgccaaggccaagcccggagcttacctggtctgcaatggctacaaggacgccgactacgtcgcgctcgcgctctccgcgcgcgccatgggcctcaacgccatcatcgtgctggagatggaggaggagctcgacatcgtcgtcgagcagagcgccaggctcggcgtcgagccggtcatcggcgtccgcgccaagcttctcaccaagattccgggacacttcggctccacggccggcaagcacggcaagttcgggatgctcgccgacaagatctacgaggtggccggcaagctgaagaagatggggaagctgcactggctgaagctgctgcactaccatgtcggctccatgatcccgaccaccgacatcgtgtacaacgcggcggccgaggccgcaggaatctactgcgcgctggtgaaggagcacggcgcgacggggatgaccacgctggactgcggcggcgggctcggcgtcgactacgacgggacgcggtcgggcagctccgacatgtcggtggcgtacgggctcgagcagtacgcgtccagcatcgtgcaggcggtgcggctcacgtgcgacgacaatggcgtcccccacccggtgctctgcaccgagagcggccgcgccatggcgtcgcaccactccatgatcatcctcgaggcgctctcggcgatcccggagccgcaggacgaggaggacacccatcaccggctgctcagcaagatccaggacctctcctccaagcagccaagaactgctcataccgtcaatggcggcggcggcgtggacgccatgcactcgcacgccgtggagctgaagaagcacgggatcgagatgtacaagctggcgaagaagctgtccaagagggtgaccggcgacgccaacggcatctacaactaccacatgaacctctccgtcttctccctcgtccccgacttctggggcatcggccagctcttcccgatgatgccggtgagccggctgaacgagaagccgaccatcaacggcacgctggtcgacatcacctgcgacagcgacggcaaggtagagaagttcatccgcgacgccgtgacgctgccgctgcacccactcgacgacgcggcggcggagcacggcggctactacgtggcggcgctgctgtcgggggcgtaccaggaggccctggcgtgcaagcacaacctgttcagtggccccacgctcgtgcgcgtcgagagcgccggcggcggcggcgcgttcaagatcgtctccgttgagctcggcccgacggcggaggaggtcatcggcacgatgaggtacgacgtgaagaacgacattagcgatgtgatcgagaaggttgcgacggagaatggcgtgtggccgatggttgagccgctgatgaagaaagggctgaccaccatgccctacctcaacgattacaagccccccaaaaccaccttttaa

SEQ ID NO: 58331 - protein, 623 aa, Oryza sativa (japonica cultivar-group)
MAKKNYGQVYNILGWGDPYFTVNSHGHLAVKPHGRDTMSGQDIDVHSVIHRALATTITTNDGDKKPQFPMILRFPDVLKNRLDSLHAAFHGAVDSTGYASRYQGVFPIKVNQNKAVVQDLVTFGHGYSYGLEAGSKPELLIAMSCLAKAKPGAYLVCNGYKDADYVALALSARAMGLNAIIVLEMEEELDIVVEQSARLGVEPVIGVRAKLLTKIPGHFGSTAGKHGKFGMLADKIYEVAGKLKKMGKLHWLKLLHYHVGSMIPTTDIVYNAAAEAAGIYCALVKEHGATGMTTLDCGGGLGVDYDGTRSGSSDMSVAYGLEQYASSIVQAVRLTCDDNGVPHPVLCTESGRAMASHHSMIILEALSAIPEPQDEEDTHHRLLSKIQDLSSKQPRTAHTVNGGGGVDAMHSHAVELKKHGIEMYKLAKKLSKRVTGDANGIYNYHMNLSVFSLVPDFWGIGQLFPMMPVSRLNEKPTINGTLVDITCDSDGKVEKFIRDAVTLPLHPLDDAAAEHGGYYVAALLSGAYQEALACKHNLFSGPTLVRVESAGGGGAFKIVSVELGPTAEEVIGTMRYDVKNDISDVIEKVATENGVWPMVEPLMKKGLTTMPYLNDYKPPKTTF

SEQ ID NO: 58332 - DNA, 1848 bp, Helicobacter pylori 26695
  CDS (1)..(1848): transl_table=11
atgcaagaagtccatgattatgggattaaattttggagcaataacgaatttaagatagaaaaaggcttggttaaagtctgtcatggtaaaaacccctcgcttttagaaatcgttcaaagcgtgcgcgataagggctatagaggacctttgttggtgcgattcccccatttggtgcaaaaacaaatcaaaagcctgtttgatgcgttttcttcagcgattaaagagtatcaatacagcggggcttttaaggcggttttccctttaaaagtcaatcaaatgccctcgtttgttttccctttagtgcagggggctaagggtttgaattacggattagaggctgggagcaagtctgaactcatcatcgcaatgagttacactaaccctaaagcccctatcaccgtgaatggctttaaagacaaagaaatgattgagcttggctttatcgctaaaagcatgcagcatgagatcactttaacgattgagggtttgaatgaattgaaaaccattatcgccgtggctaaacaaaacgagtttttagcctgccctaaaattggcatccgcatccgtttgcacagcactggcactggcgtttgggcaaagagtggggggatcaattctaaatttggtcttagcagcactgaagttttagaggcgatgcgccttttagaagaaaacgacttgttagagcatttccacatgatacatttccatataggctctcaaatcagcgatatttcgcccttaaaaaaggctttaagagaagcgggtaacttgtatgcagaattgcgtaaaatgggcgctaaaaatcttaatagcgtgaatattggaggggggttagccgtagaatacacccaacacaagcaccaccaagacaaaaactacactttagaggaattcagcgctgatgtggtgtttttattgagagaaattgtgaaaaataagcaggaaatcgagccggacattttcattgaatcaggccgttatatttccgctaaccatgccgttttagtggccccggtgttagaattgttttcgcatgaatacaatgaaaaatccctaaaaatcaaagaaaataataacccccctttgattgatgaaatgctagacttgctcgctaatatcaatgaaaaaaacgccattgaatacttgcatgatagttttgatcacaccgagtcgctattcacgctttttgatctgggctatattgatttgattgacaggagcaacactgaagttttagcccatttgatcgtcaaaaaagcggtgcaattgctttatgttaaggatcataacgatattttacgcattcaagagcaggtccaagagcgctatttattgaattgctcgtttttccaaagcttgccggattattggggcttgagacagaatttcccggtcatgcccttgaataaattagatgaaaagcccaccaggagtgcgagcttgtgggatattacttgcgatagcgatggggaaatcgcttttgattccacgaagcccttgtttttgcacgatatagatatagatgaagaagaatactttttagcgttctttttagtgggagcgtatcaagaagttttaggcatgaaacacaatttattcacgcaccctacggaatttagcgtggtttttgatgaaaaaggcgattatgaagtggaagatatttgtgaagcccaaacgattttagatgtgctagacgatttagactatgacactaaagagatcgagcgccttttaaaacaaaaaattgaagacaacaaccaactagacatggaagaaaagaaagaaatcatggggcgcctgtatgtcatgctgagcgaaaacgggtatttgcgcacgatttcttaa

SEQ ID NO: 58333 - protein, 615 aa, Helicobacter pylori 26695
MQEVHDYGIKFWSNNEFKIEKGLVKVCHGKNPSLLEIVQSVRDKGYRGPLLVRFPHLVQKQIKSLFDAFSSAIKEYQYSGAFKAVFPLKVNQMPSFVFPLVQGAKGLNYGLEAGSKSELIIAMSYTNPKAPITVNGFKDKEMIELGFIAKSMQHEITLTIEGLNELKTIIAVAKQNEFLACPKIGIRIRLHSTGTGVWAKSGGINSKFGLSSTEVLEAMRLLEENDLLEHFHMIHFHIGSQISDISPLKKALREAGNLYAELRKMGAKNLNSVNIGGGLAVEYTQHKHHQDKNYTLEEFSADVVFLLREIVKNKQEIEPDIFIESGRYISANHAVLVAPVLELFSHEYNEKSLKIKENNNPPLIDEMLDLLANINEKNAIEYLHDSFDHTESLFTLFDLGYIDLIDRSNTEVLAHLIVKKAVQLLYVKDHNDILRIQEQVQERYLLNCSFFQSLPDYWGLRQNFPVMPLNKLDEKPTRSASLWDITCDSDGEIAFDSTKPLFLHDIDIDEEEYFLAFFLVGAYQEVLGMKHNLFTHPTEFSVVFDEKGDYEVEDICEAQTILDVLDDLDYDTKEIERLLKQKIEDNNQLDMEEKKEIMGRLYVMLSENGYLRTIS

SEQ ID NO: 58334 - DNA, 1908 bp, Geobacter sulfurreducens PCA
  CDS (1)..(1908): transl_table=11
atggaacgctggtcgattaacgaatctgcgaagatctacaacctgcccaactggggcgccgacctcttctccatcaacaagaaggggaacgtctgcgtgcacccgtcacccacgtccaagcattccatcgacctgcgtgccctggtggacgatctgatcaagcgcaagatcaagccccccatcctgctccggttcatggacgtgctccaggggcggatcgcatccatcaaccgagtcttcaagaacgccatcgacgagaacgactacccggccacctaccagaccttctaccccatcaaggtgaaccagcagcgccaggtggtggaggccatcgccaagttcggcaagcgctacaatatcggcctggaagtgggctccaagccggagctggtgatcggcatctccttcgccaccggcaacggcatccccatcatctgcaacggttacaaggacaccgagtatatcgagacggtcctctacgccaccaagatcggctacgacatcaccatcgtggtggagaagatgttcgagctggagaagatcattgccctgtcgaaaaagaccggcatcaagcccaagctgggcatccgggtgaagctttcctccaaggggaccggcaagtgggccacttccggcggtgaggacgccaagttcggcctccggatgtcggagatcatcgccgctatcgggctcctggagcaaaatgacctcctggaccgggtgaagctcctccacttccacatcggcagccagatcaccaagatcgacaagatcaagagcgccctgatcgagggaacccgtatctacgccgagatgcgcaagctgggggtcggcatccggtacgtggacatcggcggcggcctgggggtcgactacgacgggtccaagtcgagctacttctccagcgtcaactactccatcgaggagtacgccaacgacgtcatctaccagatcaagaacatctgtgaggacgccggcgtcgaatgccccaacatcatctccgaatcggggcgggccacggcggcccactactcggtgctcgtgaccaatctcctcaacaccaacacgtccaatgccatgcccgacttcgaggagaccctcaacggcacggaaaagctggccccaacggtcaagaagctggtggacatctacaagagcatcgaccgctattctctgcgggaggactaccacgatacggtccagctcatccaagaggcggtgagcctcttcaacctgggctacctgacccttaacgagcgggccatggccgagtggctccacggtaagatcctgcgcaagatcaacggcatcgtggaaaagatcaagccgatccccgaggagctccagaatttccagctgagcctgcggcagacctatttcgccaatttctcgctgttccagtcgattcccgactcttgggccatcgaccagctctttcccatcgtgccgatccagcggctcaaccagaagcccgacgtgatggcctccatcgccgacatcacctgcgattcggacggggagatcaccagcttcgtgggcgagaacggccggaccaagtacctgccgcttcacaagatgcgcaaggacgaggactatttcgtgggcttcttcctgatcggcgcctaccaggagatcctgggggacatgcacaacctgttcggcgataccaacgccgtccacgtcaccttcaacaagaagaccggctacaagatcgatacggtcatccatggcgacgccacctgggagagcctcaagtacgtccagtacaaggggccggagatcctgaagcacgtccgcgacaccctggagaaggacgtggcccttcgcaaggtcaccatcgaggagagtagccatttccttgagctgctggaccggacgctcctgggctacacctacctgggggaatga

SEQ ID NO: 58335 - protein, 635 aa, Geobacter sulfurreducens PCA
MERWSINESAKIYNLPNWGADLFSINKKGNVCVHPSPTSKHSIDLRALVDDLIKRKIKPPILLRFMDVLQGRIASINRVFKNAIDENDYPATYQTFYPIKVNQQRQVVEAIAKFGKRYNIGLEVGSKPELVIGISFATGNGIPIICNGYKDTEYIETVLYATKIGYDITIVVEKMFELEKIIALSKKTGIKPKLGIRVKLSSKGTGKWATSGGEDAKFGLRMSEIIAAIGLLEQNDLLDRVKLLHFHIGSQITKIDKIKSALIEGTRIYAEMRKLGVGIRYVDIGGGLGVDYDGSKSSYFSSVNYSIEEYANDVIYQIKNICEDAGVECPNIISESGRATAAHYSVLVTNLLNTNTSNAMPDFEETLNGTEKLAPTVKKLVDIYKSIDRYSLREDYHDTVQLIQEAVSLFNLGYLTLNERAMAEWLHGKILRKINGIVEKIKPIPEELQNFQLSLRQTYFANFSLFQSIPDSWAIDQLFPIVPIQRLNQKPDVMASIADITCDSDGEITSFVGENGRTKYLPLHKMRKDEDYFVGFFLIGAYQEILGDMHNLFGDTNAVHVTFNKKTGYKIDTVIHGDATWESLKYVQYKGPEILKHVRDTLEKDVALRKVTIEESSHFLELLDRTLLGYTYLGE

SEQ ID NO: 58336 - DNA, 1989 bp, Bdellovibrio bacteriovorus HD100
  CDS (1)..(1989): transl_table=11
gtgctccaagcacgtcggagcgaaagaggtcccctgacaacgcagtcaattgggcccttttcatcggtcccccgaggagagcgagagatgacttggagtcctgaaaaaagtgctgagctttatgggattaataactggggcaacggttatttcagaattaacagcgcaggcaatgttgctgtcactccgatgggcgctacaggtccgacagtggatctgcatgagctgacccaagatcttttggaccgcggtatccgcgttcccatcatgattcgttttccggaaattattaaatcccgcgtggagcttttgaacggctgcttccaaaaagcatttgctgatcatggctacaaaggccagtaccggggcgtttacccgatcaaggtgaaccaacagcgtcacctggttcaggaactggtgaaatacggcaaagactactccatgggtcttgaagcgggttccaagcctgagcttctggtcgttctggctttgatgaacactccagatgcacttatcatctgcaacggtttcaaagactgggaatacatcgaaactgcgatcctgtcccagaaactgggccgcaacaccatcatcgtggtggatcgtaaagaagaattgaaaatgatcgtggatgtggcgaaaaagtttaacgcccgtccaaaaatcggcttccgcgcgaagctgaacactcaaggtgccggcaagtgggttgattcctctggtgcccgctccaagttcggtctgacttccactgaaatcgtggaaggcgttgagttcctgaaaaacgaaggcatgttggattgcctggaacttctgcactaccacattggctctcaggttccgcagatccagtccatcaagtcctctttgaaagagggcgcgcgcttctacactgagctgtacaaaatgggcgcaggcctgaagtacatcgacgtgggcggcggcttgggcgttgactatgacggttccggccactctgacagctctgtgaactattctgagcaggaatacgccaacgacatcgtgtctgtgcttcagactctgtgtgatgaaaaaggcattccacatccaaacatcgtgacggagtccggccgcttcctggtggctcaccactcggttttggtgttcaacgtgatgggcgtgaacgatcttcaccgccacgagccgcctcgtccagcgacgaaaacggatcattccatcatgcaggacatgcagtacatctttgaaaaggtgaacaaagacaatatcaacgagtgcttcaatgacctggaacaggccaaacaagaaactctgcaattgttcacttacggcgtcttgagccttgaacagcgtgcatggtgtgaatccatgtactttgcgatcgcgaccaagatgatcaaactggcgcgcgcgactccggattgtgaagacatcgtggcggctttgggcaaagaactgtgcgacacttacttctccaacttctctgtgttccagtctgtgccggattcatgggcggtgggtcagttgttcccagtgatcccaattcaccgtctgggcgaagagcctaaacgtgaagcgactttggcggatctgacttgtgactctgacggtgtgatcgaaaagttcatcgacaccgcttctggtgaaccgaaagaaaccatccgcttgcatcagttcactgagggccagcagtactatctgggtgtgttcctgaccggtgcctaccaagagatcctgggcgatttgcataacttgttcggggatactgatgcagttcacatctctttgaatggcgtgggttacaccattgaccactacgttccgggcgacacggtgactgaggttctgtcttacgttcagtacggccgttctgaaatggtcgacagcgttcgtcaggcgacagaggaatccatccagaagggctcgatcaccaaacaagaagccaagcttctgatcaagcactacgaagaaggtctttccggttacacatatctggaagaagccgagtaa

SEQ ID NO: 58337 - protein, 662 aa, Bdellovibrio bacteriovorus HD100
MLQARRSERGPLTTQSIGPFSSVPRGEREMTWSPEKSAELYGINNWGNGYFRINSAGNVAVTPMGATGPTVDLHELTQDLLDRGIRVPIMIRFPEIIKSRVELLNGCFQKAFADHGYKGQYRGVYPIKVNQQRHLVQELVKYGKDYSMGLEAGSKPELLVVLALMNTPDALIICNGFKDWEYIETAILSQKLGRNTIIVVDRKEELKMIVDVAKKFNARPKIGFRAKLNTQGAGKWVDSSGARSKFGLTSTEIVEGVEFLKNEGMLDCLELLHYHIGSQVPQIQSIKSSLKEGARFYTELYKMGAGLKYIDVGGGLGVDYDGSGHSDSSVNYSEQEYANDIVSVLQTLCDEKGIPHPNIVTESGRFLVAHHSVLVFNVMGVNDLHRHEPPRPATKTDHSIMQDMQYIFEKVNKDNINECFNDLEQAKQETLQLFTYGVLSLEQRAWCESMYFAIATKMIKLARATPDCEDIVAALGKELCDTYFSNFSVFQSVPDSWAVGQLFPVIPIHRLGEEPKREATLADLTCDSDGVIEKFIDTASGEPKETIRLHQFTEGQQYYLGVFLTGAYQEILGDLHNLFGDTDAVHISLNGVGYTIDHYVPGDTVTEVLSYVQYGRSEMVDSVRQATEESIQKGSITKQEAKLLIKHYEEGLSGYTYLEEAE

SEQ ID NO: 58338 - DNA, 1944 bp, Prochlorococcus marinus str. NATL1A
  CDS (1)..(1944): transl_table=11
atggctgtgaaaaatactaatcaatctctttcttggactatccaaaatagctcagagctctatgggattgatcgatggggcaagggttatttcactatcaatgaaaaagggaatattagtatttgtcctaacggttccaaaaacaaatctcatgatttgatagaactattagatgaactcgaaagtcgaaaactaaaatttcctctgttaataagatttgacgatattctagaagactgcttaaaaaacttacataaagcttttgaaaaagcgattaatgactatcaatatgaaggaaaataccaaggtgtatttccaataaaatgtaatcaacagcgtcacgtagttgaagaattaatcacctgtggttccaaatggaattttggcttagaagctggaagcaaaccagagttactaattggtttatcaatcctagaaaatcctaaagccttactcatatgtaatggctataaagatcaacgttatattgaaacagctattttagcacgtcagcttggacgtcaacctatagtagttatagaacaagcaaatgatgttgagcttataatcaaatctagtgatttacttggagcgtctccactcataggaatacgagccaagctatcgagtcaaagcagtggaagatggagtagctcgattggtgacaagtcaaaatttggactttcaattccagaaattttaaaaacaatcaaaaggttaaaagaagcaaatcttctcaatgaattaaagcttttacattttcatctagggagtcaaattaacgatataggtgttttaaaagatgccttacaagaagcaggacaaatttatgccgaattaattaatcttggggcacctatgggatacttagatgttggaggtggcttaggaattgattacgatggaagtcaaaccgcctcaatagcatctactaactattcacttcaaaattatgcaaatgatgtagtagcaacaattaaagaatgttgtgaatcaaaaaagataccactacccactttaattacagagagtggaagagctattgctagtcacttttcgattttaatcttcaatattctaggtaaaaattcgttaccttctgacattcctaaagaaagcgaaaaagaatgtctctctgtcagaaatttacgtgacacattagtccatataaattctctagaacttaagcaagaagaagatttagccaaactacaagaagcatggaatgattctcttaaattcaaagcagatgcacttgcggcttttcgactcggttatatagatttagttgaacgagcaaaagctgagcagttgacatgggcctgtgcaaaaacaatagttaatcagttaccaaaaaacatacttctacctaaagaactaaagaaattaagtgaaagcttagccgttacgtattacgcaaatctttccgtatttagatcagctccagacacatgggccattgatcaagtctttccaattatgccaatccatcggcttcgcaaagaaccgaaaaaacttggtcactttgcagatttaacatgtgattcagatggaaagcttgatcaatttattgataatggaaaaattaaaaatttgctccctcttcatgaatttaatcaagacgaaaaatatctaattggtcttttcttgggtggcgcctatcaagaagtaatgggaaatctacataatttatttggaagtactaatgcagtccatataagatttacagaaaatgggaactataaagttgagcatgtcattcgtggaaatacaaaatcaaatgttcttgaatatttagaacatgatccagaaatattattagaacgattacgaaaatcaagcgaattagctattcaaggcgggcatctaaaaatccatgatgcacaaaaactaatagagcatgtagaagcaagcctccgtcaaagtacttacctacagagctaa

SEQ ID NO: 58339 - protein, 647 aa, Prochlorococcus marinus str. NATL1A
MAVKNTNQSLSWTIQNSSELYGIDRWGKGYFTINEKGNISICPNGSKNKSHDLIELLDELESRKLKFPLLIRFDDILEDCLKNLHKAFEKAINDYQYEGKYQGVFPIKCNQQRHVVEELITCGSKWNFGLEAGSKPELLIGLSILENPKALLICNGYKDQRYIETAILARQLGRQPIVVIEQANDVELIIKSSDLLGASPLIGIRAKLSSQSSGRWSSSIGDKSKFGLSIPEILKTIKRLKEANLLNELKLLHFHLGSQINDIGVLKDALQEAGQIYAELINLGAPMGYLDVGGGLGIDYDGSQTASIASTNYSLQNYANDVVATIKECCESKKIPLPTLITESGRAIASHFSILIFNILGKNSLPSDIPKESEKECLSVRNLRDTLVHINSLELKQEEDLAKLQEAWNDSLKFKADALAAFRLGYIDLVERAKAEQLTWACAKTIVNQLPKNILLPKELKKLSESLAVTYYANLSVFRSAPDTWAIDQVFPIMPIHRLRKEPKKLGHFADLTCDSDGKLDQFIDNGKIKNLLPLHEFNQDEKYLIGLFLGGAYQEVMGNLHNLFGSTNAVHIRFTENGNYKVEHVIRGNTKSNVLEYLEHDPEILLERLRKSSELAIQGGHLKIHDAQKLIEHVEASLRQSTYLQS

SEQ ID NO: 58340 - DNA, 1947 bp, Prochlorococcus marinus str. MIT 9303
  CDS (1)..(1947): transl_table=11
atgtcggcagccgacccaagccagggcaacaagtcatggaccgttgcagacagtgcagccctctatggcctcgatcgctggggtgagccctacttcacagccaacgccaacggccacgtgcaggtcaagccacgcggcgatcaaggcagctgcctcgatctggtggaactggtagaggagctcaaaagccgcaacctcaacttgcctctgctgatccgctttgatgacatcctcgaagaccgactagagaaactgcacagcgccttcgaacaagccattagcaaatacggatacgccggtcgatatcaaggcgtattcccggtgaagtgcaaccaacaacgccacgtcgtagaacaactggtggaaagtggtcgccactggcactttggcctagaggctggcagcaaggctgagctgctgattgctctttcactcgtcaacgacccagaggcactactgatctgcaacggctacaaagatcagcgctacatcgaaaccgcgatcttggcccgcaggcttggtcgccaacctgtagtagtgattgaacaacccgatgaggtggaacggattatccgctccagccaagagcttggcgcagcacctttcatcggtgtacgagcaaagttaacgacacgcagtacgggccactggagtagctctgtaggcgagaaagccaagttcggtctctcattcccggatctgctaagcacagtggaagccttaagacaagctgatctcctcagcgatctgcgcctactgcacttccacatcggcagccaaatcaacgacatcgccgtactcaaagacgcgattcaagaagcagggcaaatttacgtagagctgaccaagctgggagcacccatggggtatttagatgttgggggtggtctgggtgtcgactacgacggcagccgcagcgctagcgcagcatcgaccaactactccctacagaactatgccaatgatgtggtcgcaacggtgcgcgaatgctgtaaacctcatggcatcactttgcctatccttgtgagcgaaagcggacgcgcgatcgctagtcatttctcaatactcgttttcgatgtactgggcacaggaactgtcccaggagctgtacccaatcaaacaggagaggaacccctcaccattcacaaccttagggagacactcgcaggagtaatggcaacgcaaaagggtgctgcctctgagatatcgcgcctacaggaagcatggaacgacgcggttaaattcaaagacgatgccctcgctgccttccgcctgggttacatcagtctgacagaacgggctctggcggaacaactcacatgggcttgcgccgaagcaattatgggccaattgccttgccacgaaacaattcccgacgacttacaaggtttaagagctgttctcgctggcacctactacgccaacctttcaatatttcgttcagccccagacacctgggccatcgaacaactcttcccgctcatgccgattcatcgattgaaggaagagccaactcagctaggtcactttgctgacctcacctgcgactctgacggcaaactggaccgcttcatcgggaatgggcaaaccaaaactctgctggagcttcacaacctgcgccaaaacgaggcttacatgattggcatgtttctcgccggtgcttaccaggaagtgatgggcaatctgcacaacctgttcggcagtaccaatgccgtgcacatccggatgacaactggtggtggctaccagatagaccacgttgtgcgaggcaacaccaattccgaggtgctcgaagcaatggagcacaaccctgagatcctgctagagaggctgcgcttggctagtgaacttgcgattcaacgaggcgagctcaagatcaacgatgtacgccggctgatggaccatctagaaacaagcctgcgtcagaccacgtaccttcaaggttag

SEQ ID NO: 58341 - protein, 648 aa, Prochlorococcus marinus str. MIT 9303
MSAADPSQGNKSWTVADSAALYGLDRWGEPYFTANANGHVQVKPRGDQGSCLDLVELVEELKSRNLNLPLLIRFDDILEDRLEKLHSAFEQAISKYGYAGRYQGVFPVKCNQQRHVVEQLVESGRHWHFGLEAGSKAELLIALSLVNDPEALLICNGYKDQRYIETAILARRLGRQPVVVIEQPDEVERIIRSSQELGAAPFIGVRAKLTTRSTGHWSSSVGEKAKFGLSFPDLLSTVEALRQADLLSDLRLLHFHIGSQINDIAVLKDAIQEAGQIYVELTKLGAPMGYLDVGGGLGVDYDGSRSASAASTNYSLQNYANDVVATVRECCKPHGITLPILVSESGRAIASHFSILVFDVLGTGTVPGAVPNQTGEEPLTIHNLRETLAGVMATQKGAASEISRLQEAWNDAVKFKDDALAAFRLGYISLTERALAEQLTWACAEAIMGQLPCHETIPDDLQGLRAVLAGTYYANLSIFRSAPDTWAIEQLFPLMPIHRLKEEPTQLGHFADLTCDSDGKLDRFIGNGQTKTLLELHNLRQNEAYMIGMFLAGAYQEVMGNLHNLFGSTNAVHIRMTTGGGYQIDHVVRGNTNSEVLEAMEHNPEILLERLRLASELAIQRGELKINDVRRLMDHLETSLRQTTYLQG

SEQ ID NO: 58342 - DNA, 1893 bp, Thermus thermophilus HB27
  CDS (1)..(1893): transl_table=11
ttgaaggtggccaagcgcttcacccttaaggacgcggaggagctttacctggtgccccactggagcgggggcttcttccgggtgggggagaagggggatctggaggtcacccccttgggccccaagggccccgcggcctccctcctggagatcgtggaggccttgagggacgagggcaggcccctgcccctcgtgctccgctttccccagatcctcgaggcccgggtccgggccctcaacgaggccttcctggaggccatggcgaagtacggctaccagggcacctaccggggggtctacccggtgaaggtgaaccagcgccgcctggtcctggagaccgtggcccgggcgggaaggccctaccacctcggcctcgaggcggggagcaagcccgagctcgccctcatcctggcccaggacctctccgaggaggccctcatcaccaccaacggcttcaaggacgacgacttcgtccgcctcgccctcatggggaggaagctcggccgcaacgtggtgatcaccctggaaaagttcgccgagctctttcgggtcctccgcctttctaaggagctcggcgtgaagccccttttgggcatccgctacaagctcaaggccaagggggcggggcagtgggaggcctccgggggcgaaaacgccaagttcggcctcaccaccccggagatcgtgcgggcggtggaggtcctccaagaggagggcctcctggacgccctggtgatgctccacgcccacatcggcagccaggtcacggacatccgccggatcaaggctgcggtgcgggaggcggcccagacctacgtccagctcaggaagctcggggcccccctccgctacctcaacctgggcgggggcctggccgtggactacgacggctccaagaccaacttctacgcctcggccaactacaccctctccgagtacgccgagaacctggtctacgtcaccaaggaggtggtggaggcccagggcgagcctcaccccatcctggtcaccgagagcgggcgggccatcaccgcctaccacgaggtcctggtcctccaggtcattgacgtcatcgccccgcccggggaggcgcggccaagccccccgccccccgaggcccaccccctggtgaaggagctctgggagagcctgcaaagcctctcccccaagaacttccaggaggtctaccacgacgccttcgccgacaaggagaccctccagaccctctacgacctgggcctggtctccctgcgggaccgggccctggcggaggagatcttctaccacatcgcccgccgggtccaggccatcgcccagaacctcccctacgtccccgacgagctggaagacctggagaagctcctcgccgacaaactggtctgcaacttctccgtctttcagagcctccccgacgcctgggccatccaccagctcttccccgtggtgcccctctcccgcctgctggagcctccgacccggagggccaccctggtggacatctcctgcgactcggacggcaagatggaccgcttcattgacctccacgacgtgcgccagaccctgcccgtccaccccgtccgccccggggagccctactacctgggggtcttcctggtgggggcgtaccaggacgtcctggggagcaaccacaacctcttcggccaggtgggggaggcccatgtgcgggtggaggaggagggcttcgccatagagcgcttcgtggggggggagacggcggagcgggtgatagagaagatgggcttcaccgcccgggagctgatgctcggggtggagcgcctggtgcggcgaagccgcctctcccccgcggagaagggcgccttcctggagcgctacgcccgggagctccaggggtacacctacctggaggactag

SEQ ID NO: 58343 - protein, 630 aa, Thermus thermophilus HB27
MKVAKRFTLKDAEELYLVPHWSGGFFRVGEKGDLEVTPLGPKGPAASLLEIVEALRDEGRPLPLVLRFPQILEARVRALNEAFLEAMAKYGYQGTYRGVYPVKVNQRRLVLETVARAGRPYHLGLEAGSKPELALILAQDLSEEALITTNGFKDDDFVRLALMGRKLGRNVVITLEKFAELFRVLRLSKELGVKPLLGIRYKLKAKGAGQWEASGGENAKFGLTTPEIVRAVEVLQEEGLLDALVMLHAHIGSQVTDIRRIKAAVREAAQTYVQLRKLGAPLRYLNLGGGLAVDYDGSKTNFYASANYTLSEYAENLVYVTKEVVEAQGEPHPILVTESGRAITAYHEVLVLQVIDVIAPPGEARPSPPPPEAHPLVKELWESLQSLSPKNFQEVYHDAFADKETLQTLYDLGLVSLRDRALAEEIFYHIARRVQAIAQNLPYVPDELEDLEKLLADKLVCNFSVFQSLPDAWAIHQLFPVVPLSRLLEPPTRRATLVDISCDSDGKMDRFIDLHDVRQTLPVHPVRPGEPYYLGVFLVGAYQDVLGSNHNLFGQVGEAHVRVEEEGFAIERFVGGETAERVIEKMGFTARELMLGVERLVRRSRLSPAEKGAFLERYARELQGYTYLED

SEQ ID NO: 58344 - DNA, 1980 bp, Erwinia carotovora subsp. atroseptica SCRI1043
  CDS (1)..(1980): transl_table=11
atgtctgacgacatgattcatcacggctcgtcagcgacgggtaaacatgaaaatttgcgctctatgcaggaggttgccatgaatgaccgtaatgccagcgaaatgcttcgtacctacaatattgcctggtggggcaataattactatgacgtcaatgaacttggccacattagcgtgtgcccggatcccgacgtcccagaagcgcgcgtcgatctggccagactggtcaaagatatgcagaaagagaaccatcagcgcctgcctgcgctgttctgctttccgcaaattcttcagcatcgcctgcgttctattaacgctgcgttcaaacaggctcgcgaatcgtttggctatgaaggcggctactttcttgtgtatccgatcaaggttaaccagcatcgccgcgtcattgagtcactggccaattccggtgagccgctgggtctggaagccggttcaaaagctgagctgatggcggtactgggtcatgccggcatgacccgcactgtgattgtgtgtaacggctacaaagaccgtgaatacatccgtctggcactgattggcgaaaagctgggccacaaagtttatttggtcatcgagaagatgtccgaaatccggctggtgctggaagaagctgagcgcttgaatgtggtgccgcgcctcggcgtccgtgcgcgtctggcctctcaggggtcgggcaagtggcaatccagcggcggtgaaaaatccaagtttggcttggcggcgattcaggttctgcaactggttgagatgctgcgtgaagctggaaagctggaaagcctgcaactgctgcatttccatctgggatcgcagttggcaaatatccgtgatatcgcgacgggcgtgcgtgaatccgcgcgcttctatgtcgaactgcataaactgggtgtgaatatccagtgctttgacgttggtggcggtttgggcgtggattatgaaggaactcgttctcagtccgactgttcagtcaactatggcctgaacgaatacgccaataacgtgatttggggtatcggcgatgcctgtaacgaacacgggttaccgcatccaacagtgattactgaatccgggcgagcggtcaccgcgcaccataccgtgttagtttccaatattatcggggttgagcgtaacgagttcagcgaacctactgagccggaagaggatgccccgcgtgcgctggagagcctgtggtcaacctggaaagaaatcaagcaaccggggaaacgccgttcgctgcgtgagtggttgcatgacagccagatggacttgcacgatgtacatactcagtacacgcacggtatgttggatctgacacagcgtgcaaaagcagagcagctttatctgagcatctgtcagttgattcaggaacagttggacccgagcaatcgtgcgcatcggccagtgattgatgaattacaagagcggatggctgacaagctgtatgtcaacttctccctgttccaatctatgccggatgcatggggtatcgatcagctgttcccggttatgccgctggaagggctggataaaccgcctgagcgtcgtgctgtactgctggacatcacctgtgattctgatggcacgatcgatcattatgtcgatggtgacggaatcgcgacgacgatgccgatgccgccttacgatccagaaaacccgccgctgctgggcttctttatggtcggtgcctatcaggaaattctgggtaacatgcataacctgtttggcgatacgtcgaccgttgacgtgtttgtcttccaggacggtaccgttgagattgaagagtctgacgaagggaatacggttgctgacatgctggaatatgtgcaacttgaccctaaagtactgatgactcgtttccgcgatcaggttaaagaaaccgacctggatgctgaacttcaggcgcagttcatggaagagtttgaaaccgggctgtacggttatacttatttggaagatgagtaa

SEQ ID NO: 58345 - protein, 659 aa, Erwinia carotovora subsp. atroseptica SCRI1043
MSDDMIHHGSSATGKHENLRSMQEVAMNDRNASEMLRTYNIAWWGNNYYDVNELGHISVCPDPDVPEARVDLARLVKDMQKENHQRLPALFCFPQILQHRLRSINAAFKQARESFGYEGGYFLVYPIKVNQHRRVIESLANSGEPLGLEAGSKAELMAVLGHAGMTRTVIVCNGYKDREYIRLALIGEKLGHKVYLVIEKMSEIRLVLEEAERLNVVPRLGVRARLASQGSGKWQSSGGEKSKFGLAAIQVLQLVEMLREAGKLESLQLLHFHLGSQLANIRDIATGVRESARFYVELHKLGVNIQCFDVGGGLGVDYEGTRSQSDCSVNYGLNEYANNVIWGIGDACNEHGLPHPTVITESGRAVTAHHTVLVSNIIGVERNEFSEPTEPEEDAPRALESLWSTWKEIKQPGKRRSLREWLHDSQMDLHDVHTQYTHGMLDLTQRAKAEQLYLSICQLIQEQLDPSNRAHRPVIDELQERMADKLYVNFSLFQSMPDAWGIDQLFPVMPLEGLDKPPERRAVLLDITCDSDGTIDHYVDGDGIATTMPMPPYDPENPPLLGFFMVGAYQEILGNMHNLFGDTSTVDVFVFQDGTVEIEESDEGNTVADMLEYVQLDPKVLMTRFRDQVKETDLDAELQAQFMEEFETGLYGYTYLEDE

SEQ ID NO: 58346 - DNA, 1878 bp, Methylococcus capsulatus str. Bath
  CDS (1)..(1878): transl_table=11
atgacaaaagcgaactggacgctgagcgacgcccgcgacacttacgccatcgagcactggagcgatgggtatttcaacatcgcgccggagggcgaagtcgtggtctgtccgcagcggggaagcgtcgagggaggcgtaagcatcgccgccattgcccgcggcgtccgtgccgagggattgtccttgcccgtgctgatgcgctttccccacatcctgcacgaccgggtccgccttctgacgtcggcgttcggcaaggcgcgggccgcctaccactacggagccggctatacgccggtgtacccgatcaaagtcaaccagcagcgcaacgtcatcgagaacattctccgcgccggcggcgtcggcctcgaggccggcagcaaatcggaactgctcgccatccttgccctggcggagtccggcaccatcatctgcaatggctacaaggatcgcgcctacatccggctggccctgatcggcagccggttggggctgcgggtcttcatcgtggtcgaaaaactgtctgaactcgaactggtggtgagcgaatccgaagcgctcggcatcgccccgcagctcggtgtacggatcaggctctccagcatcagcgccggcaaatggcagaatagcggcggcgaaaaatcgaaattcggcctgcatgcgggtgaaatcctgaagttcctcaaacggctggagcgcgccggaggactcggctgggtacggctgatgcatttccacatgggatcccaggtggccaacatcaatgacgtcaagaccgccctgcgcgaagccagccgctactatgcggaactacggcggctgggggcgccggtcgatcatgtcgacgtcggcggcggcctcggcatcgactacgaaggcacgcattcggtcagcgactgctcgatcaactacagcgtggatgaatacgcccacagcatcgtgcgggctttctccgaactctgtgccgaacagggactgccccagccggacctgatcaccgaagccggtcgggcgatgagcgcgcaccatgccgtgctggtaaccaacgtcgtcgacatcgaggcggccacctatgacgccagcccggtctccgcctcggtggcccagccattgaaggacctggaggacctgctccgccgggtggacagcgaatcggtactgggcatctaccacgatgccgagttcgacctcgccgaaacccggaccatgtacgttcaaggcaagatcggcctggaccagttggcggaagccgaacggctccacgccaccctctgccgcgaagtgcagcagcgtctcgacatccggctgagggcccaccgggccgtgctggacgagctcaacgagcgcctggccgacaagctgttctgcaatttctcggtcttccagtcgattcccgatgcctgggcgatcgatcagatcttcccggtcatgccgctgcaacggcttggcgaagaacccacccgccgcgccgtgatccaggacatgacctgcgactccgacggacggatcaacgcctacatcgaccggcagagcatcgagaacaccctgcgtatgcatgcgccggcccccggcgaaccctacctgataggcttcttcctggtcggcgcctaccaggaaatcctgggcgacatgcacaatctgttcggggacacccactcggtggatgtcgaactggacggcgcgggcggttataccttcacccacacccggaggggcgacggcgccgacgatctgctgcgctatgtccacatcgatcctgacgaactggaacgttcctaccgcaagaagctgatcgaagccgacatcccgatgcaccagcgcaagcagtacgaaagcgagctgatcgcgggactcagcaactacacctacctggaggaatga

SEQ ID NO: 58347 - protein, 625 aa, Methylococcus capsulatus str. Bath
MTKANWTLSDARDTYAIEHWSDGYFNIAPEGEVVVCPQRGSVEGGVSIAAIARGVRAEGLSLPVLMRFPHILHDRVRLLTSAFGKARAAYHYGAGYTPVYPIKVNQQRNVIENILRAGGVGLEAGSKSELLAILALAESGTIICNGYKDRAYIRLALIGSRLGLRVFIVVEKLSELELVVSESEALGIAPQLGVRIRLSSISAGKWQNSGGEKSKFGLHAGEILKFLKRLERAGGLGWVRLMHFHMGSQVANINDVKTALREASRYYAELRRLGAPVDHVDVGGGLGIDYEGTHSVSDCSINYSVDEYAHSIVRAFSELCAEQGLPQPDLITEAGRAMSAHHAVLVTNVVDIEAATYDASPVSASVAQPLKDLEDLLRRVDSESVLGIYHDAEFDLAETRTMYVQGKIGLDQLAEAERLHATLCREVQQRLDIRLRAHRAVLDELNERLADKLFCNFSVFQSIPDAWAIDQIFPVMPLQRLGEEPTRRAVIQDMTCDSDGRINAYIDRQSIENTLRMHAPAPGEPYLIGFFLVGAYQEILGDMHNLFGDTHSVDVELDGAGGYTFTHTRRGDGADDLLRYVHIDPDELERSYRKKLIEADIPMHQRKQYESELIAGLSNYTYLEE

SEQ ID NO: 58348 - DNA, 1986 bp, Silicibacter pomeroyi DSS-3
  CDS (1)..(1986): transl_table=11
ttgtccgcgccacaagtttggccttggacgaatcaaaccccgcctttaaagggcgacccgacaccggagcccaagccgcaggaaaggccgacccgattgaaacatcctcttgacgcaccgcattccgtctatggcgtggacaaatggggcaagggcctgattgtggtgacagaagagggtgagatcgggctgaaaaacccgctccgccccgaggccgatgcggtcagcctgcccggcatcctgcacgatctggaacagcgcggcattcgcgccccgatgatcctgcggatcagttcctatctcgagaacgagatctgccatatcaacgacagctttgccgacgccatcgcccgctcgggctacaagggcgcctatcgcggcgtgttcccgatcaaggtcaaccagcaggcgcaggttatcgaccgtatcgtcgaattcggccaccgctacagttacgggctcgaggccgggtcgaaacccgaactggtgatcgcgctggcgcacaagctggccacggacgcgctgattgtctgcaacggggtcaaggatgccgagttcgtccggctggccattctcagccgcaagctgggcttcaacaccgtgatcgtgctggaaagcccgaaagaggccgacaccgtcatcgccgtctatgaggaactggggatcgagccgcttctgggtgtgcgggtgaagctcaccaaccagatcagcggcaagtgggaggaaagctcgggcgaccgttcctccttcgggatgaacaccgatcagctggtgcgcgtggtcgacaagctgcgcgatgccgggctgatccattgcctcaagctgcaacactcgcatctgggcagccaggttcccgacgtcaacgacgtgcgccgcgccgtgggcgaggcctgccgctatttcaccgaactcagcgccgagggcgtgccgctcacccatctggatctgggcggcggcatgggcgtcgattacaccggcgagaagcgcgccaccgagaactcgatcaactacacggtcgaggaatactgtgccaatgtggtggaaaccgtcgcctatgcgatggacgaggccgggatcgaccacccgaccatcgttaccgaaagcggccgcgcggtggtggcgacctcgtcattgctggtgttcaacgtgctcgaaagcacgctttacgacgcgcccaccgcgccgggcaccgaaccggacgatcaccatctggtcagcgaccttgcggcggtgaacggctatctgacgcccgcgcggcttcaggaatgctggaacgatgccaccttctatcgcaacgaattgcgggcgctgtttcgccgtggctatgtcgatctgcgccagatggcccgggccgaacgcatctatctgtcgctgatggcgcggatcaagaccatggtggccgaggtcgaggcggaaaccgatctggacgcccagatggaaaagatcgccgatatctatcactgcaacttttccctgttccagtcgctgcccgatgtctgggccatcgaccagctgcatccgatcgtgccgcttcagatgttgaacgaggcgcccgaccgccgcgcggtcctgtccgacatcacctgcgacagcgacggcaaggtcgaccgcttcatcctcgccgatggcgtgtcgccgtccctgccggtgcattccctgcccgaggatcaggactattacctcggcgtcttcttcgtcggcgcctatcaggagactttgggcgatctgcacaacctgtttggcgacaccaatgtcgtcaccatcgacctgcgcgccgatggcgggttcgacctgctgcacgagcaggagggcgacaccatttccgaagtgctctcttacgtcgaatacgacccggccgattgcgtcgccgccttccgcaagctggtcgatggcgccatatcgaacggctgcctcaaggccagcgaacgcaagctgatcatcggcgcctatcgcgacagcatcaacggctatacctattacgaataa

SEQ ID NO: 58349 - protein, 661 aa, Silicibacter pomeroyi DSS-3
MSAPQVWPWTNQTPPLKGDPTPEPKPQERPTRLKHPLDAPHSVYGVDKWGKGLIVVTEEGEIGLKNPLRPEADAVSLPGILHDLEQRGIRAPMILRISSYLENEICHINDSFADAIARSGYKGAYRGVFPIKVNQQAQVIDRIVEFGHRYSYGLEAGSKPELVIALAHKLATDALIVCNGVKDAEFVRLAILSRKLGFNTVIVLESPKEADTVIAVYEELGIEPLLGVRVKLTNQISGKWEESSGDRSSFGMNTDQLVRVVDKLRDAGLIHCLKLQHSHLGSQVPDVNDVRRAVGEACRYFTELSAEGVPLTHLDLGGGMGVDYTGEKRATENSINYTVEEYCANVVETVAYAMDEAGIDHPTIVTESGRAVVATSSLLVFNVLESTLYDAPTAPGTEPDDHHLVSDLAAVNGYLTPARLQECWNDATFYRNELRALFRRGYVDLRQMARAERIYLSLMARIKTMVAEVEAETDLDAQMEKIADIYHCNFSLFQSLPDVWAIDQLHPIVPLQMLNEAPDRRAVLSDITCDSDGKVDRFILADGVSPSLPVHSLPEDQDYYLGVFFVGAYQETLGDLHNLFGDTNVVTIDLRADGGFDLLHEQEGDTISEVLSYVEYDPADCVAAFRKLVDGAISNGCLKASERKLIIGAYRDSINGYTYYE

SEQ ID NO: 58350 - DNA, 1956 bp, Synechococcus elongatus PCC 6301
  CDS (1)..(1956): transl_table=11
gtggagaaactcatggcggctgaacaaacggcgatcgcacccttggcggtagctgttgagtcgcagcagtggcgcattgaagacagcgaagcgctctatcggattcagggctggggtgagccttactttggtatcaatgctgccggtcacattaccgtttcaccccaaggcgatcgcggcggctccctcgacctttatgaactcgtagaagcgctgcggcggcggggcctgaatctgcccttgctgatccgctttcccgatattttggaagaccggatcgagcggttgaatgcttgctttgccaaagcgatcgctcgttataactatgccggtgagtatcggggcgttttccccgtcaagtgcaaccagcagcgccatttgatcgaaagtttggtcaactatgggcgtccttttcaatttgggctagaagcgggttcaaagccggaactattaattgccctggcgcacttggatacgccgggggcgttgctgatctgcaacggctataaagatcgggactatatcgaaacggcgattctgggacggcgcttgggcaaaacgcccatccttgtgattgagcaactggaagaagtggacgttgcgatcgccgccagccagcgcttggggatcgaacccattttaggtgtgcgtgccaagctcaacgccagaggaatggggcgctggggcagttcggcaggcgatcgcgccaagtttggtctgaccatgcccgagattgtggcggcagtcgaggaacttcaggcagcgaacctgctgcactgtctgcaactgctgcacttccatatcggctcgcaaatttctgatatcagcgtgctcaaggatgcgatccaagaagcagcgcagatctatgtgcaactggccgccttgggcgcagacatgcgttatctcgatgttggtggtggtttgggggtcgattacgacggttcgaagaccaacttccacgcctcgaaaaactacaacatgcagacctacgccaacgatgtggttgccacgattaaggatgcttgtcaggcacaccggctggctgtcccgaccttaacgagtgagagtgggcgcgcgatcgcctctcaccaatcggtgttggtatttgatgtgttgggcagtagcgaggtgcctcgggctgccgtggaaccacctcaggaagaggattctgcgatcgtccgcaccctttacgaagtcttggaagcgatcgcccttgagaatctgcaggagtgctatcacgatgccttcaaactcaaggaagatgcggtttctgccttccgcttgggctatttgagtttgacagagcgcgccaaagcagagcgactcttttggagctgctgccatcggattcaggagttcttgaagcaactcgaccgcattcctgaagatctcgaagatctagaacgggtgatggcgtcgatttattacgtcaacctctccgtcttccaatcagctcccaatacttgggcgatcgatcagctcttcccaatcatgccgattcatcgtctgaatgaagagcctaatcagcgggtaacgcttgcagatctgacctgtgatagcgatggcaaaattgatcgctttattgacttgctagatgtcaaatctacgttagaacttcattcgctccagcccgaccaaccctacgttttagggatgtttttaggcggtgcctaccaagagattatgggtaatcttcataacctgtttggggataccaatgccgtccatatcaaactgacgcctaagggctacagcattgagcatgtggttaaaggtgacacgatgggcgaagtcttgggctatgtccaatacgatacggaacagcttctagaacgtctacgccagcaaactgaagctgctttgcaacaggatcaaatcagtttagatgaagcccagcggctgcttcgccattatgaagagggtctacagcggtatacctatctcagcttggattag

SEQ ID NO: 58351 - protein, 651 aa, Synechococcus elongatus PCC 6301
MEKLMAAEQTAIAPLAVAVESQQWRIEDSEALYRIQGWGEPYFGINAAGHITVSPQGDRGGSLDLYELVEALRRRGLNLPLLIRFPDILEDRIERLNACFAKAIARYNYAGEYRGVFPVKCNQQRHLIESLVNYGRPFQFGLEAGSKPELLIALAHLDTPGALLICNGYKDRDYIETAILGRRLGKTPILVIEQLEEVDVAIAASQRLGIEPILGVRAKLNARGMGRWGSSAGDRAKFGLTMPEIVAAVEELQAANLLHCLQLLHFHIGSQISDISVLKDAIQEAAQIYVQLAALGADMRYLDVGGGLGVDYDGSKTNFHASKNYNMQTYANDVVATIKDACQAHRLAVPTLTSESGRAIASHQSVLVFDVLGSSEVPRAAVEPPQEEDSAIVRTLYEVLEAIALENLQECYHDAFKLKEDAVSAFRLGYLSLTERAKAERLFWSCCHRIQEFLKQLDRIPEDLEDLERVMASIYYVNLSVFQSAPNTWAIDQLFPIMPIHRLNEEPNQRVTLADLTCDSDGKIDRFIDLLDVKSTLELHSLQPDQPYVLGMFLGGAYQEIMGNLHNLFGDTNAVHIKLTPKGYSIEHVVKGDTMGEVLGYVQYDTEQLLERLRQQTEAALQQDQISLDEAQRLLRHYEEGLQRYTYLSLD

SEQ ID NO: 58352 - DNA, 1914 bp, Pseudomonas syringae pv. syringae B728a
  CDS (1)..(1914): transl_table=11
atgtccgtaagacgcacacgtaaagacgatggcagccaatggaccgttgcggacagccgcagcgtttacggcattcgccattggggcgcgggttattttgctatcaacgaagcgggacgcgttgaagtccgtcccaacgggccggacagctcgcccatcgatctttacgaacaggtcgacaatttgcgcaagagcggcctgtcgctgcccttgctggtgcgcttccccgacattctgcaggaccgtgtgcgtcagctgaccggcgcgttcgacagcaacatcgcgcgcctggaataccagagcaagtacaccgcgctgtacccgatcaaggtcaaccagcaggaagcggtggtggaaaacatcatcgccacgcagaacgtctccatcggcctggaagcgggctccaagcctgagctgatggcggtgctggcactggcgcccaaaggcggcaccatcgtctgcaacggttacaaggaccgtgagttcatccgtctggcgctgatgggccagaagctgggccacaacgtgttcatcgtcatcgagaaagagtccgaagtcgaactggtgatcgaagaagccgccgaactgaaggtcgctccccaggttggcctgcgcgtacgcctctcctccctggcgtcgagcaaatgggcggataccggtggcgagaaatccaagttcggtctgtcggctgcgcagttgctgtcggtggtcgagcgtttccgcaaggccggcctggatcagggcattcgcctgctgcacttccacatgggctcgcagatcgccaacctggccgactatcagcacggtttcaaggaggcgatccgttactacggcgaactgcgcaagctcggcctgccggtggattacatcgatgtcgggggtggtctgggggtcgattacgacggtacgcactcgcgcaacgccagctcgatcaactacgacatggacgactatgcaggcgtcgtggtcggcatgctcaaggaattctgcgacgcgcaaagcctgccgcacccgcatatcttctcggaaagcggccgctcgctgaccgcccaccacgccatgctggtggtgcaggtgaccgacgtcgaaaaacacaacgacgaagtcccggaaatcgccgacaaggccagcctgccggaaaccgtgcaatggctggtcgacctgctgggcccgactgacatcgagatggtcaccgaaacctactggcgcgccacgcactacatgagcgacatcgcggcccagtacgccgatggcaagatcagcctgtcggaaaaagcgctgggcgagcaatgctacttcgccgtctgccgtcgcctgtacaactcgctgaaagcccgtcaacgctcgcatcgtcaggtgctggacgagctcaacgacaagctggccgacaagtacatctgcaacttctcggtgttccagagcctgccggacacctgggccattggccaggtgctgccgattctgcccctgcaccgcctgaatgaagagccggtgcgccgcgccgtgctgcaggacctgacctgcgattcggacggcaagatcaagcagtacgtcgacgagcagagcatcgagaccagcatgccggtgcattcgctgaacgaaggcgaagactatctgctggggatcttcctggtgggcgcctaccaggaaattctcggcgacatgcacaacctgttcggtgataccgattcggtgaacatctaccagaacccggacggcagcgtttaccacgcaggcatcgaaacccacgacaccatcgaagacatgctgcgctacgtgcacctgtcgccggaagaactgatgacccattaccgggacaaggtcgccagcgccaagatcaccccacgcgagcgcacctacttcctcgatgccttgcgcctggggctgacccgctcgtcgtacctgtcgtcctga

SEQ ID NO: 58353 - protein, 637 aa, Pseudomonas syringae pv. syringae B728a
MSVRRTRKDDGSQWTVADSRSVYGIRHWGAGYFAINEAGRVEVRPNGPDSSPIDLYEQVDNLRKSGLSLPLLVRFPDILQDRVRQLTGAFDSNIARLEYQSKYTALYPIKVNQQEAVVENIIATQNVSIGLEAGSKPELMAVLALAPKGGTIVCNGYKDREFIRLALMGQKLGHNVFIVIEKESEVELVIEEAAELKVAPQVGLRVRLSSLASSKWADTGGEKSKFGLSAAQLLSVVERFRKAGLDQGIRLLHFHMGSQIANLADYQHGFKEAIRYYGELRKLGLPVDYIDVGGGLGVDYDGTHSRNASSINYDMDDYAGVVVGMLKEFCDAQSLPHPHIFSESGRSLTAHHAMLVVQVTDVEKHNDEVPEIADKASLPETVQWLVDLLGPTDIEMVTETYWRATHYMSDIAAQYADGKISLSEKALGEQCYFAVCRRLYNSLKARQRSHRQVLDELNDKLADKYICNFSVFQSLPDTWAIGQVLPILPLHRLNEEPVRRAVLQDLTCDSDGKIKQYVDEQSIETSMPVHSLNEGEDYLLGIFLVGAYQEILGDMHNLFGDTDSVNIYQNPDGSVYHAGIETHDTIEDMLRYVHLSPEELMTHYRDKVASAKITPRERTYFLDALRLGLTRSSYLSS

SEQ ID NO: 58354 - DNA, 1944 bp, Prochlorococcus marinus str. NATL2A
  CDS (1)..(1944): transl_table=11
atggctgtgaaaattactaatcaatctctctcttggactattcaaaatagctcagagctctatggaattgatcgatggggaaagggttatttcactatcaatgaaaaagggaatattagtatttgtcctaacggttccaacaacaaatctcatgatttaatggaacttttagatgaactcgaaagtcgaaaactaaaatttcctctgttaataagatttgacgatattctcgaagactgcttaaaaaacttacataaagcttttgaaaaagcgattaatgactatcaatatcaaggaaaataccaaggtgtgtttccaatcaaatgtaatcaacagcgtcacgtagttgaagaattaatcacctgtggttccaaatggaattttggcttagaagctggaagcaaaccagagttactaattgctttatcaatcctagaagatcctaaagccttactcatatgtaatggctataaagatcaacgttacattgaaacagctattttagcacgtcagcttggacgtcaacctatagtagttatagaacaagcaaatgatgttgagcttataatcaaatctagtaatttactgggagcgtctccactcataggaatacgagccaagctatcgagtcaaagcagtggaaggtggagtagctcgattggtgacaagtcaaaatttggactttcaattccagaaattttaaaagcaatcaaaaggttaaaagaagcaaatcttctcaatgaattaaagcttttacattttcatctagggagtcaaattaacgatataggtgttttaaaagatgccttacaagaagcaggacaaatttatgccgaattaattaatcttggggcacctatgggatacttagatgttggaggtggcttaggaattgattacgatggaagtcaaaccgcctcaatagcatctactaactattcacttcaaaattatgcaaatgatgtagtagcaacaattaaagaatgttgtgaatcaaaaaagataccactacccactttaattacagagagtggaagagctattgctagtcacttttcgattttaatcttcaatattctaggtaaaaattcgttaccttctgacattccgaaagaaaacgaaaaagaatgtctctctgtcagaaatttacgtgaaacattagtccatataaattctctagaacttaagcaagaaaaagatttagccaaactacaagaagcatggaatgattctcttaaattcaaagcagatgcacttgcggcttttcgactcggttatatagatttagttgaacgagcaaaagctgagcagttgacatgggcctgtgcaaaaacaatagttaatcagttaccaaaaaacatacttttacctaaagaactaaagaaattaagtgaaagcttagccgtaacgtattacgcaaatctttccgtatttagatcagctccagacacatgggccattgatcaagtctttccaattatgccaatccatcggcttagcaaagaaccgaaaaaacttggtcactttgcagatttaacgtgtgattcagatggaaagcttgatcaatttattgataatggaaaaattaaaaatttgctccctcttcatgaatttaatcaaaacgaaaaatatctaattggtcttttcttgggtggcgcctatcaagaagtaatgggaaatctacataatttatttgggagtactaatgcagtccatataagatttacagaaaatgggaactataaagttgagcatgtcattcgtgggaatacaaaatcaaatgttcttgaatatttagaacatgatccagaaatattattagaacgattacgaaaatcaagcgaattagctattcaaggtgggcatctaaaaatccatgatgcacaaaaactaatagagcatgtagaagcaagcctccgtcaaagtacctacctacagagctaa

SEQ ID NO: 58355 - protein, 647 aa, Prochlorococcus marinus str. NATL2A
MAVKITNQSLSWTIQNSSELYGIDRWGKGYFTINEKGNISICPNGSNNKSHDLMELLDELESRKLKFPLLIRFDDILEDCLKNLHKAFEKAINDYQYQGKYQGVFPIKCNQQRHVVEELITCGSKWNFGLEAGSKPELLIALSILEDPKALLICNGYKDQRYIETAILARQLGRQPIVVIEQANDVELIIKSSNLLGASPLIGIRAKLSSQSSGRWSSSIGDKSKFGLSIPEILKAIKRLKEANLLNELKLLHFHLGSQINDIGVLKDALQEAGQIYAELINLGAPMGYLDVGGGLGIDYDGSQTASIASTNYSLQNYANDVVATIKECCESKKIPLPTLITESGRAIASHFSILIFNILGKNSLPSDIPKENEKECLSVRNLRETLVHINSLELKQEKDLAKLQEAWNDSLKFKADALAAFRLGYIDLVERAKAEQLTWACAKTIVNQLPKNILLPKELKKLSESLAVTYYANLSVFRSAPDTWAIDQVFPIMPIHRLSKEPKKLGHFADLTCDSDGKLDQFIDNGKIKNLLPLHEFNQNEKYLIGLFLGGAYQEVMGNLHNLFGSTNAVHIRFTENGNYKVEHVIRGNTKSNVLEYLEHDPEILLERLRKSSELAIQGGHLKIHDAQKLIEHVEASLRQSTYLQS

SEQ ID NO: 58356 - DNA, 2016 bp, Anabaena variabilis ATCC 29413
  CDS (1)..(2016): transl_table=11
atgggtgttgagtcaactgctacatctgacgaggtggtaaaagtaccagccaacgggaacaagttggaggggaaaaatcacaagcagaaaaagctgctaccaacgaatgcgccaggagatgtatctcgcgcttggaagattgaggacagcgaagctttataccggattgaaggttggggacagccttatttctcgattaatgcggctggtcacgttactgtttctcccaaaggcgatcgcggcggttctttggacttgtttgaattggtcaatgctttgaaacaacgcagtttgggtttacccttactgattcgcttttcggatattttagaagaccgcattgaacgcttaaacgcttgttttgccaaggcgatcgctcgctacaattaccctggtgtatatcgtggcgtgtttcctgtcaagtgcaaccagcaacggcatttgattgaagatttagtgagatttggcaagccacatcagtttggtttagaagctggttccaagccggagttaatgattgctttggcgttattggatacccctggatctttgctagtttgcaacggctacaaagaccgggagtatgtggaaacggccatgttatcccaaagactaggccaaacaccaatcatcgtcctagaacaggtggaagaggtcgatttagtgattgcggctagtcaccaattaggcattaagccgattttgggggtacgggcaaaattaagcacccaagggatgggacgctggggtacatccacaggcgatcgcgctaaatttggcctgacaattcccgaaatcatccaagcagttgataagttacgtgatgctgacttgctggattctttgcaattaatgcacttccatattggttcgcaaatctccgccatcaatgtcattaaagatgccatccaagaagctagccggatttacgtggagttagcatccttgggggctaatatgaaatatctggatgttggcggcggcttgggtgtggattatgacggttcccagacgaacttctacgcctccaagaactacaatatgcagaactatgccaacgacatcgtggcagagttaaaagatacctgtgcagagaaacaaattcccgtacccacactgattagtgaaagcggtagagcgatcgcctcccatcaatcggtactcattttcgatgttctcagtaccagtgatgtcccccgcgataacccagaaccaccaaaagaaggtgaatccccagttattaattacctgtgggaaacctatcaatccatcaacaaagaaaactatcaagagttctaccacgacgctacccaattcaaggaagaagccattagccgcttcaacttgggcattttacgcctgcgtgaacgagccaaagctgaacgtctttactgggcttgttgtcagaaaattttagacattattcgtcagcacgattacgtacctgatgagttggaagacctagaaaaaatcatggcttctatctactacatcaatctttcggtgtttcaatcagcaccagattgctgggcgatcgatcaactgttcccaattatgcccatccatcgcctagatgaagaaccaacgcagcgaggaattttagcagacctcacctgcgatagtgatggcaaaattgatcgctttatcgacttacgggatgtcaaatctgtgctagaactgcaccccttccaaccgggagaaccctattatatgggaatgttcctcaatggtgcttatcaggaaattatggggaacttacacaacttattcggcgataccaacgccgttcatatccaattaacacccaaaggctaccaaattgaacacgtagtcaaaggcgataccatgagtgaagtggtgagctacgtccaatatgactccgaggacatggtagaaaacatccgccaacgttgcgagcgggcgttagaagaaaaacgcattaccttagccgaatcccaacgcttactccagacttacgaacaaagtctcagaagatacacatacttaaatagttag

SEQ ID NO: 58357 - protein, 671 aa, Anabaena variabilis ATCC 29413
MGVESTATSDEVVKVPANGNKLEGKNHKQKKLLPTNAPGDVSRAWKIEDSEALYRIEGWGQPYFSINAAGHVTVSPKGDRGGSLDLFELVNALKQRSLGLPLLIRFSDILEDRIERLNACFAKAIARYNYPGVYRGVFPVKCNQQRHLIEDLVRFGKPHQFGLEAGSKPELMIALALLDTPGSLLVCNGYKDREYVETAMLSQRLGQTPIIVLEQVEEVDLVIAASHQLGIKPILGVRAKLSTQGMGRWGTSTGDRAKFGLTIPEIIQAVDKLRDADLLDSLQLMHFHIGSQISAINVIKDAIQEASRIYVELASLGANMKYLDVGGGLGVDYDGSQTNFYASKNYNMQNYANDIVAELKDTCAEKQIPVPTLISESGRAIASHQSVLIFDVLSTSDVPRDNPEPPKEGESPVINYLWETYQSINKENYQEFYHDATQFKEEAISRFNLGILRLRERAKAERLYWACCQKILDIIRQHDYVPDELEDLEKIMASIYYINLSVFQSAPDCWAIDQLFPIMPIHRLDEEPTQRGILADLTCDSDGKIDRFIDLRDVKSVLELHPFQPGEPYYMGMFLNGAYQEIMGNLHNLFGDTNAVHIQLTPKGYQIEHVVKGDTMSEVVSYVQYDSEDMVENIRQRCERALEEKRITLAESQRLLQTYEQSLRRYTYLNS

SEQ ID NO: 58358 - DNA, 1929 bp, Synechococcus sp. CC9605
  CDS (1)..(1929): transl_table=11
gtgtcagacagcgaacactggtcgattcaggacagtgctgcgctgtacggcctcgaccgctggggcgatccgtatttttcgatcaatgggcgcggacacatcagtgttcaaccccagggagatcgcggcggcagcctcgatctggtggatctggtttcagagctgaaaagccgcaacctggcgctgccacttctgattcgcttcgacgacatcctcgaagaccgcttggagcggctccacgccgcctttgaacgcgccatcgcgcagtacagctacgccggccggtaccaaggcgtttttccggtgaagtgcaaccaacaacgccatgttgtggaggagttggtgagctgcggcaagcgctggaactttgggctggaagcaggcagcaaggcggagttgctgatcgccctctcactgctggacgaccccgaggcgttgttgatctgcaacggctacaaagatcggctctacatcgagaccgccatcctggcgcgacgtctgggacggcagccggtggtggtgatcgaacagccggacgaagtggaccggatcattgaagccagcaagagcctgggggcagcgccctacatcggtgtgcgggccaagctctccagccgcagcacggggcgctggggcagttcggttggcgacaaggccaaattcggcctctccattcccgagttgctggcaacggtggagcggctgcgggacaacaatttgctccaagatctgcgcttgctgcacttccacatcggcagccagatcaacgacattgccgtgcttaaagacgctctccaagaggcgggacagatctatgtggagctgacccgactcggggccccgatggggttcctcgatgtgggtggtggactcggcatcgactacgacggcagccgcaccgcgtctgcagcatccacgaactactcgctgcagaactacgccaacgacgttgtggccacggtgcgggaatgctgcgaacccaatggtgttgcggtacccacgctggtgagcgaaagcggccgtgccattgccagccatttctccctgctggtgttcgacgttctgggaagcagctcactgccggcatcggttcccaaagccagcggagatgaaccactgaccgttcgcaacctgcgggacaccctcgccacgattcaggagttatcggcaaccacggatgcgcagttggtgcggctgcaggaagcctggaacgacgccttgaagttcaagcaggatgcgctggccgcattccggctcggttacatgagtctgcccgaccgcgccaccgctgaacaactgacgtgggcctgtgccgatgggattgcccagcgactgccccaggatcaagccattcctgaggagctcgcagccctcaacaaggctctggctggaacgtattacgccaacttgtcgatctttcgttcagcaccagacacctgggccatcgatcaactgtttccggtggtgcccatccagcagctggatcaacgaccgacccgactggccaacctcgccgacctcacctgcgattccgatggacgcctcgatcgcttcatcggagacggacaaccaaagcaacttttggagctccacgagctcgacggtgacaacctttatctgatcggcttgttcctcagcggggcgtaccaagaggtgatgggcaatctgcacaacctgtttggcaccaccaatgccgtgcacattcgcctcagtccaggagggagctatcgcattgaccacgtggtgcggggcgacaccaatgccgatgtgctggaggccatggagcacgacccccgtaccttgctggagcgcttgcgggtggcggcggaagcggccatcaacaacggccagctccgcatcgatgagtcaagacgtctgctggatcacctcgaaagcagcctgcgacaaacgacctaccttcaagactga

SEQ ID NO: 58359 - protein, 642 aa, Synechococcus sp. CC9605
MSDSEHWSIQDSAALYGLDRWGDPYFSINGRGHISVQPQGDRGGSLDLVDLVSELKSRNLALPLLIRFDDILEDRLERLHAAFERAIAQYSYAGRYQGVFPVKCNQQRHVVEELVSCGKRWNFGLEAGSKAELLIALSLLDDPEALLICNGYKDRLYIETAILARRLGRQPVVVIEQPDEVDRIIEASKSLGAAPYIGVRAKLSSRSTGRWGSSVGDKAKFGLSIPELLATVERLRDNNLLQDLRLLHFHIGSQINDIAVLKDALQEAGQIYVELTRLGAPMGFLDVGGGLGIDYDGSRTASAASTNYSLQNYANDVVATVRECCEPNGVAVPTLVSESGRAIASHFSLLVFDVLGSSSLPASVPKASGDEPLTVRNLRDTLATIQELSATTDAQLVRLQEAWNDALKFKQDALAAFRLGYMSLPDRATAEQLTWACADGIAQRLPQDQAIPEELAALNKALAGTYYANLSIFRSAPDTWAIDQLFPVVPIQQLDQRPTRLANLADLTCDSDGRLDRFIGDGQPKQLLELHELDGDNLYLIGLFLSGAYQEVMGNLHNLFGTTNAVHIRLSPGGSYRIDHVVRGDTNADVLEAMEHDPRTLLERLRVAAEAAINNGQLRIDESRRLLDHLESSLRQTTYLQD

SEQ ID NO: 58360 - DNA, 1953 bp, Desulfovibrio desulfuricans G20
  CDS (1)..(1953): transl_table=11
atgaaacggggtatttatgaggatcagagattggcacgtaagcacactctgcaacggtggagcgccgaagactccgccgaactctatggcatccgcaactggggtgccgggtacttcgatgtttccgccgaaggcgacgtcgtggtgtatcctttcgggaggtcgcataagctgaacgtcagcgttccggacatcatccggggcatgaaggagcgcgggcttgatatgcctgtgctgcttcgcatcgagaacattctcgaatcacgcatctcccttcttcacaaatcattccgcaacgccatcgaatcgctcggttatcagggcggctaccggggcgtttttcccatcaaggtcaatcagcagcagcaggttatcgaaaagatagccacatacggctccatgtaccatcacggtctggaggtcggttccaaggcggagcttatcgccgccatctcgcaggcgcaggataaagaagcgtgcattgtctgcaacgggtacaaggacgaggagttcattgacctggggctgcatgccgtccgcatggggttcaagtgcttttttgtgcttgaaatgccgcgtgagcttgagcttattctgcggcgttcgcagcagatgggtgtgcgtccgcttatcggcacccgtgtcaagcttgccagcaaggcgggcggtcactggagcgattccggcggcgagctgtccactttcggcctgaccacggcgcagataatggacgtggtggaccggctgcagaaagaggacatgctcgactgcttccgcctgctgcattaccacctcggttcgcaggtgcccaatatccgcgatatccgcagtgccgtaatggaagccacccgcgtttatgcaggtctggtgtccgaaggtgccgccatgggctatcttgacctgggcggcggccttgccgtggattacgacgggtcgcataccaatttcgtttccagccgcaactacacgcaggacgagtactgcacggacattgtggaagccgtcatgagcattctggacgaaacaggtgtgccgcatccgcatatcatcacggaatccggccgggccaccgtggcgtattattccatgctgctttttaacatccttgatgtgagcggcgccgaagcctttcccgacaatctgccggatacactggatgaaagtgaaccggaaatgatccgcaacctgttcgaggcgttcagagggcttacgctgcgcaacctgcaggaatgctataacgacgcgttgtactaccgcgacgaaatccgccgtaattttctggacggacgggtgacgctgcgtcagcgcacgctgggcgagcggattttctgggcactcatgcggcgtgtggcggaggaaaaagataaactccgtcatgtgcccaaagaacttgccgagatagaccgtgtactggccgatgtctattacggcaacttcagtgtgttccagtcgctgcccgactcttgggccatcgaacagctgtttcctgtcatgccggttcacaggctcagggaatttcccgaccgtccggccattctttcggacatcacctgtgacagtgacggacgcatagaccgcttcatcgatccgcaaggggtgcgcaataccattgacctgcattcccttaacggcgaggagtattatctgggcgtctttctggtgggcgcgtatcaggaaacgctgggcgacctgcacaacctgctgggcgacaccaacgtggtcagcatccgcgtggaagaggacggcagcattgaataccggcgtgaactgcttggtgattccgtggccgatgtgctttccagcgtggaatacgacccgaggcgcatcatggaacagctgcgcgacacggcggaacaggcagtgcgcgaggggcgcatcaccccttccgaaaggtacggcattttgcaggcctacgaaaacggtctgcgcggatacacctatttcgaacgatag

SEQ ID NO: 58361 - protein, 650 aa, Desulfovibrio desulfuricans G20
MKRGIYEDQRLARKHTLQRWSAEDSAELYGIRNWGAGYFDVSAEGDVVVYPFGRSHKLNVSVPDIIRGMKERGLDMPVLLRIENILESRISLLHKSFRNAIESLGYQGGYRGVFPIKVNQQQQVIEKIATYGSMYHHGLEVGSKAELIAAISQAQDKEACIVCNGYKDEEFIDLGLHAVRMGFKCFFVLEMPRELELILRRSQQMGVRPLIGTRVKLASKAGGHWSDSGGELSTFGLTTAQIMDVVDRLQKEDMLDCFRLLHYHLGSQVPNIRDIRSAVMEATRVYAGLVSEGAAMGYLDLGGGLAVDYDGSHTNFVSSRNYTQDEYCTDIVEAVMSILDETGVPHPHIITESGRATVAYYSMLLFNILDVSGAEAFPDNLPDTLDESEPEMIRNLFEAFRGLTLRNLQECYNDALYYRDEIRRNFLDGRVTLRQRTLGERIFWALMRRVAEEKDKLRHVPKELAEIDRVLADVYYGNFSVFQSLPDSWAIEQLFPVMPVHRLREFPDRPAILSDITCDSDGRIDRFIDPQGVRNTIDLHSLNGEEYYLGVFLVGAYQETLGDLHNLLGDTNVVSIRVEEDGSIEYRRELLGDSVADVLSSVEYDPRRIMEQLRDTAEQAVREGRITPSERYGILQAYENGLRGYTYFER

SEQ ID NO: 58362 - DNA, 1944 bp, Synechococcus elongatus PCC 7942
  CDS (1)..(1944): transl_table=11
atggcggctgaacaaacggcgatcgcacccttggcggtagctgttgagtcgcagcagtggcgcattgaagacagcgaagcgctctatcggattcagggctggggtgagccttactttggtatcaatgctgccggtcacattaccgtttcaccccaaggcgatcgcggcggctccctcgacctttatgaactcgtagaagcgctgcggcggcggggcctgaatctgcccttgctgatccgctttcccgatattttggaagaccggatcgagcggttgaatgcttgctttgccaaagcgatcgctcgttataactatgccggtgagtatcggggcgttttccccgtcaagtgcaaccagcagcgccatttgatcgaaagtttggtcaactatgggcgtccttttcaatttgggctagaagcgggttcaaagccggaactattaattgccctggcgcacttggatacgccgggggcgttgctgatctgcaacggctataaagatcgggactatatcgaaacggcgattctgggacggcgcttgggcaaaacgcccatccttgtgattgagcaactggaagaagtggacgttgcgatcgccgccagccagcgcttggggatcgaacccattttaggtgtgcgtgccaagctcaacgccagaggaatggggcgctggggcagttcggcaggcgatcgcgccaagtttggtctgaccatgcccgagattgtggcggcagtcgagaaacttcaggcagcgaacctgctgcactgtctgcaactgctgcacttccatatcggctcgcaaatttctgatatcagcgtgctcaaggatgcgatccaagaagcagcgcagatctatgtgcaactggccgccttgggcgcagacatgcgttatctcgatgttggtggtggtttgggggtcgattacgacggttcgaagaccaacttccacgcctcgaaaaactacaacatgcagacctacgccaacgatgtggttgccacgattaaggatgcttgtcaggcacaccggctggctgtcccgaccttaacgagtgagagtgggcgcgcgatcgcctctcaccaatcggtgttggtatttgatgtgttgggcagtagcgaggtgcctcgggctgccgtggaaccacctcaggaagaggattctgcgatcgtccgcaccctttacgaagtcttggaagcgatcgcccttgagaatctgcaggagtgctatcacgatgccttcaaactcaaggaagatgcggtttctgccttccgcttgggctatttgagtttgacagagcgcgccaaagcagagcgactcttttggagctgctgccatcggattcaggagttcttgaagcaactcgaccgcattcctgaagatctcgaagatctagaacgggtgatggcgtcgatttattacgtcaacctctccgtcttccaatcagctcccgatacttgggcgatcgatcagctcttcccaatcatgccgattcatcgtctgaatgaagagcctaatcagcgggtaacgcttgcagatctgacctgtgatagcgatggcaaaattgatcgctttattgacttgctagatgtcaaatctacgttagaacttcattcgctccagcccgaccaaccctacgttttagggatgtttttaggcggtgcctaccaagagattatgggtaatcttcataacctgtttggggataccaatgccgtccatatcaaactgacgcctaagggctacagcattgagcatgtggttaaaggtgacacgatgggcgaagtcttgggctatgtccaatacgatacggaacagcttctagaacgtctacgccagcaaactgaagctgctttgcaacaggatcaaatcagtttagatgaagcccagcggctgcttcgccattatgaagagggtctacagcggtatacctatctcagcttggattag

SEQ ID NO: 58363 - protein, 647 aa, Synechococcus elongatus PCC 7942
MAAEQTAIAPLAVAVESQQWRIEDSEALYRIQGWGEPYFGINAAGHITVSPQGDRGGSLDLYELVEALRRRGLNLPLLIRFPDILEDRIERLNACFAKAIARYNYAGEYRGVFPVKCNQQRHLIESLVNYGRPFQFGLEAGSKPELLIALAHLDTPGALLICNGYKDRDYIETAILGRRLGKTPILVIEQLEEVDVAIAASQRLGIEPILGVRAKLNARGMGRWGSSAGDRAKFGLTMPEIVAAVEKLQAANLLHCLQLLHFHIGSQISDISVLKDAIQEAAQIYVQLAALGADMRYLDVGGGLGVDYDGSKTNFHASKNYNMQTYANDVVATIKDACQAHRLAVPTLTSESGRAIASHQSVLVFDVLGSSEVPRAAVEPPQEEDSAIVRTLYEVLEAIALENLQECYHDAFKLKEDAVSAFRLGYLSLTERAKAERLFWSCCHRIQEFLKQLDRIPEDLEDLERVMASIYYVNLSVFQSAPDTWAIDQLFPIMPIHRLNEEPNQRVTLADLTCDSDGKIDRFIDLLDVKSTLELHSLQPDQPYVLGMFLGGAYQEIMGNLHNLFGDTNAVHIKLTPKGYSIEHVVKGDTMGEVLGYVQYDTEQLLERLRQQTEAALQQDQISLDEAQRLLRHYEEGLQRYTYLSLD

SEQ ID NO: 58364 - DNA, 1920 bp, Saccharophagus degradans 2-40
  CDS (1)..(1920): transl_table=11
ttgaaaataccgtttaaaaaaggttggtctatcgccgattcaactgagttgtatggcgtgaatgactggggtgtaggctacttttctgtgtctgaagacggcaaagtgattgtaacccccaatattgacggcaaaaccatcgaacttccattgttaaacgtggtttccgacattaaggatcggggcatggatgtgcccgttttaatacgctttgaagatttactagaagaacaaataggccgcttaaacaacgcttttactaccgcaatcaaagccagcaactaccaaggccaataccgtggcgtgttccctattaaggtgaatcagcagtgccacgttattgaagaaatcgccgaagtgggcgctaaatatggtcacggccttgaggcgggctctaaacccgagctcatcattgcgctagcccacctagaaagccaagacgcttgtattgtgtgcaatggctataaagatgccgagttcatcgatttaggcctacaggcctgcaaaatgggctataagtgcttctttgtaatcgaaacgccgtctgagctacctattattattgaacgcagccgcaagctgggcattaagcctatgattggcgtgcgcgttaaattagcctctatggttggtggacactggaacgccaccagtggtgatcggtctatttttggcctatctattgcccaacttattgaaatggtagataccctcaaagccgaaggcatgctcgactgccttaagctgctgcactaccacctgggctcgcaaattccaaatattcgcgacattcgctctggcgtgcttgaagcctgtcacgtttacaacgagctagttaaagaaggcgcggctatgggctacctagatttaggtggtggcttagcggtggattacgacggctccaaatctaactatattcactctaaaaactacaccctagatgaatactgcacagatatagtggatgtcattatttctaccctagacccgcaaggtgtagagcaccctacaattattaccgaatctggccgggcaactatcgcctattcatctgtacttgtattcaacgtattggatgtcgctaagtttgagccggcctcacctgtagatgaagtacaagaagacgagcacgagcttatacacaacttaaaagagtcgctagattctgtatcgctgcgtaatattcaagagtgctataacgataccgtttactatcgcgacgagataagagagctatttaaacgcggtcaaatatctttgcgctctcgctcacttgcagaaaacctatttctacaaaccatgcaccgcttggtggcacttgccgatgatgccccgcgcaccatgcatgaaatagaaaagttaaaagagcagctatctgatatttactactgcaacttcagtttgttccagtcgctgccagatatttgggctattgatcaaattttcccaatcagccctattcatcgcttaaacgagttccccgatcgcaacgcgatgattgccgatataacctgcgactgcgacggcaagatagaccgctttagcaatatgcacgaaacccgcaaaactttgccgctgcacgatttaaaagcaaacgaagaatattatataggcgtgtttttagtaggcgcctatcaagaaacgctgggcgacttacacaatttgtttggcgataccaacgtggttagcgtgcgcgttcaaaaagatggcagctacgatttttccgacgaaattgaaggcgatagcattgccgacgtactcacctacgttgagtaccaaccgcaaaacttacgcgagcggttccgcaaaattgcagagcgctctgttcgccaaggcttcattacaggcgccgaacgccaatccataatgaaaactttttcagatagcatgatgggttacacctactacgaaaaagactaa

SEQ ID NO: 58365 - protein, 639 aa, Saccharophagus degradans 2-40
MKIPFKKGWSIADSTELYGVNDWGVGYFSVSEDGKVIVTPNIDGKTIELPLLNVVSDIKDRGMDVPVLIRFEDLLEEQIGRLNNAFTTAIKASNYQGQYRGVFPIKVNQQCHVIEEIAEVGAKYGHGLEAGSKPELIIALAHLESQDACIVCNGYKDAEFIDLGLQACKMGYKCFFVIETPSELPIIIERSRKLGIKPMIGVRVKLASMVGGHWNATSGDRSIFGLSIAQLIEMVDTLKAEGMLDCLKLLHYHLGSQIPNIRDIRSGVLEACHVYNELVKEGAAMGYLDLGGGLAVDYDGSKSNYIHSKNYTLDEYCTDIVDVIISTLDPQGVEHPTIITESGRATIAYSSVLVFNVLDVAKFEPASPVDEVQEDEHELIHNLKESLDSVSLRNIQECYNDTVYYRDEIRELFKRGQISLRSRSLAENLFLQTMHRLVALADDAPRTMHEIEKLKEQLSDIYYCNFSLFQSLPDIWAIDQIFPISPIHRLNEFPDRNAMIADITCDCDGKIDRFSNMHETRKTLPLHDLKANEEYYIGVFLVGAYQETLGDLHNLFGDTNVVSVRVQKDGSYDFSDEIEGDSIADVLTYVEYQPQNLRERFRKIAERSVRQGFITGAERQSIMKTFSDSMMGYTYYEKD

SEQ ID NO: 58366 - DNA, 2091 bp, Myxococcus xanthus DK 1622
  CDS (1)..(2091): transl_table=11
gtgatcgtccgttgttcacgggagtccaccccatctaccccagggagcctcgagacgccgatgcccgtaaacgcccctccccaccgctggaccctcgccgacgcgcatgagctgtacggaatccggaactggggcaacccctacttcggcatcaatgagaagggccatgtcatcgtccacccggacggtccccaggccccgaacatggacctgaaggagctggtcgacgaagtgcgccgccggggcatcggcctgccgctgctcatccgcttcacggacgtgctgcgccaccgcgtggtccacctgaacgaagccttccgtaaggccatgagcgatcaggggttcaagggcggctaccgcggcgtgtaccccatcaaggtgaaccagcaccgctacgtggtggagaccctcatcgaggcgggcaagggctacaactacgggctggaggccggcagcaagccggagctgctcgcggtgatggcgctgttggagaacgagaacgcgctcgtcatctgcaacggctacaaggacgaggagtacatcgagacggcgctcttctactcgcgcctgggccgcaacgtcatcctggtggtggagaagcccagcgagctgccgctcatcgcggaggtcgcccggcgcacgggcatcgccccccggctgggcattcgcgtgaagctgtccacgcgcggcgccggcaagtgggaggccagcggcggcgaccgctccaagttcggcctgacctcctccgagctgatgaactgcatcggcttcatgaaggacgcgggcctgctcaactccttcgagctgctgcacttccacctgggcagccagatttccaacatccgcaacgtgaagaacgcgctgcgtgaggtgggctgcttctacgtggaggtggcccgtcagggcgcgccgctgaagtacctggacgtgggcggcggcctgggcgtggactacgacggctcccagacgaacttcgcctcttccatgaactacaccacggaggagtacgccaacgacgtggtgttcggcgtcatggaggcctgcgaccgggccggcgtaccgcaccccacgctggtgtcggagtccggccgcgccgtggtggcgcaccacgcggtgctggtggtggacgtgctgggcaccagtgagttcggcccggcgccggtccccgacaaggtggacgagaaggccccctccgtggtgcgcaacctctggtccacctaccgcgaggtcaccaacaagaacctgctggaggcgtggcacgacgcgcaggacgccaaggaggagagcctcaccctcttctcgctgggccacctgtcgctggagcagcgcgtggcggcggagaacatctactgggccacctgccacaagatcatgcgcatcgcgcgtgagcagggcgagattcccgaggagctggactccctggagaaggcgctcaacgacacgtacttctgcaacttctccgtgttccagtcgctgccggactcgtgggccatcgaccagctcttcccgatgatgcccatccaccggctggcggagaagccgacccgccgcgcgacgctggcggacatcacctgcgactcggacgggaagatcgagcacttcatcgacaagcgcgaggtgaaggacgcccttgagctgcacgcgctcaacgatgacgactactacctgggcatcttcatggtgggcgcctaccaggagatcctcggcgacctccacaacctgttcggcgatacgcacgccgtgcaggtgtcgctggggcccaacgggggctacctcatcgacaatgtggtggccggcgacacggtaacggaggtgctcaactacgtcagctacaccaaggacgacctggtggcgaagctgcgcaagttcactgaggccgcgctgcgccagggccgcatcaccctggacgaatcgcgcaacctgctgcgcatgtacgaggatggcctgtccggctacacgtacctggagcgcgaggtggacgcgagcttcggcagcagcgccagccagctccgtctggtgcccacgccggacgcctcgggcgcccggcccacgacaccgcccgccggcgcgtcgggaacgtcgggcacctga

SEQ ID NO: 58367 - protein, 696 aa, Myxococcus xanthus DK 1622
MIVRCSRESTPSTPGSLETPMPVNAPPHRWTLADAHELYGIRNWGNPYFGINEKGHVIVHPDGPQAPNMDLKELVDEVRRRGIGLPLLIRFTDVLRHRVVHLNEAFRKAMSDQGFKGGYRGVYPIKVNQHRYVVETLIEAGKGYNYGLEAGSKPELLAVMALLENENALVICNGYKDEEYIETALFYSRLGRNVILVVEKPSELPLIAEVARRTGIAPRLGIRVKLSTRGAGKWEASGGDRSKFGLTSSELMNCIGFMKDAGLLNSFELLHFHLGSQISNIRNVKNALREVGCFYVEVARQGAPLKYLDVGGGLGVDYDGSQTNFASSMNYTTEEYANDVVFGVMEACDRAGVPHPTLVSESGRAVVAHHAVLVVDVLGTSEFGPAPVPDKVDEKAPSVVRNLWSTYREVTNKNLLEAWHDAQDAKEESLTLFSLGHLSLEQRVAAENIYWATCHKIMRIAREQGEIPEELDSLEKALNDTYFCNFSVFQSLPDSWAIDQLFPMMPIHRLAEKPTRRATLADITCDSDGKIEHFIDKREVKDALELHALNDDDYYLGIFMVGAYQEILGDLHNLFGDTHAVQVSLGPNGGYLIDNVVAGDTVTEVLNYVSYTKDDLVAKLRKFTEAALRQGRITLDESRNLLRMYEDGLSGYTYLEREVDASFGSSASQLRLVPTPDASGARPTTPPAGASGTSGT

SEQ ID NO: 58368 - DNA, 2082 bp, Trichodesmium erythraeum IMS101
  CDS (1)..(2082): transl_table=11
atggatttacactcaactataaatgaaaattcttctcagatttcaaacaatacattactaactaatatttctcaaacagatcaaacagaaattaatgatatcaagtctgaacaaaaaaaattatggagaattgaagatagtgagaagctatataaaatacttggttggggccatccttatttttccattaattctgttggtcatgtaacagtttctccaaagggtgatttaggaggttctttagacttatatgaacttgttgagtctattaaacaaagaaatatagggctgccattaattattagattttcagatattcttgaagatagaattgaaaggttaaatgcttgtttttctaaagcgatcgctcgttataagtataagaatatatatcgaggtgtatttcctgtaaagtgtaatcaaaatagtcatttagtagaggaagtagttaaatttggcaaacctcataaatttggtctagaagcaggttcaaaaccagaattattaattgctatagctactttgaatacaacggacggactaataatttgtaatggctataaagacagagaatatattgagacagcaatactagctcaaagattaggaaaaataccaataattgttattgaacaagtagaagaagtacagttagtgatagaagctagtcgaaaactaaatattaaacctgtagtaggaattcgggtaaaactaagtactaaaggtatgggtcgttgggcaggaactacaggcgatcgcgcaaaattcggattgaatattcctgaaataattaaagttgtgaatcagttaaaaagtacgggtattttagattctttacaactcttacattttcatattggctctcaaatttcttcaattagtgtaattaaagatgctattagagaagcaagtcaaatttatgtagaattagctcaactaggagcgaatatgaaatatttagatgtagggggtggtttagcagttgattatgatggttctaaaagcaatttttatgcttctaaaaattatgatatgcagaactatgctaatgatattgtggcagaagttaaagaagcttgtgaagagaaaaatatattacctccaatattaattagtgaaagtggtagagcagtcgcatcccatcaatcagttctagtttttgatgtattaggagttagtcaaattccgaaagaagaaccaccagttattggcaaaggcgaacatttaattttgcaaaacctttatgaaacgtatcaatctattaacaaagataattatcaggaagcatatcatgacgcaattcaattcaaagaagaatctattagtatatttaattttggatatcttagtattagtgaacgagcaaaagtagagcaactatattggggatgtttgagaaaaattcaagaaatactaaaaagctctgaatatattccaaatgatctggaagaactagagaaagtcatggcatctatttactatattaatctttctgtttttcaatctgctcctgatagttgggcaattaatcaattatttccaattatgcctatacatagattagatgaagaacctactgaaagagttatattagccgaccttacctgcgatagtgatggaaaaattgatcgatttattgatttgcgagatataaaatcattactagaattacaccctcttcaagttagtaataaatcttcccaatattctcctattcaaaaactagaaaattctactacagaaattatttctgtttttgaaccttactatttggcaatgtttcttggaggtgcataccaagaaataatgggtaatctccataatttgtttggtgatgtcaatgttgtacatattaaattaaatccttctggctacaaaattgaacacgttgttaaaggtgacacaatgacagaagtattgaattatgttcagtataattctgatgatctagtggaaaatattcgctgtcaaactgagcaagctttacaagaagaaaaaattacccttaaagaatcacgaatgctgctacaaaattatgagagtagtctcagtagttacacttatttaagtttaagtaactaa

SEQ ID NO: 58369 - protein, 693 aa, Trichodesmium erythraeum IMS101
MDLHSTINENSSQISNNTLLTNISQTDQTEINDIKSEQKKLWRIEDSEKLYKILGWGHPYFSINSVGHVTVSPKGDLGGSLDLYELVESIKQRNIGLPLIIRFSDILEDRIERLNACFSKAIARYKYKNIYRGVFPVKCNQNSHLVEEVVKFGKPHKFGLEAGSKPELLIAIATLNTTDGLIICNGYKDREYIETAILAQRLGKIPIIVIEQVEEVQLVIEASRKLNIKPVVGIRVKLSTKGMGRWAGTTGDRAKFGLNIPEIIKVVNQLKSTGILDSLQLLHFHIGSQISSISVIKDAIREASQIYVELAQLGANMKYLDVGGGLAVDYDGSKSNFYASKNYDMQNYANDIVAEVKEACEEKNILPPILISESGRAVASHQSVLVFDVLGVSQIPKEEPPVIGKGEHLILQNLYETYQSINKDNYQEAYHDAIQFKEESISIFNFGYLSISERAKVEQLYWGCLRKIQEILKSSEYIPNDLEELEKVMASIYYINLSVFQSAPDSWAINQLFPIMPIHRLDEEPTERVILADLTCDSDGKIDRFIDLRDIKSLLELHPLQVSNKSSQYSPIQKLENSTTEIISVFEPYYLAMFLGGAYQEIMGNLHNLFGDVNVVHIKLNPSGYKIEHVVKGDTMTEVLNYVQYNSDDLVENIRCQTEQALQEEKITLKESRMLLQNYESSLSSYTYLSLSN

SEQ ID NO: 58370 - DNA, 1935 bp, Synechococcus sp. CC9311
  CDS (1)..(1935): transl_table=11
atggtgctcgccgattccatcacctggacggggagcgatagcgcccagctttatgggctagagcgttggggtgatccttatttctcaatcaatccacgcgggcatgtcagcgtgcagccacgcggagaccgtggcggaagccttgatctgatggagctggtggctggcctgcaggaccgcagccttggactccccctcctgatccgcttcgacgacatccttgaagacagattggaacgcctgcacgctgcatttgaacgggcggttactcgctacgactacgaggggcgttatcaaggcgtcttccccgtgaagtgcaaccaacagcgccacgttgtggaagagctggtgacctgcggaaggcgctggcatttcggtttagaggcaggcagcaaagccgaactcctgatcgctctctctttgatggacgaccctgaggccctcctgatctgtaacggctacaaagatcagcgctacatcgaaaccgcgattttggccagacggcttggccgaaggcctgtcgtggtgatcgaacaaccggacgaagtgcaacgcatcatcgatgcaagtcaggagcttggagccgcaccgctcattggcattcgcgctcggctctccagccgaagcaccggacgttggggtagctctgtaggggataaggcgaaatttgggctacctgctcccgaaatcattggcgcagttgaggccctacgggacgcaaacctcctcagcgaactgcgcctgcttcatttccatgtaggcagccaaatcaatgacatcgtcgtcgtcaaagatgccttacaagaagcatcgcgcctgtatgtggaactgcatgcccttggtgccccgatgggctacttggatgtaggaggtggtctcggaatcgactacgacggaagtcgcacagccacggcagcctcgaccaactactccctgcagaactacgccaatgatgttgtcgcaaccgtgaaagaggggtgcgaacccaacaacgttcccgtgccaacgctcatcagcgaaagcggtcgagcaatcgcgagtcatttctcagtgctcgtattcaacgttctcggtagcggtggcctgcaacaaccaacacctcccattgaacgagatgaacccctgatcgttcgcaatctgcgcgaaacccttcaaggcatcgaagccttacccactgaaactcctgttgacccatctcgcctgcaagaagcctggaacgatgcgctcaagttcaaagaagacgctttagcagcattccggctcggctatctgagcttgaaagaacgaagcatggcagaacaactcacctgggcatgcgccagggccttgctcgatcgtctacacgatgtagcaaaactacccgacgacctcaaaaccctgccggctgtcttggcagagacctactacgccaacctttcgatctttcgctccgctccagatacctgggccatccaacaactcttccccgtgatgccgctgcatcgtctcaacgaacagcccacacgtctcggacatttcgccgatttaacctgcgactccgacggcaagctcaatcgtttcatcaatgatggacaaaacaaacctctccttgaactccatcagctcaaactgaacgagccatatttgatcggcatgtttttaggtggtgcctaccaagaggtaatgggcaatctgcacaatctgttcggaagcaccgatgccgctcacattcgcctggcacctggtggcgattaccaagtggatcatgttgtgcgtggcgacaccaacgccgacgtgctggaaatgatggaacatgacccagatcagctgctggaacggttgcgcatggccagtgagaaagcaatcagcagcggacagctacgcatcagcgaagcaaggcggctgatggatcatctcgaaatcagtttgcaccagagcacctatttacaaggctga

SEQ ID NO: 58371 - protein, 644 aa, Synechococcus sp. CC9311
MVLADSITWTGSDSAQLYGLERWGDPYFSINPRGHVSVQPRGDRGGSLDLMELVAGLQDRSLGLPLLIRFDDILEDRLERLHAAFERAVTRYDYEGRYQGVFPVKCNQQRHVVEELVTCGRRWHFGLEAGSKAELLIALSLMDDPEALLICNGYKDQRYIETAILARRLGRRPVVVIEQPDEVQRIIDASQELGAAPLIGIRARLSSRSTGRWGSSVGDKAKFGLPAPEIIGAVEALRDANLLSELRLLHFHVGSQINDIVVVKDALQEASRLYVELHALGAPMGYLDVGGGLGIDYDGSRTATAASTNYSLQNYANDVVATVKEGCEPNNVPVPTLISESGRAIASHFSVLVFNVLGSGGLQQPTPPIERDEPLIVRNLRETLQGIEALPTETPVDPSRLQEAWNDALKFKEDALAAFRLGYLSLKERSMAEQLTWACARALLDRLHDVAKLPDDLKTLPAVLAETYYANLSIFRSAPDTWAIQQLFPVMPLHRLNEQPTRLGHFADLTCDSDGKLNRFINDGQNKPLLELHQLKLNEPYLIGMFLGGAYQEVMGNLHNLFGSTDAAHIRLAPGGDYQVDHVVRGDTNADVLEMMEHDPDQLLERLRMASEKAISSGQLRISEARRLMDHLEISLHQSTYLQG

SEQ ID NO: 58372 - DNA, 1914 bp, Shewanella sp. MR-4
  CDS (1)..(1914): transl_table=11
atgaatgattggtctattgatgctgctcgtgctgggtacaacgttacccactggagccaagggttttatgggatcagcgaccaaggtgaggtgacagtgtcgccggatcctaagaatcctgatcacaagattggcttaaatgagctagcaaaagacatggttaaagcgggggtcgctttacctgtattagttcgtttcccgcaaattctgcaccacagagtgaacagtttgtgccaagcattcgaccaagcgatacaaaaatatgagtatcaggcggactatttgctggtttaccccattaaagtaaaccaacaaaaaactgtggtagaagagatccttgcgagccaagcatcaaaagaagttccacaattaggcctagaagccggcagtaagccagaattaatggccgtactggccatggcgcaaaaagccagttcagtgattgtatgtaacggttataaagataacgaatacatccgtttagccttaattggtgaaaagttaggccataaggtctacatcgttttagaaaaactgtctgagctgaagatggtgttggccgaatctaagcgcttaggggtgaaacctcgcttaggtctacgtgcgcgccttgcattccaaggtaaaggcaagtggcaagccagcggtggcgaaaagtctaagttcggtttatctgcggcgcagattttaactgtggtagatcagttaaaagaaaacgacatgttggattcgctgcagttattgcacttccacttaggttcgcaaatcgcgaacatccgcgatattcgtcagggtgtgagtgaagcggcgcgtttctactgtgaattacgcgagttaggcgccagcatcaactgcttcgacgtcggcggtggtttagcggtggattacgacggcacacgtagccaaagtaacaactcaatgaactatggcttaagcgaatacgccaataacatcgttaacgtgcttaccgatatctgtaatgaatacgagcaacctatgccacgtattatttcagaatcaggccgtcacttaacggcgcaccatgcagtgctgatcaccgacgtgattggtactgaagcctatcaggtagaagatatccagccgccagcggaagaatcgccacaactgctgcacaacatgtggcaatcgtggactgagttgagcggccgcgctgatcaacgtgcactgattgagatttaccacgatagccaaagcgacttgcaagaagcgcaatcactgtttgccttgggtcaattaagcttggcggagcgtgcgtgggctgaacaggcaaacctgcgtgtttgtcacgaagtgcaaggtttgttaagcaccaaaaaccgttaccacagaccgatcatcgatgagttaaacgaaaagttagccgataagttcttcgttaacttctcactattccaatcgttaccggatgcttggggtatcgatcaggtgttccctgtactgccgctgtcaggtttagacaaagcgccagagcgccgcgctgttatgttggacattacctgtgactctgacggtattgttgaccaatacgtagacggtcaagggattgaaaccacgctgccagttccggcttggagcgcagagagcccttacttgatgggcttctttatggtgggcgcatatcaggaaattttaggcgatatgcacaacctgtttggtgatactaactctgcggtggtcagcatcgaagaaaacggtatgactaatattgagtcggtacttgccggtgacacagtcgctgacgtacttcgttatgttaacttagatgcggtcgactttatgcgcacctacgaagagttagtgaaccagcatattgttgaagaagaacgcgcgcaaattttagaagaattacaagtgggcctaaaaggttacacttatttagaagatttttcttaa

SEQ ID NO: 58373 - protein, 637 aa, Shewanella sp. MR-4
MNDWSIDAARAGYNVTHWSQGFYGISDQGEVTVSPDPKNPDHKIGLNELAKDMVKAGVALPVLVRFPQILHHRVNSLCQAFDQAIQKYEYQADYLLVYPIKVNQQKTVVEEILASQASKEVPQLGLEAGSKPELMAVLAMAQKASSVIVCNGYKDNEYIRLALIGEKLGHKVYIVLEKLSELKMVLAESKRLGVKPRLGLRARLAFQGKGKWQASGGEKSKFGLSAAQILTVVDQLKENDMLDSLQLLHFHLGSQIANIRDIRQGVSEAARFYCELRELGASINCFDVGGGLAVDYDGTRSQSNNSMNYGLSEYANNIVNVLTDICNEYEQPMPRIISESGRHLTAHHAVLITDVIGTEAYQVEDIQPPAEESPQLLHNMWQSWTELSGRADQRALIEIYHDSQSDLQEAQSLFALGQLSLAERAWAEQANLRVCHEVQGLLSTKNRYHRPIIDELNEKLADKFFVNFSLFQSLPDAWGIDQVFPVLPLSGLDKAPERRAVMLDITCDSDGIVDQYVDGQGIETTLPVPAWSAESPYLMGFFMVGAYQEILGDMHNLFGDTNSAVVSIEENGMTNIESVLAGDTVADVLRYVNLDAVDFMRTYEELVNQHIVEEERAQILEELQVGLKGYTYLEDFS

SEQ ID NO: 58374 - DNA, 1887 bp, Alkalilimnicola ehrlichei MLHE-1
  CDS (1)..(1887): transl_table=11
atgagcgattggagcatcgggctggcccgccaggtctggagcgtgcagcactggagcggcggctatttcgacatcagcgacgagggccgggtggtggctcggcccgaccgcgaccccgcccgcgcgccgctggacctggccgggatcgccgccgaggcccgccaccagggtctgggactgccggtactggtgcgcttcctcgatatcctccacgaccgggtggacagcctctgccaggcctttcggcaggccatggtcgaggacggctaccggggcggctaccgcgccgtctatccgatcaaggtcaaccagcagcgccgggtggtggaggagatcatccgccacggcaacggccgggtgggtctggaagcgggcagcaagccggagctgatggcggtgctcgcgctcaccccgcccgggggcacggtggtctgcaacggctacaaggaccgcgagtacgtgcgcctggcgctgcgcggccggcagttgggcctgcaggtccacctggtgattgagaaggcctcggagctggagctggtgctggaggaggccgccgccctgggcgtcacccccagcctggggatgcgggtgcggctggccaccatcggtgccggcaagtggcagaacaccggcggcgagaagtcgaaattcggcctcaccgccgcccaggcgctggcggtggtggaccggctgcgggccgccggctgtcttgactggctgcggctgctgcacttccacctgggctcgcagatccccaacatccgcgatatccgccgcggcatgcgcgaggccgcccgctactacgccgagctgcgcgccctgggcgccccggtggagaccgtggacgtgggcggcgggttgggggtggactacgagggcagccgctcgcgcagcttctgctccatgaactacaccgtggccgaatacgcccacaacgtggtgcatgccctgtggcaggtgtgcgaggacgagggcctgccgcacccggacatcatcaccgagtccggccgcgccatgaccgcccaccacgcggtgctgatcaccgatgtaatcgacggcgaccgggtgccgggtggcgccgatctactcgccccggccgacgccgccccgcgggtgctgcacgagctctggaccgtctggaccgggctggaccggcgccatccgctggaggcctatcacgacgccgcccacggcctggccgaggcgcaggagctgtacgcccacggggtgctgaacctgaccgaccgggcccgcgccgagcggatctggcaggccgtctgccacgccctgctgcagcggctcgacccccgccggcggccgcaccgcgagctcctggacgagctgaacgagaagctggcggacaagctcttctgcaacttctcgctgttccagtccatgcccgacgtctgggccatcgaccagatcttcccggtgctgccgctgcagcgcctggacgagccgccggccagccgggccgtgctccaggacctgacctgcgattccgacggctgtatccgcggctatgtggaccgcgacggggtggagagcaccctgccactgccgccctggcggccgggcgagccctacctgctggggatcttcctggtcggggcctaccaggagatcctgggcgatatgcacaacctgtttggcgacacccactcggtcaacgtgcgcctgaccggggaaggctacgcgctgagcggtgccgcccacggcgacaccatcaccgacgtgctgcgctacgtggacttcgatgctgaggtgctgcgggggatctaccgcgagcgggtcgtggccgcggccggcctggacgcgacggcgcgggcgcagtgtctggcggacctggaggcggggctgaggggctacacctacctggacacctga

SEQ ID NO: 58375 - protein, 628 aa, Alkalilimnicola ehrlichei MLHE-1
MSDWSIGLARQVWSVQHWSGGYFDISDEGRVVARPDRDPARAPLDLAGIAAEARHQGLGLPVLVRFLDILHDRVDSLCQAFRQAMVEDGYRGGYRAVYPIKVNQQRRVVEEIIRHGNGRVGLEAGSKPELMAVLALTPPGGTVVCNGYKDREYVRLALRGRQLGLQVHLVIEKASELELVLEEAAALGVTPSLGMRVRLATIGAGKWQNTGGEKSKFGLTAAQALAVVDRLRAAGCLDWLRLLHFHLGSQIPNIRDIRRGMREAARYYAELRALGAPVETVDVGGGLGVDYEGSRSRSFCSMNYTVAEYAHNVVHALWQVCEDEGLPHPDIITESGRAMTAHHAVLITDVIDGDRVPGGADLLAPADAAPRVLHELWTVWTGLDRRHPLEAYHDAAHGLAEAQELYAHGVLNLTDRARAERIWQAVCHALLQRLDPRRRPHRELLDELNEKLADKLFCNFSLFQSMPDVWAIDQIFPVLPLQRLDEPPASRAVLQDLTCDSDGCIRGYVDRDGVESTLPLPPWRPGEPYLLGIFLVGAYQEILGDMHNLFGDTHSVNVRLTGEGYALSGAAHGDTITDVLRYVDFDAEVLRGIYRERVVAAAGLDATARAQCLADLEAGLRGYTYLDT

SEQ ID NO: 58376 - DNA, 1914 bp, Solibacter usitatus Ellin6076
  CDS (1)..(1914): transl_table=11
atggagccgacagagcgttggactccgcaatcggcgaacgatctatatgacgtcgccagctgggggaagggctatttttcggttggcgagaacggccacctccgtgttcaccccgagaaggatccggcgcgctcgattgacctcaagcaattgatcgacaccctggtgctgcgaggcatcaatctgccgattttgatccgctttgccgacatcctgaagcatcgcctgggcgaaatccacaacgcctttcagaccgcgatcgccgaacacaaatatcagggcggctactgctgcgtgtatccgattaaggtgaaccagcagcggcaggtggtggaagaagtcctggaattcggcaagcccttccggttcggcctggaagccgggtccaaacccgaactgatggccgttatggccctggccgacaacgaaacgccgatcatttgcaatggcttcaaggacgatgaatacatcgaaatggccatgctcgcccagaagatggggcgcaagatcatcccggtggtggaaaagtataccgagctgcagctgattctgaagtacagcgcgaaggtgggcgtgcggccggcgattgggctgcgcgtaaaactggcgagccgcggatcggggcgctggaaatcgtccggcggctaccgctcgaaattcggcctttcggcgacggaggcgatgcgggcgctccaggaactcaaggacctcggcatgtccgattgcttgaacctgctgcacttccacctgggtagccagatcaccaatatccggcagatcaagggcgcggtcaacgaagcggtccgggtttacgtggatctggcgcgtgcgggtgcggggctcaagttcctggatgtgggaggcgggctgggaatcgattacgacggctcgcagacggacttcgaatcgagcgtcaactacaccctgcaggagtacgccaacgacatcatctaccacgtgcagaacgtgtgcgacgaagtcgaagtggcccatcccacgatcatcacggagagcgggcgggcgatcgcggcctatcacagcgtactggtcttcaacgtcctgggcgtctccgggatgggcgaaaccgacgtaccggcggaaccgccgaccgacgccgaacagccgctgatcgacctttcggaaaccaatcgcggtctgaccgccaagaatctcctggagagctatcacgatgcccagcaggcgctggaccaggcgctgaacctgttcagcctgggctacctttcgctggagcaacgttgcatcgccgaaaatctctactgggcgattctgcgccgcattcaacgcctggcgggcgagctcgattacttccccgaagagttggaaggcatcgacgcgatgctctccgatacctatttctgcaacttctccctgtttcaaagcatgccggatagttgggcgatcaatcagctctttccgatcatgccgattcaccgcctggaagagcagccttcgcgtcccgcggtgctgggcgacatcacctgcgattccgacggcaaggtggacgccttcatcgaccgccgcgacgtgaagcgtacgctgcagctccacacgttcgacggcggcgattatttcctgggcgcgttcctgctgggcgcttaccaggaaattctgggcgacctgcacaatctcttcggcgacaccaacgcggttcacgtgcggctgggtccggagggagagacgatgctggattcggtgatcaagggcgatacggtgcgcgaagtgttgaactacgtgcagttctcgtcggaccacctggtgacgcaattgcggcgcgacgtggaggcggcgcttcgcgagggccggctgacctacgaagagagcggcgccctgctgcgcttctacgaagaggggctgcacggctacacgtacctggaagacgtccacgaacagtag

SEQ ID NO: 58377 - protein, 637 aa, Solibacter usitatus Ellin6076
MEPTERWTPQSANDLYDVASWGKGYFSVGENGHLRVHPEKDPARSIDLKQLIDTLVLRGINLPILIRFADILKHRLGEIHNAFQTAIAEHKYQGGYCCVYPIKVNQQRQVVEEVLEFGKPFRFGLEAGSKPELMAVMALADNETPIICNGFKDDEYIEMAMLAQKMGRKIIPVVEKYTELQLILKYSAKVGVRPAIGLRVKLASRGSGRWKSSGGYRSKFGLSATEAMRALQELKDLGMSDCLNLLHFHLGSQITNIRQIKGAVNEAVRVYVDLARAGAGLKFLDVGGGLGIDYDGSQTDFESSVNYTLQEYANDIIYHVQNVCDEVEVAHPTIITESGRAIAAYHSVLVFNVLGVSGMGETDVPAEPPTDAEQPLIDLSETNRGLTAKNLLESYHDAQQALDQALNLFSLGYLSLEQRCIAENLYWAILRRIQRLAGELDYFPEELEGIDAMLSDTYFCNFSLFQSMPDSWAINQLFPIMPIHRLEEQPSRPAVLGDITCDSDGKVDAFIDRRDVKRTLQLHTFDGGDYFLGAFLLGAYQEILGDLHNLFGDTNAVHVRLGPEGETMLDSVIKGDTVREVLNYVQFSSDHLVTQLRRDVEAALREGRLTYEESGALLRFYEEGLHGYTYLEDVHEQ

SEQ ID NO: 58378 - DNA, 1935 bp, Magnetococcus sp. MC-1
  CDS (1)..(1935): transl_table=11
atgggctttttgttctccttgcaagggatggatagagcattgactacgcaatcagcacctgctaccgcttggaccattgaagagagcatggagctctaccgcacccaagggtggggtttgggatatgtgcatgtggatgccgagggggatctaaccattaccccgggcagccaaccccatattgagtccatcagcctgccaaagttggtggatgatgtggaggcgatggggtttcaaggcccgatgttgatccgttttggcgggattttgcaagatcgaatcacccgtttgaaccgtgcttttacagaatcccgcagtcgattgaattatgccgggcactatcagggtgtttacccggtcaaagttaatcaagatcgccatgtggtctctgaggtggtggccagcggtaccccgatggggttggaggtgggctctaaaccagagctggtgctggcgatggcctatatggaccgtaccccgctgattatctgtaatggctataaagaccgagactatattgagctggcgctgcgggctacagggttgggttttcccatctttgtggtggtggatcggctggaagagttggctcccatcattgatctggcgaagagtttaaatgtctcacccaacctggggttgcgggcacgattgctcaccgagggggtgggcaaatggtcagagtcggcagggggcttttccaaatttgggttgaccgcgggtgagatcttgttggcggttaatcagttggagcgggaggggctgaaagagagtctaaaactgttgcacatgcaccagggttcacagatctcgctgctggatgtggtgcgccagagcgcccaagagattgtacgcttctatttggagctgcgcaaaatgggctgccccattgagtatgtggatgtgggcggtggtttgggtgtggattatgaggggttaagcagcagtgccccgtgtagcgtcaactactccttgggtcaatatgccgatgccctgttgggggtgtttgccgagcgctgccgcgaggctggtgcaccagagcccaatgtggtcacggagagtggacgagcattgaccgccccccatgcggtgctggtggtggaagttatgggctggagtgagccggttgggcgagatccggccccagagaccatccccgaacaggctcccgaggtgcagacgctgcacaccttggccatggagtttgataaagagcgcgccgacctgatctgggaacaggcgctgatgttgttcgagtcaattaagcaaggctttgtactgggccgtctggatttgaccgcgcgcagtattgccgagcgggtgatggtgcatttggggcggttggtgcatgaggcaaaagggcaggaccctaagcctgagtcccgtttgcaggggtatgtgtcggagcgctatttgaccaatttttccatgtttcaatcgctgccggatgcgtgggccattggtcagttgtttcccattatgccgttgcagcgtttgcatgaagagcccgccgctgaggctattttgcaggatttaacctgtgattcggatggccaagttaaacggtttattggggtgcaaggggagaatgccacactgccggtacatcaccctgggccaacggaacgctaccgcttgggcttttttctggtgggggcctaccaggagatattgggggattaccataacctgtttggggatacccatgtggtggaagtaggcttaaaagccgatggtagtatggcaaagccggtggtgcgccgggggcaacgcagcgtggacgtgctgaaagcggtctcgtatgaaccctcggaactgtatgatgctgtaggccgtttggcgcggggtgcttgcaaagatgaccgcgcggcccagtttattgaggcctatgcccgcttggtgaagggatgcccctatttgacctcacggtcatga

SEQ ID NO: 58379 - protein, 644 aa, Magnetococcus sp. MC-1
MGFLFSLQGMDRALTTQSAPATAWTIEESMELYRTQGWGLGYVHVDAEGDLTITPGSQPHIESISLPKLVDDVEAMGFQGPMLIRFGGILQDRITRLNRAFTESRSRLNYAGHYQGVYPVKVNQDRHVVSEVVASGTPMGLEVGSKPELVLAMAYMDRTPLIICNGYKDRDYIELALRATGLGFPIFVVVDRLEELAPIIDLAKSLNVSPNLGLRARLLTEGVGKWSESAGGFSKFGLTAGEILLAVNQLEREGLKESLKLLHMHQGSQISLLDVVRQSAQEIVRFYLELRKMGCPIEYVDVGGGLGVDYEGLSSSAPCSVNYSLGQYADALLGVFAERCREAGAPEPNVVTESGRALTAPHAVLVVEVMGWSEPVGRDPAPETIPEQAPEVQTLHTLAMEFDKERADLIWEQALMLFESIKQGFVLGRLDLTARSIAERVMVHLGRLVHEAKGQDPKPESRLQGYVSERYLTNFSMFQSLPDAWAIGQLFPIMPLQRLHEEPAAEAILQDLTCDSDGQVKRFIGVQGENATLPVHHPGPTERYRLGFFLVGAYQEILGDYHNLFGDTHVVEVGLKADGSMAKPVVRRGQRSVDVLKAVSYEPSELYDAVGRLARGACKDDRAAQFIEAYARLVKGCPYLTSRS

SEQ ID NO: 58380 - DNA, 2019 bp, Nostoc punctiforme PCC 73102
  CDS (1)..(2019): transl_table=11
atgggtgttgagtcaactgctacatctgacgaggtggtaccagtaccgtccaatggacaaaaatctgaagtgaaaaatcataagcaaaagaaacttttaccacctagtactaccacaggaagtttacctcgctcctggaaaattgaggatagcgaagaactataccgtattgaaggttggggacaaccctatttttccattagcgctgctggtcacgttaccgtttcacccaaaggcgatcgcggtggttccctagacttgtttgaattggttaactccatgaaacagcgcaacttgggacttccgatgttgattcgcttttccgatattttggaagaccggattgaacggttgaatgcttgttttgccaaagcgatcgcccgctacaactaccctggcgtataccggggggtgtttcctgtcaaatgcaaccaagagcggcatttgattgaagatttagtcaagtttggcaagcctcatcaatttggcttagaagctggttccaaaccagaattaatgattgccctggctgtcttagatacaccaggagcgttgttagtttgcaacggctacaaagaccgagaatacatcgaaacggcaatgttagcccagagattagggcaaacaccaattatcgtcttagaacagattgaagaggttgatttggtgattgatgccaatcgccagttaggtattaaaccgattttgggtgttcgtgctaaactcagtacccaaggtatgggacgttggggagcctctagtggcgatcgcgctaaatttggtttgacaatgcctgaagtcattgaggctgtcgacaagttacgggaagctaacctgctcgattctttgcaattgatgcacttccacatcggctcacaaatctctgccataaatgtaattaaagatgccatccaagaagccagccgcatttatgtggaattggcgatgctgggggcagatatgaaataccttgatgtcggtggcggcttgggcgtagattatgatggctcccaaaccaacttctatgcgtcgaaaaattacaacatgcagaactatgccaacgacatcgtggcagagttaaaagatacctgtgcagagcgccaaattaccgtaccaacactgattagcgaaagtggacgtgcgatcgcttctcatcagtcggtgctgatttttgatgttctcagtactagcgatgtccctctcgattccccagaacctccacaagagggagaatccccaatcattaattatctttgggaaagctaccaatctatcaaccaagagaattaccaagagttgtatcacgacgcggcacaattcaaagaagaagccatcagtcgcttcaacttaggaattttacgcctcagagaacgagccaaagccgaacggctatactgggcttgttgtcagaaaattctcaacatcactagacagcaagaatacgtacccgatgaactagaagaccttgagaaaatcatggcttccatctactacgttaatatgtcagtgtttcaatcagcaccagattgctgggcgatcgaccagctattccccatcatgccaatccaccgtttggatgaagaaccaatccggcgaggaattttagcagacctaacctgcgatagtgatggtaaaatagaccgctttattgacctgcgcgatgtcaaatcggttttagaactacatacctacaagcccggagaaccctattatttagggatgttcttgaatggagcttaccaagaaatcatgggcaatttgcacaacctatttggcgatactaatgctgttcacatccaattaacgcccaaaggctaccagattgaacacgttgtcaaaggtgacaccatgagcgaagtagtaagctacgttcagtatgactccgaagatatggtggaaaacattcgccagcgttgtgagaaagcattagaagaaaagcgtatcaccctagcagaatctcagcgattactgcaaacctacgagcagagtcttagaagatacacgtatctgaatagttag

SEQ ID NO: 58381 - protein, 672 aa, Nostoc punctiforme PCC 73102
MGVESTATSDEVVPVPSNGQKSEVKNHKQKKLLPPSTTTGSLPRSWKIEDSEELYRIEGWGQPYFSISAAGHVTVSPKGDRGGSLDLFELVNSMKQRNLGLPMLIRFSDILEDRIERLNACFAKAIARYNYPGVYRGVFPVKCNQERHLIEDLVKFGKPHQFGLEAGSKPELMIALAVLDTPGALLVCNGYKDREYIETAMLAQRLGQTPIIVLEQIEEVDLVIDANRQLGIKPILGVRAKLSTQGMGRWGASSGDRAKFGLTMPEVIEAVDKLREANLLDSLQLMHFHIGSQISAINVIKDAIQEASRIYVELAMLGADMKYLDVGGGLGVDYDGSQTNFYASKNYNMQNYANDIVAELKDTCAERQITVPTLISESGRAIASHQSVLIFDVLSTSDVPLDSPEPPQEGESPIINYLWESYQSINQENYQELYHDAAQFKEEAISRFNLGILRLRERAKAERLYWACCQKILNITRQQEYVPDELEDLEKIMASIYYVNMSVFQSAPDCWAIDQLFPIMPIHRLDEEPIRRGILADLTCDSDGKIDRFIDLRDVKSVLELHTYKPGEPYYLGMFLNGAYQEIMGNLHNLFGDTNAVHIQLTPKGYQIEHVVKGDTMSEVVSYVQYDSEDMVENIRQRCEKALEEKRITLAESQRLLQTYEQSLRRYTYLNS

SEQ ID NO: 58382 - DNA, 1887 bp, Xylella fastidiosa Dixon
  CDS (1)..(1887): transl_table=11
atgacctggtctcaagatctggcccacaagacgtattcgatccggcattgggctgatgggtatttcgaggtgaacgatgctgggcacatggtggtgatgccgctcggtggggatggtgtgcggatctcgctcccagaggttgtggatgctgcgcgtgccgccggtgccaagttaccgctgctgctgcgtttccctgatattttgcggcatcgtctgggtaaattgcaggcggcgttcgttcaggcacagtccgagtgggagtatgcgggtggttacactgctgtttacccgattaaggtcaatcagcatcgcggtgtggcgggtgttctggcgagtcaccagggggatggtttcggtttggaagccggtagcaaaccagaattgatggcggtgttggcgttatcgcgtcagggtgggttgattgtttgtaatgggtataaggatcgggagtacatccgtcttgcgttgatcggacgcaagcttggtttgaagacttttattgtgattgagaagccgtctgaattgagaatggtgcttgaggaggctaaaacgctcggtgtattgcctggtttgggcgtccgggtgcgtttggcgtcgttgggtgccggaaaatggcagaacagcggtggcgataaggcaaagttcggtttgtcgccgcgccaagtgttggatgtatggaaggtgttgcgtggtactgagtatgccgattgtttaaatgtgatgcattttcatatggggtcgcagatctccaatgtgcgcgatatcgctaaggggatgcgtgaggcgacccgttactttgtcgagctttcgcgcttgggtgcgaagatcacgcatgtggatgttggtggcggtcttggcattgattacgagggcacgcgttcgcgtagtgactgttcgatcaattatggtttgcaggcgtatgccagtcatatcgtgcagccgctggcaagtgcgtgtgaggattatgatttggtgccgccacgcattgtcacggagtgtggtcgtgcaatgacggcgcatcatgcggtgctgatcgctaatgtgaccgaggtcgaagcggtgccggagggtcgggtgccagggttgtgtgatgatgagccggcggtggttcgccacatgcgcgagatttacggggagttggatgcgcgtccggcaatagagttgttttatgaagcacagcactttcatgctgaggggttggcggcttacaccctcgggcagattgatttggtgcatcgcgcacgtattgatgatttgttttatgcgatttcgcatggggtgcgggagcgtctcagtcacgaggagaagagtcaccgtccggtgttggatgagctgaatgagcgcttggttgataaatattttgtcaatttcagtgtgtttgagtcgattccggatgtgtgggctatcaatcaaatttttccgattgtccccattgagcgtttgaacgaggcaccgacccgacgtggtgtggtctgtgatttgacctgcgattcagatggtacggtcaagcagtatgtggaaaacgagagtctggacagtgcgttgcctctgcatgtgttgcgtcatggcgaggcttacaggattggctttttccttgtgggtgcttatcaggaaatccttggcgatatccataatttgtttggcgataccgatgcggttgaggttgcagtcgacggcagggggtatcgtattgcgcagcagcgttgtggtgatacgaccgatgtgatgttggactatgtcggttatgcgcttgatgaggtgcgcagggtttatgcgcaacgtattacggcagcggggatgtctgctgcggagtccaaggcattgagcgatatgttggaagccggtctgacgggttatccctatttgtcagatgtgccgctggagtga

SEQ ID NO: 58383 - protein, 628 aa, Xylella fastidiosa Dixon
MTWSQDLAHKTYSIRHWADGYFEVNDAGHMVVMPLGGDGVRISLPEVVDAARAAGAKLPLLLRFPDILRHRLGKLQAAFVQAQSEWEYAGGYTAVYPIKVNQHRGVAGVLASHQGDGFGLEAGSKPELMAVLALSRQGGLIVCNGYKDREYIRLALIGRKLGLKTFIVIEKPSELRMVLEEAKTLGVLPGLGVRVRLASLGAGKWQNSGGDKAKFGLSPRQVLDVWKVLRGTEYADCLNVMHFHMGSQISNVRDIAKGMREATRYFVELSRLGAKITHVDVGGGLGIDYEGTRSRSDCSINYGLQAYASHIVQPLASACEDYDLVPPRIVTECGRAMTAHHAVLIANVTEVEAVPEGRVPGLCDDEPAVVRHMREIYGELDARPAIELFYEAQHFHAEGLAAYTLGQIDLVHRARIDDLFYAISHGVRERLSHEEKSHRPVLDELNERLVDKYFVNFSVFESIPDVWAINQIFPIVPIERLNEAPTRRGVVCDLTCDSDGTVKQYVENESLDSALPLHVLRHGEAYRIGFFLVGAYQEILGDIHNLFGDTDAVEVAVDGRGYRIAQQRCGDTTDVMLDYVGYALDEVRRVYAQRITAAGMSAAESKALSDMLEAGLTGYPYLSDVPLE

SEQ ID NO: 58384 - DNA, 1947 bp, Prochlorococcus marinus str. MIT 9211
  CDS (1)..(1947): transl_table=11
ttgtccaaatccaagcccctcactaagaaaaatgactggtctgttgaagacagtactgttttatatcgactggataaatgggggaaagattatttctcaattaatgaatctggaaatataaaagtcagtccgacggggcctgaaggtgattcattagatttaatggtattagttaaagaactgaatagtcgcaatctaaagtcacctcttttacttcgtttcgatgacattcttgaagacagaatcaaaaaattacatggtgcttttaaaaatgcaatttcacattatgagtatgaaggagaatataaaggtgtctttccaatcaaatgcaaccagcagcgacatgttgtcgaagaaatagttacatgtagccgagaatggcatttcggcctcgaggctggaagcaaagcagaattattaatagcactttccttattagatgaccctgaagcattactaatttgcaatggttacaaagataagcgttatatagaaacatctattttagcaagacaattaggaaggaaacctatagtagttattgaacaattagatgaagttgatcgcattatcaatgctactaagaaaattggatctgcaccctttataggtataagagcaaaattatcgagtcaaagtagtggtagatggagcaactctattggagaaaaatctaaattcggcctatcaataccagaaatatctcaagcagtccaacaattaaaagatgcgggcctgctcaaagaattaattcttctacatttccacatagggagccaaattaatgacatagcagttttgaagaatgcattgcaagaagccagtcatatttatatcgaattaaagcgcctaggagcaccaatgggtcatcttgatgtggggggtggcttaggaatcgattacgatggtagtcgtacggcaacacaagcctctacaaattattcacttcaaaattatgcaaacgatgtagtagccaccattcaagaatgctgtaaagagaaccaagtccaagtaccaaccttagtgagtgaaaatggaagagccgtttctagtcatttctcaatattagtttttaatgttttaggaaccagctcaattcctagtgatactcgagcaacaacagaacatgagtgtctcagtgttcaaaatctacgtcaaacattaagatctctaagtgaagagccacacaatattggcgttgatatctcaaggttgcaagaagcatggaacgacgcacttaaatttaaagaagatgcattggctgcattccgtttagggtacataggtctggaagaacgagctaaggcagagcaacttacctgggcctgtgcaaaagcattagcggtgaaactgccaaaagacactttgattcctgaagaactaaatgcacttaatgcagcactagctgagacctattacgccaatatatctatttttcgttcagcacctgatacatgggccattggccaactcttcccaataatgcccatacatcgactaaatgaaaagccaactcaactagggcattttgctgatttaacttgtgattcagatggtaaattatcgaaatttattgataatggacaagctaaatctctgattgagttgcataggcttaactctaatgaagattatttgataggcatgtttctaggaggggcataccaagaagtgatgggcaatctccataatctatttggaagtacgaattcgatacatatccgcatggcaaaaaatggagggtacaaattagatcacgttattcgtggggatacaaaagcagaagtacttaatgcaatggaacatgactccgagcaattattagaaagactgcgaatagcgagcgaatcagctatacaacaaggaaagttaaaaatcaatgatgctcaacgcttaatagaacatgtagaaaccagtcttaggcaaagcacatatttacaagaataa

SEQ ID NO: 58385 - protein, 648 aa, Prochlorococcus marinus str. MIT 9211
MSKSKPLTKKNDWSVEDSTVLYRLDKWGKDYFSINESGNIKVSPTGPEGDSLDLMVLVKELNSRNLKSPLLLRFDDILEDRIKKLHGAFKNAISHYEYEGEYKGVFPIKCNQQRHVVEEIVTCSREWHFGLEAGSKAELLIALSLLDDPEALLICNGYKDKRYIETSILARQLGRKPIVVIEQLDEVDRIINATKKIGSAPFIGIRAKLSSQSSGRWSNSIGEKSKFGLSIPEISQAVQQLKDAGLLKELILLHFHIGSQINDIAVLKNALQEASHIYIELKRLGAPMGHLDVGGGLGIDYDGSRTATQASTNYSLQNYANDVVATIQECCKENQVQVPTLVSENGRAVSSHFSILVFNVLGTSSIPSDTRATTEHECLSVQNLRQTLRSLSEEPHNIGVDISRLQEAWNDALKFKEDALAAFRLGYIGLEERAKAEQLTWACAKALAVKLPKDTLIPEELNALNAALAETYYANISIFRSAPDTWAIGQLFPIMPIHRLNEKPTQLGHFADLTCDSDGKLSKFIDNGQAKSLIELHRLNSNEDYLIGMFLGGAYQEVMGNLHNLFGSTNSIHIRMAKNGGYKLDHVIRGDTKAEVLNAMEHDSEQLLERLRIASESAIQQGKLKINDAQRLIEHVETSLRQSTYLQE

SEQ ID NO: 58386 - DNA, 1953 bp, Synechococcus sp. RS9917
  CDS (1)..(1953): transl_table=11
gtggtgatcgccccctccgccagcgcaggccagcaccagggctggaccccagccgacagtgccgagctctatggcttggagcgctggggcgagccctacttttcgatcaatccccgcggccatgtgagcgtgcagccacgcggtgatcgcggtggcagcctcgatctgatcgacctggtggcgggcctgcaggaccgcaacctgggcctgccgctgctaatccgcttcgacgacatcctcgaagaccggctggaacggctgcatggtgctttcgagcgggcgatcacccgctatggctacgccgggcgctaccagggcgtcttcccggtgaaatgcaaccagcagcgccacgtggtggaggagctggtgagctgcggcaaacgctggcatttcggactggaagccggcagcaaagccgagctgctgatcgccctctccttgatcgacgacccggacgccctgctgatctgcaacggctacaaggatcagcgctacatcgaaacggcgatcctggcccggcggctcggacgccgtccggtggtggtgatcgagcaggccgatgaggtgcagcgcatcatcgcggcaagcgaagcgctgggggcggcaccgctgatcggcatccgggcccggctctccagtcgcagcaccggccgctggggcagctccgtgggcgaaaaagcgaaattcggcctgccggtgcctgagattcttgccaccgttgaagccctgcgagaggccaacctcctggaggaactgcggctgctgcatttccacgtaggcagtcagatcaatgacatcgccgtggtgaaagacgctctgcaggaggcctccaggatttatgtggaactgcatgccctcggcgcaccgatgggctacatggacgtgggcggtggcctggggatcgactacgacggcagccgtacggccacggcggcctccaccaactactcgctgcagaactacgccaatgatgtggtggcaacggtgcaggaaggctgcgccccccacggggtggcggtgccgacgctggtgagcgaaagcgggcgggcgatcgcgagccatttctccgtgctcgtgttcgatgtgctcggcagtggcggcctgcagcagagcgctccccccgaggcaggggaagaaccgctgattgtgcgcaacctgcgcgacaccctggcgggcatccacaccctccccgccgatgcaactgccgatgtctcccggctccaggaggcctggaacgatgcactcaaattcaaggctgacgccctggccgccttccggctcggctatctgagcctgcaggaccgcagcctggcggaacaactcacctgggcctgtgcccgtgccctgttggatcggttaccggaaggcggcactcttccagaggatctcaaggaactgcccgccgttctggcggagacctactacgccaacctctcgatttttcgttccgctccagacacctgggcgatccagcagctcttccctgtgatgccactgcatcgcctcgatgagaagccaacgcgcctcggccatttcgcagatctcacctgcgattccgatggacggttgagccgtttcatcagcgatggccgcagcaaaccgctgctcgagctccaccccctggtggctgaccagccctatttgatcggcctgtttctcggcggcgcctatcaggaggtgatgggcaatctgcacaatctgttcggcagcaccgatgcggtgcacatccgcctcgcacccggcggcgactaccaggtggaccatgtggtgcgcggcgacaccaacgcggatgtgctccaggcgatggagcatgtgccggatctgttgctcgaacggctgcgcatcgccagcgagcaagcgatcagccgcggcgctctccgcatcagcgacgcccgcctgctgatggaccatctggaaagcagcttgcgccagagcacttacctgaagaattga

SEQ ID NO: 58387 - protein, 650 aa, Synechococcus sp. RS9917
MVIAPSASAGQHQGWTPADSAELYGLERWGEPYFSINPRGHVSVQPRGDRGGSLDLIDLVAGLQDRNLGLPLLIRFDDILEDRLERLHGAFERAITRYGYAGRYQGVFPVKCNQQRHVVEELVSCGKRWHFGLEAGSKAELLIALSLIDDPDALLICNGYKDQRYIETAILARRLGRRPVVVIEQADEVQRIIAASEALGAAPLIGIRARLSSRSTGRWGSSVGEKAKFGLPVPEILATVEALREANLLEELRLLHFHVGSQINDIAVVKDALQEASRIYVELHALGAPMGYMDVGGGLGIDYDGSRTATAASTNYSLQNYANDVVATVQEGCAPHGVAVPTLVSESGRAIASHFSVLVFDVLGSGGLQQSAPPEAGEEPLIVRNLRDTLAGIHTLPADATADVSRLQEAWNDALKFKADALAAFRLGYLSLQDRSLAEQLTWACARALLDRLPEGGTLPEDLKELPAVLAETYYANLSIFRSAPDTWAIQQLFPVMPLHRLDEKPTRLGHFADLTCDSDGRLSRFISDGRSKPLLELHPLVADQPYLIGLFLGGAYQEVMGNLHNLFGSTDAVHIRLAPGGDYQVDHVVRGDTNADVLQAMEHVPDLLLERLRIASEQAISRGALRISDARLLMDHLESSLRQSTYLKN

SEQ ID NO: 58388 - DNA, 1962 bp, Synechococcus sp. WH 5701
  CDS (1)..(1962): transl_table=11
atgcctgccgataccgtcgccatcgctcccccggacctggcttggagcgttgccgacagcagccggctctacggcctcgacggctggggtgatccctatttcacggtcaatgcccgcggccacgtgatggtgcagccccggggagagcgcggtggctgcctggatctggtggagctggtgcagggcctgcaggggcgtgatctcaccctgccgctgctgatccgctttgacgacatccttgaagaccggctcgagcggctccatgccgccttcgagcgggcgatcgcccaatacggctacgccggccgttaccagggcgtgttcccggtgaagtgcaaccagcagcgccacgtagtggagcagctggtggagagcggccgccagtggcatttcggcctcgaggccggcagcaaggcggagctgctgatcgccctctccctggtggacgaccccgaggccctgctgatctgcaacggctacaaggatcagcgctacatcgagacggcgatcctcgcccgccggctcggccgccagccggtggtggtgatcgagcaacccgacgaggtggagcggatcatcacggccagccgcgagctgggggccgcccccctgatcggcgtacgggccaagctggccagccgtagcaccggccgctggggcagctcggttggggagcgcgccaagttcggactttctgtgccggatctgctcgccacggtcgaggccctgcgccaggccgatctgctcggcgagctgcgcctgctccacttccacgtgggcagccagatcaacgacatcgccgtgctcaaggacgccctgcaggaggcgggccagatctatgtgcagctggctgagctgggggcgccgatgggctatctcgatgtgggcggcggcctcggcatcgactacgacggcagccgcaccgccaccgccgcctccaccaactactccctgcagaactacgccaacgacgtggtggccacggtgcgggagtgctgcgagccccgctcggtgccgctgcccaccctggtgagcgagagcggccgtgccatcgccagccacttcagcgtgctcgtcttcgatgtgctcggcaccggtggcgtgcagggggaagagccggcgccacagggggaagaaccgctgatcgtgcgcaacctacgcgacacgctggcctcgatccaggccaccgccctcgacgccccaggtcagggcgatcacctgcaggagggctggaacgacgccatcaagttcaagcaggacgccctctccgccttccggctgggctacctcagcctcaccgagcggggcgcggccgagcagctctactgggcctgctgccaggcgatcgccgcgcagctggagagctggagcgcggccacccccattcccgacgacctcaaggcgctgcaggccgccctggcagggacctactacgccaacctctcgatcttccgctccgctcccgacacctgggcgatcgatcagctctttccggtgatgcccatccaccggctcgacgagcgccccagccgtctgggcagcttcgctgacctcacctgcgactccgacggcaagctggcgcgcttcatcggccccggccaggccaaaccgctgctggaactccatgagctgagggagggtgagccctactggatcggcctgttcctcggcggcgcctaccaggaagtgatgggcaacctgcacaacctgttcggcagcaccaatgcggtccatatccgtctgggtgccaatggccgctaccgggtcgaccatgtggtgcggggcaacagcaacgcggaggtgctcaaagcgatggaacacgaccctgagaccctgctcgagcgcctgcgggtggccagcgaggcggccattcaccgcggcaccctcacggtgcccgacgccggccggctgatggcccatctgcagaacagcctgcgccagagcacctacctgcagacctga

SEQ ID NO: 58389 - protein, 653 aa, Synechococcus sp. WH 5701
MPADTVAIAPPDLAWSVADSSRLYGLDGWGDPYFTVNARGHVMVQPRGERGGCLDLVELVQGLQGRDLTLPLLIRFDDILEDRLERLHAAFERAIAQYGYAGRYQGVFPVKCNQQRHVVEQLVESGRQWHFGLEAGSKAELLIALSLVDDPEALLICNGYKDQRYIETAILARRLGRQPVVVIEQPDEVERIITASRELGAAPLIGVRAKLASRSTGRWGSSVGERAKFGLSVPDLLATVEALRQADLLGELRLLHFHVGSQINDIAVLKDALQEAGQIYVQLAELGAPMGYLDVGGGLGIDYDGSRTATAASTNYSLQNYANDVVATVRECCEPRSVPLPTLVSESGRAIASHFSVLVFDVLGTGGVQGEEPAPQGEEPLIVRNLRDTLASIQATALDAPGQGDHLQEGWNDAIKFKQDALSAFRLGYLSLTERGAAEQLYWACCQAIAAQLESWSAATPIPDDLKALQAALAGTYYANLSIFRSAPDTWAIDQLFPVMPIHRLDERPSRLGSFADLTCDSDGKLARFIGPGQAKPLLELHELREGEPYWIGLFLGGAYQEVMGNLHNLFGSTNAVHIRLGANGRYRVDHVVRGNSNAEVLKAMEHDPETLLERLRVASEAAIHRGTLTVPDAGRLMAHLQNSLRQSTYLQT

SEQ ID NO: 58390 - DNA, 1911 bp, Synechococcus sp. WH 7805
  CDS (1)..(1911): transl_table=11
atggcccacaccagcaccgctggcccatggaccgttcaggacggtgcagacctctacggactggagcgatggggagccccttacttctcaaccaactcccgcggtcacatcaccgtgcaaccccagggcgatcgtggcggaagcatcgatctgatcgaacttgtggaggggctgcaggctcgggatctcggcctgcccctgctgatccgcttcgacgacattctggaagatcggctcgaacggctgcatgcagccttcgatcgcgccattgcccactacgggtattcaggccgctaccagggcgtgttccctgtgaaatgcaatcagcagcggcatgtggttgaacggctggtggacagcggccagcgctggcactttggcctggaggctgggagcaaggcggaactgctgatcgccctctcgctgctgaaagatccggaagctctgctgatctgcaacggctacaaagatcagcggtacctggaaacggcaatcctggcgcgcaagctcggacgtcaaccggtggtggtgatcgaacaaccggacgaggtggagcggatcattcaagcgagcgatcacctcggtgcagcaccgatgatcggaatccgtgcccgcctctccacccgcagtacgggccgttggggcagctccgtgggagaccgtgccaaattcggcctgtccatccccgaactgcttgacaccactgcagcccttcgcgatgcaggccttctgaaagagctgcgcttgctgcacttccatatcggcagtcagatcaacgacatcgccgtcctgaaggatgccctccaggaagctggacagatctacggcgagctgcaccggctgggggcaccgatgggctttctcgacgtgggcggtggcctggggatcgactacgacggcagccgcagcgccaccgcggcttcaaccaattactccctgcagaactacgccaacgatgtggtggccactgtgaaggaatgctgtgaacccagcggtgttcccgtgcccacgctcgtgagcgagagcggtcgtgccctggccagccacttcagcgtgctggtgttcgacatcctcggcaccggtgcggcaccggatgagcgtccggaacggatggacgacgatccattgatcctgcgcaacctgcatgaaacttttgatggcatcaccacagccaacctgcaggaagcctggaacgacgttctgaagttcaaagatgatgcgctcagtgctttccgcctcggatacctaagccttccggagcgggcacgtgctgaacagttggcctgggcctgtgcgcggcgcatcaatcgcctgctgcccgccgatgacagcagccccgatgagctgcgcaatcttcgcgccagcctggccagcacttattacggcaatttttcggtgtttcgatcagctcccgacacctgggcgatcgatcaactctttcccgtgatgccaatccatcgactcgatgaagagcccgaccagctcgggagcattgccgacctcacctgtgactccgatggcaagctggcacgcttcatccagggcgggcagagcaaacccctgctggaactgcacagccctcagccgaatcagccttacctgatcggtttgtttctggccggtgcctaccaagaagtgatgggcaacctgcacaacctgttcggcagcaccaacgccgtgcatatccgcctggcccctggcggtggttacctgctggaccacgtggtgcgcggagacaccaactccgatgtgttggaagcgatggaacacgaccctgatctgatgctcgaacgcctccgcctggccagcgaggaggccatccgagatcgacggctgtcggtcaacgacgccaggctattgatcagccacgtggccagcagcctccaacaggccacttatctccaggcctga

SEQ ID NO: 58391 - protein, 636 aa, Synechococcus sp. WH 7805
MAHTSTAGPWTVQDGADLYGLERWGAPYFSTNSRGHITVQPQGDRGGSIDLIELVEGLQARDLGLPLLIRFDDILEDRLERLHAAFDRAIAHYGYSGRYQGVFPVKCNQQRHVVERLVDSGQRWHFGLEAGSKAELLIALSLLKDPEALLICNGYKDQRYLETAILARKLGRQPVVVIEQPDEVERIIQASDHLGAAPMIGIRARLSTRSTGRWGSSVGDRAKFGLSIPELLDTTAALRDAGLLKELRLLHFHIGSQINDIAVLKDALQEAGQIYGELHRLGAPMGFLDVGGGLGIDYDGSRSATAASTNYSLQNYANDVVATVKECCEPSGVPVPTLVSESGRALASHFSVLVFDILGTGAAPDERPERMDDDPLILRNLHETFDGITTANLQEAWNDVLKFKDDALSAFRLGYLSLPERARAEQLAWACARRINRLLPADDSSPDELRNLRASLASTYYGNFSVFRSAPDTWAIDQLFPVMPIHRLDEEPDQLGSIADLTCDSDGKLARFIQGGQSKPLLELHSPQPNQPYLIGLFLAGAYQEVMGNLHNLFGSTNAVHIRLAPGGGYLLDHVVRGDTNSDVLEAMEHDPDLMLERLRLASEEAIRDRRLSVNDARLLISHVASSLQQATYLQA

SEQ ID NO: 58392 - DNA, 1914 bp, Pseudoalteromonas tunicata D2
  CDS (1)..(1914): transl_table=11
atgaacaaaacgactgaaattgaacaagttcgtgcaagctacaatgtacgccattggagtcaaggttactttggtattaatgatgaaggtgaagtgtatgtagccccaaaagctgacgcacctgaacaaacagtatcgttgtcatcaattgcagaacaaattcaacagcaaggtttgtctttacctgcattggtccgttttcctcaaattctacataatcgtgttcataatttatgtgctgcgtttaatgaagcaattgcgaattacaactacccagaaaaatacttattggtttacccaattaaagtaaatcagcaacgtgaagttgttgaagaaattgtcgcaagccaagctaacaatgaagttaagcaacttggcttagaagcgggtagtaaagctgagctacttgctgttcttgctatggctcaaaaagcaagttcagtgatcgtgtgtaatggctataaagacgttgaatacatccgtttagcgttaattggcgaaaaattaggtcacaaagttaatatcgtacttgagaagctttctgagcttgatatggtattagcagaagctgaaaaattaaacgtctctccacgtttgggtttacgtgtgcgtttggcctcacaaggtaaaggcaaatggcaagcaagcggtggtgaaaaatcaaagtttggtttatctgcttcacaagtacttaccgtacttaagaaactaaaagatttaggtaaaagtgatacccttcaattagttcactttcacttaggctcacaaatggccaacattcgtgacgtaagaacaggtgtaagcgaagctgcacgtttttactgtgaattacgtcgtttaggtgccgagcttgtatgtatggacgtaggtggtggtttggctatcgattacgacggtacacgcagccaatcgcacaactcaatgaactacagccttgctgagtacgccaataacatcgtttataccattggtgatatttgtaagcagtacaatcagccaatgccaaccatcatttcagagtctggccgtgctcttactgcacaccacgctgtattaatctcaaatgtaattggtacagaatcatacaacccagaagaagtgccagcacttgctgaagatgcacctattttattaaaaaatatgtggcattcttgggtgcaattaaataaacgtattgatgatcgtgcattaattgaaatcttccacgactgtttaagcgatttagccgaagtacatagccaatttggtatgggtttattaaacctagaacaacgtgcatgggctgagcaaatcagcttacgtgtgagctatgaattgagcaaattaatggatagcaaaaaccgcttccatcgcccaattattgatgaattaaatgaaaagctagcagacaaattctttgttaacttctcattattccaatcgttaccagatgcatggggtattgaccaagttttccctgttttaccattaaccggtttaacagaaatgccacaacgtcgtgcggttttacttgatattacctgtgactcagatggtacggttgatcaatacgtagacggccaaggtattgaaacaacgttaccagtacctgagtggtctgccgattcgccatatttacttggctttttcttagtcggtgcttaccaagaaattctaggtgacatgcacaatctatttggtgatacgcacagcgcggttatcaacatggatgaaaacggcaaagtacatatcgatgaaatcaacgaaggtgatactgttgaagacatgctacgttatgttcacttagatccagattcattccgtgcagcatacgcagaactggcgcaaagcaagttaccagagcacgaacgcgcttcaattttagaagaactagatttaggcctaacaggctacacttacttagaagatgtataa

SEQ ID NO: 58393 - protein, 637 aa, Pseudoalteromonas tunicata D2
MNKTTEIEQVRASYNVRHWSQGYFGINDEGEVYVAPKADAPEQTVSLSSIAEQIQQQGLSLPALVRFPQILHNRVHNLCAAFNEAIANYNYPEKYLLVYPIKVNQQREVVEEIVASQANNEVKQLGLEAGSKAELLAVLAMAQKASSVIVCNGYKDVEYIRLALIGEKLGHKVNIVLEKLSELDMVLAEAEKLNVSPRLGLRVRLASQGKGKWQASGGEKSKFGLSASQVLTVLKKLKDLGKSDTLQLVHFHLGSQMANIRDVRTGVSEAARFYCELRRLGAELVCMDVGGGLAIDYDGTRSQSHNSMNYSLAEYANNIVYTIGDICKQYNQPMPTIISESGRALTAHHAVLISNVIGTESYNPEEVPALAEDAPILLKNMWHSWVQLNKRIDDRALIEIFHDCLSDLAEVHSQFGMGLLNLEQRAWAEQISLRVSYELSKLMDSKNRFHRPIIDELNEKLADKFFVNFSLFQSLPDAWGIDQVFPVLPLTGLTEMPQRRAVLLDITCDSDGTVDQYVDGQGIETTLPVPEWSADSPYLLGFFLVGAYQEILGDMHNLFGDTHSAVINMDENGKVHIDEINEGDTVEDMLRYVHLDPDSFRAAYAELAQSKLPEHERASILEELDLGLTGYTYLEDV

SEQ ID NO: 58394 - DNA, 1920 bp, Photobacterium sp. SKA34
  CDS (1)..(1920): transl_table=11
atgagtgagtggacaattaataacgcacgtgacgtttataatacgccttactggagccaaaactattttgatattgcacaagacggttcagtggttgcgcgtcctaacttacaagctccctgcaatactatttgtttatcacaacttgctgatgaactgattgctgcaggcgcctcattacccgtattggtgcgttttcctgaagtgatgcatcaccgtgtcgatagcttatgtagtgtgtttaaccaaactattgaaaattatggttataccggtgactaccttgcggtttatccaatcaaagtcaaccaacagcaagaagtcgttagcgaaattcttaaaagccaatacgctaagcaacaacgtcagttaggtttagaagcaggcagtaaacccgagcttatggctgtgctggctatggcacaagaagcgagctccgtcattgtctgtaatggctataaagataaagaatacattcgtcttgcactgattggtgaaaagctaggacacgaagtgtatatcgtcctagaaaaactatcagaactacgcattatcttagaacaagcgaaagagcttggcgttactccacgtcttggtttacgtgcacgtttagcctcgcaaggtaaaggcaagtggcaagccagtggtggcgagaagtctaagtttgggttatcggcatctcaggttttaactgtggtagatgaactgcgccaacgcgatatgctagattgtttgcaattgctgcatttccacttagggtcgcaaattgccagcattcgtgatgtaagaaatggtgtgggtgaagctggccgtgtttacgcagaattgaaaaaaatcggtgtcggtattacaactgtcgatgttggtggtggtttggccgtggactacgaaggtacccggtgtcagaacagttgctcaatgaactacagtattaacgaatatgcaaacaacattgtttatgtattaggcgacatttgtactgaatacgatatctctatgccacgcattatttcagaatctgggcgtaatttaacggcacatcacgcagtcctaatcactgatgttgtggggattgaaagttacaaacctgagaatatttcagccccagcatttgacgcaccacaagtgctacataacatgtggatgtcgtggaatgagctctcacaacaagcagagcaacgttcgttggtcgagatttatcatgataaccaaaatgatttagccgaagttcacgccttatttggggttggaatgattagctttatcgatcgtgcgtgggcagagcaagtcagtttacgcttatgctatgaattagaaagaaaactatcagataaaaatcgtgcacaccgcccgattttagatgaactacacgagcgcttggctgataagttctttgtgaacttctctttattccaatcattgcctgatgcatggggaattgatcaaatcttccctatcttgccattaagcaacttggataaagcccctgagcgtcgtgccattattttagacattacttgtgattcagatggcgccattgatcaatatgttgaaagccaaggtattgaaacaacaatgtcggttccagcatggtcagctgaagagccttaccgtattggtttctttatggtcggtgcttatcaagaaatcttaggcgatatgcataacctctttggtgataccgacactgccgttgtccgtacccgtagtgacggtggttataacatagaaaaaattgatcgtggtgatagtgttggcgatgttttacgttacgtgcatttagactcgcaagagtttttacgccaataccaaataatggctgggcaacacttagcgaatcacgaacgtgatgcaattttacaagaattagctgaaggcctcgaaggttatacctacctcgaagatgttcgcgctatttaa

SEQ ID NO: 58395 - protein, 639 aa, Photobacterium sp. SKA34
MSEWTINNARDVYNTPYWSQNYFDIAQDGSVVARPNLQAPCNTICLSQLADELIAAGASLPVLVRFPEVMHHRVDSLCSVFNQTIENYGYTGDYLAVYPIKVNQQQEVVSEILKSQYAKQQRQLGLEAGSKPELMAVLAMAQEASSVIVCNGYKDKEYIRLALIGEKLGHEVYIVLEKLSELRIILEQAKELGVTPRLGLRARLASQGKGKWQASGGEKSKFGLSASQVLTVVDELRQRDMLDCLQLLHFHLGSQIASIRDVRNGVGEAGRVYAELKKIGVGITTVDVGGGLAVDYEGTRCQNSCSMNYSINEYANNIVYVLGDICTEYDISMPRIISESGRNLTAHHAVLITDVVGIESYKPENISAPAFDAPQVLHNMWMSWNELSQQAEQRSLVEIYHDNQNDLAEVHALFGVGMISFIDRAWAEQVSLRLCYELERKLSDKNRAHRPILDELHERLADKFFVNFSLFQSLPDAWGIDQIFPILPLSNLDKAPERRAIILDITCDSDGAIDQYVESQGIETTMSVPAWSAEEPYRIGFFMVGAYQEILGDMHNLFGDTDTAVVRTRSDGGYNIEKIDRGDSVGDVLRYVHLDSQEFLRQYQIMAGQHLANHERDAILQELAEGLEGYTYLEDVRAI

SEQ ID NO: 58396 - DNA, 1929 bp, delta proteobacterium MLMS-1
  CDS (1)..(1929): transl_table=11
atggaaaagaaagcggaacaaggctgggatatcgaccaggcccgggagctttacgggatcagacgctggggtctgcgttattttgatatcgacgacgccggccaggtgacggtggccccactcaaggaggagggggcgcggatcgccattgtcgaggtgattgcccaggcccggggccaggggttgcatttcccgatgctgatccgcttccaggatttgctgcgcaatcgggtggagcggatcaaccgggcctttgccgaggccatcgccgaggccgaataccagaaccggttcagcggggtttatccggtcaaggtcaaccagttgcgggaggtggtcgaggaggtcatcgaggccggccggccctttcaccacggcctggaggtgggctccaaaccggagttgcacgccgccctggccctgcacgaggatccccggagcctgatcgtctgcaacggttacaaggatcgtgattatatccggatggccctgctgggtcgcaagctggacaagaaagtgatcctggtggtggagcgggtcgaggaagtggagcggatcatcgccgaagtcgacaagatgcaggtggtgccgttgatcggtttccgggtgcggctgatgagcggcggtaagggcaaatgggagaaaagcggcggcgagaacgccaagttcggcctctcttccatggatatcatgcgggcctcgcacttgctcaaagaggcgggcctggccgccaacctcaagttggtccattttcatatcggttcccaggtgcctgatgcgctgaccatcaaaaaagcggtgcgggaaggggcgatgttctatgccaagctggccaaaatggggcatggcctggaatacctcgatgtcggcggcggcctgggggtcgattatgatggcagccgtaccaccttccattcgtccatcaactactccttaaacgagtacgcccgggacgtgatctacaatatcatggatgtctgcgacgccgaagaggtcgcccatccggtggtaatcagcgaatcggggcgggcggtgacggcccatcactccctgctggtggtcgagaccttcggcaacatcaagaaggcccaggtggaggagcagccggtggcgcccaccatcgaacataaactggtcgatgacgcctggtacgcctacgagaatatcagcgagcacaacccgctggaggcctaccacgacgcccagcagtacaagctggaggcccagagccgctttgagctggggctcattgatctcgaggtcaaggccgaagtggagcggatcttctggctggtgggggtccgggtgctggagtttttccgggacgccgattacgtccccgatgagatcagcgagctggagagcaagtacagcgatcagtatctctgtaacttcagcgtcttccaatccttgctggaccactggggctttggccagctctttcccatcatgcccctgcatcgcctggacgaggagccccggcggcggggtaccctggccgatatcacctgtgattccgacggggtggtgagccgctttatcaatctctacgaggagggggtcgataccctgccgctccatgagttaaacggccagccctattatctggggatctttatgaccggggcctaccaggatatcatgggggatctgcataacctctttggccgggtcaacgaggcccacgtctttctcgacgaagatgaggaggagggctactatatcgaggaaacgatccccggcaccaccatggaacaggtgctgggcatggtccagtacagcgacgacgatctgacccgcaacgtaaaacgccagatcgaccgggccatccgcgaagaccgcctgcgccccaacgaggccatgcggctgctcaacgagtataaccgggggttgaagggatatacctacctgaagctggatgacggataa

SEQ ID NO: 58397 - protein, 642 aa, delta proteobacterium MLMS-1
MEKKAEQGWDIDQARELYGIRRWGLRYFDIDDAGQVTVAPLKEEGARIAIVEVIAQARGQGLHFPMLIRFQDLLRNRVERINRAFAEAIAEAEYQNRFSGVYPVKVNQLREVVEEVIEAGRPFHHGLEVGSKPELHAALALHEDPRSLIVCNGYKDRDYIRMALLGRKLDKKVILVVERVEEVERIIAEVDKMQVVPLIGFRVRLMSGGKGKWEKSGGENAKFGLSSMDIMRASHLLKEAGLAANLKLVHFHIGSQVPDALTIKKAVREGAMFYAKLAKMGHGLEYLDVGGGLGVDYDGSRTTFHSSINYSLNEYARDVIYNIMDVCDAEEVAHPVVISESGRAVTAHHSLLVVETFGNIKKAQVEEQPVAPTIEHKLVDDAWYAYENISEHNPLEAYHDAQQYKLEAQSRFELGLIDLEVKAEVERIFWLVGVRVLEFFRDADYVPDEISELESKYSDQYLCNFSVFQSLLDHWGFGQLFPIMPLHRLDEEPRRRGTLADITCDSDGVVSRFINLYEEGVDTLPLHELNGQPYYLGIFMTGAYQDIMGDLHNLFGRVNEAHVFLDEDEEEGYYIEETIPGTTMEQVLGMVQYSDDDLTRNVKRQIDRAIREDRLRPNEAMRLLNEYNRGLKGYTYLKLDDG

SEQ ID NO: 58398 - DNA, 1944 bp, Oceanobacter sp. RED65
  CDS (1)..(1944): transl_table=11
gtgcgaacaaaaccgctcgctgcgcccccgcatgaagcaccatggtcagcacaagacagtgccgatctttatggtgttaatgattggggttgtgatttcttcaaagtatcggataacggtgaactagaagttcaagtggacttcaaagaccacacggtatctgtacccctaattcaaatcatagaaggtatgcaagaacgcggcttagaaatgcctgctattttgcgtatcgaaaacctattggatgctcgcatcagtgcgctaaatgaggcttttgctcgtgcaatacaaagctaccaatatggcaatgtttatcgtggtgttttcccgatcaaggtgaatcagcaatgtcacgtggttgaagaaatcgcggactttggcagtcgctatcaccatggcttagaagcgggtagtaaagcagagctgattattgctttaagcaagttgcatgacaatgaaagcatgattgtttgcaatggctataaagacgcagaatttatagagcttggcctctatgccaaagaaatgggcataaactgcatctttgttttagagagcttgaaagaactccctatcattcttgaacgcagtgaagccttgggtatcgaacctttattgggtgtgcgtattcgttcaagtgtgacagtggatggccattggaatgaagacagtggcgatcgctctatttttggcatgtcgacccactcattggttcgggttgtagaagagttaaagcaagccaatatgttgcattgcttgcagttattgcattgccacttggggtcacaaatacccaatattcgtaatattagaatgggtgtcatggaagcctgtcgtttctattcaggactgatcgagcaaggcgctcctatgggctacttggatcttggtggcggcttagcagtggattatgaaggtgcaagcagcaaccatacgcattctatgaattatcaactggatgagtactgcaataatattgtggaaaccattcaggagtgtcttgacccagagaatattccccatccagtgattgtgactgaatcgggaagggccactgtagcctattcatccatgctacttttcaatacattggatgttagaacctatgagccagcaccattaccggaatcattagcggatgatgccagttcaactttgcaaagcctttggcaggtgaaccaagacgtgggcgctgaaaactatcaggaatgctacaacgatgcgttgttttatcgtgatgaaattcagtcactgtttaggcgtggtcaagcctcgctaagcgagcgtgccatcgcggaaaatattgcattaagcatctttcaaaaagtggcaaaagaaatacgcagcagtgagcgcgttccagaagaaatgcagcacctgccacaaatgctggcggatatttattacggtaactttagtgtgtttcaatctttgccggatacgtgggcgattgatcaggtatttcctgttatgcccatccatcgcttggatgaaaaacccacgcgcgatgccatgcttgcagatttaacctgtgattgtgatggcaaaattgacgtatttgccacggcagaaggtactagcagtactttggctttgcactcattgaaagaggaagaagaatactatcttggtgtttttcttgtgggggcttatcaagaaacactcggtgatctgcataatctgtttggcgatacacacgtggtcagtgttgccattcgtgaagatggtcgctttgattttgtacgagaaatacatggggatagcatcgccgatgtattgtcgtacgtggaatatgatccacgcattatgagtgaagagctgcgccagcgcgccgaaaaagctgtacggcaaggtcgtataacacctgcgcgacgcaagcagatgttaaaagcatttaaagccagtttagatggctatacctactttgaaaggggaacgctatga

SEQ ID NO: 58399 - protein, 647 aa, Oceanobacter sp. RED65
MRTKPLAAPPHEAPWSAQDSADLYGVNDWGCDFFKVSDNGELEVQVDFKDHTVSVPLIQIIEGMQERGLEMPAILRIENLLDARISALNEAFARAIQSYQYGNVYRGVFPIKVNQQCHVVEEIADFGSRYHHGLEAGSKAELIIALSKLHDNESMIVCNGYKDAEFIELGLYAKEMGINCIFVLESLKELPIILERSEALGIEPLLGVRIRSSVTVDGHWNEDSGDRSIFGMSTHSLVRVVEELKQANMLHCLQLLHCHLGSQIPNIRNIRMGVMEACRFYSGLIEQGAPMGYLDLGGGLAVDYEGASSNHTHSMNYQLDEYCNNIVETIQECLDPENIPHPVIVTESGRATVAYSSMLLFNTLDVRTYEPAPLPESLADDASSTLQSLWQVNQDVGAENYQECYNDALFYRDEIQSLFRRGQASLSERAIAENIALSIFQKVAKEIRSSERVPEEMQHLPQMLADIYYGNFSVFQSLPDTWAIDQVFPVMPIHRLDEKPTRDAMLADLTCDCDGKIDVFATAEGTSSTLALHSLKEEEEYYLGVFLVGAYQETLGDLHNLFGDTHVVSVAIREDGRFDFVREIHGDSIADVLSYVEYDPRIMSEELRQRAEKAVRQGRITPARRKQMLKAFKASLDGYTYFERGTL

SEQ ID NO: 58400 - DNA, 1914 bp, Alteromonadales bacterium TW-7
  CDS (1)..(1914): transl_table=11
atgaaagagacaacatcactagaacaagctcgcacgagttacaatgttcgtcattggagccaaggtttttttggtattaatgatcaaggtgatgtgtatgttgccccaaaggctcacgccccagagcaaactatcgcactgacagatattgcaaaacaacttcaagaaaaaggcttaagcttaccggctttagtgcgctttccacaaattttacatcatcgtgtgcacagtttatgtggcgcatttaataccgcgattgaaaactatggttacccaaaagactacttattagtttacccaattaaagtaaaccaacaacgtgaagtggttgaagaaatagtagcaagccaagccgaattagaaaaaaaacaattaggacttgaggcgggcagcaaaccagagctattaactgttttggcaatggcagaaaaaaccagtgcagtaattgtatgtaatggctacaaagacaaagaatatgtgcgcttagcactgattggcgaaaagctaggccacaaagtatacatagtgcttgaaaagctctctgagctcgacatggtacttagccaagcaaaagcgctaaatgttaaaccgcgtattggtattcgcgtacgtttagcatcgcagggcaaaggtaagtggcaagcaagtggcggtgaaaaatctaaatttggtttatcagcgtcgcaagttttacatgtagtaaaccgtttaaaagaggcaggccaacttgatttaatgcaacttgtgcattttcacttaggctcgcaaatggcaaacattcgtgatgtgcgtttaggtgtgagcgaagccgcgcgtttttactgtgagctacgcaaattaggtgcaagcattgagtgcttggatgttgggggcggtttagctattgattacgatggtacccgcagccaatcgcataactcaatgaattacagcttagctgagtatgcaaataacattgtgtacaccataggtgatacgtgtaagcagtacgcgcagcccatgccgacgattatttctgagtcggggcgtgcactaacggcgcaccatgcggtgcttatatcaaacgtgataggcacagaaagctacgtaccagaggagctaaaagcgcctgctggcgatgcaccgcttttattaaataatatgtgggcatcgtttgtgcaattaaccgatttaacggatgaccgcgcactgattgaaatttatcacgacagccaaggggatttagcagaggcacataaccagtttgcacttgggcttttagatttaacgcagcgtgcgtgggcagagcaagttaacttacgtatttgttatgagcttaacaaacacatggataacaaaaaccgttttcatcgtccaattattgatgagttaaatgcgcgtttagccgataagttttttgtaaacttttcgctttttcaatcattgcctgatgcgtgggggattgatcaagtgtttccggtattgccattaagtggcttaaccgaagcaccaaaaaaacgtgctgtattacttgatataacctgtgattcagacggtgcacttgagcactatgttgatggccaaggcattgaaagcactttaccggtgcctgagtacagtgcagataagccttacttaatgggctttttcttagtgggtgcgtaccaagaaattttaggtgatatgcacaatttatttggcgatacgcacagcgctattatcaatatggatgagcaaggcgttgccagtatcagcgaaataaatcaaggcgatacggtggccgatatgatgcgctatgtgcatttagatgttgagagctttcagcagtcgtacgcgcagttagtgtctgcaaaaatagataaaaatgaacagcaaagcgttttagacgagttgcaaagcggccttaatggctacacttatttagaagagttataa

SEQ ID NO: 58401 - protein, 637 aa, Alteromonadales bacterium TW-7
MKETTSLEQARTSYNVRHWSQGFFGINDQGDVYVAPKAHAPEQTIALTDIAKQLQEKGLSLPALVRFPQILHHRVHSLCGAFNTAIENYGYPKDYLLVYPIKVNQQREVVEEIVASQAELEKKQLGLEAGSKPELLTVLAMAEKTSAVIVCNGYKDKEYVRLALIGEKLGHKVYIVLEKLSELDMVLSQAKALNVKPRIGIRVRLASQGKGKWQASGGEKSKFGLSASQVLHVVNRLKEAGQLDLMQLVHFHLGSQMANIRDVRLGVSEAARFYCELRKLGASIECLDVGGGLAIDYDGTRSQSHNSMNYSLAEYANNIVYTIGDTCKQYAQPMPTIISESGRALTAHHAVLISNVIGTESYVPEELKAPAGDAPLLLNNMWASFVQLTDLTDDRALIEIYHDSQGDLAEAHNQFALGLLDLTQRAWAEQVNLRICYELNKHMDNKNRFHRPIIDELNARLADKFFVNFSLFQSLPDAWGIDQVFPVLPLSGLTEAPKKRAVLLDITCDSDGALEHYVDGQGIESTLPVPEYSADKPYLMGFFLVGAYQEILGDMHNLFGDTHSAIINMDEQGVASISEINQGDTVADMMRYVHLDVESFQQSYAQLVSAKIDKNEQQSVLDELQSGLNGYTYLEEL

SEQ ID NO: 58402 - DNA, 2178 bp, Dianthus caryophyllus
  CDS (1)..(2178)
atgccggctgttgcttgctacgtcgacacctccgccgccgtgtacggcggcgcaggcgcactctctcttcccgcgccggaaatcaacttttccggcgtacctccgacgactaattccaccaccgtcaaccaaccaccgctgccgcagcagtggtccccatcactctccgctgagctctaccgaattgacaggtggggaccaccgtacttcgccgtgaactcctccggcaacgtcaccgtgaaaccctttggagacgccacgcttcctcaccaggaaatcgacctcttgaaagtcgtgaagaaagtctccgacccgaaatcgtcttcgggtttggggctccatttgcccgtgattatccgctttcccgacgtacttaaacaccgtctcgagtcccttcaatctgcttttgatttcgcggtccgtacccacgggtacgggtcccactaccagggagtttacccggtgaagtgcaaccaggaccgatacattgtcgaagatattgtcgaatttgggtccgggtttaggttcgggcttgaggccgggtcgaagcccgaacttctgatggctatgagctctctttgtaagggtagcccggactcgttgctcgtttgtaacgggtttaaggacgccgagtatatttcgcttgctataatcggtcgtaaactcgggttgaatactgttattgttattgaacaggaggaggaagtcgacatggcgattgaattgagtcgaaaaatggggattcggcccgttgttggggttagggccaagctgaggacgaagcattcgggccattttgggtcgacttcgggtgagaaggggaagtttgggcttacgacgacgcagattctccgtgttgttaggaagcttgagagtttcgggatgttggattgtttgcagctcctgcatttccacattggttcgcaaatcccgacgactgcgcttttgagcgatggtgtggcagaagcgtctcaagtttactgtgagctcacccgccttggggcccacatgagggtcattgatatcggtggtggtcttgggattgactatgacgggtcgaaatcgggtgattcggatttatcggttgggtacactctcgaagagtacgctagcgctgttgtggggacagtcaagagtgtctgtgaccgaaaaggcgtcaaaagccccgtgatttgtagcgagagcggtcgtgccattgtgtcgcaccactcgattctcgtctttgaggcggtttcttcctcatcttcggcctccccaccaatgccggggtccaccctggcgctcgattacctcgttgacgggctaactgacgaggtgaagggggagtaccgtagcctgactgctgcagcgatgagaggcgagtacgagagctgtctgatgtactctgggatgctgaagcaaagatgtgtcgagcttttcaaagacgggtgtctcgggatggagcagctagcggctgtcgacgggctttgcgagctcgtatcgaaggcgcttggcgttgctgacggtgtttgtacttacaacgttaacctctccgttttcacctcgattcccgacttctgggggatcggtcagctgttccctataatgcccattcaccgtctcgatcagcagccgaaagcgagagggattttatcagatttaacctgcgacagcgacggtaaaatcgacaagttcattggggacgagtcgagcctaccgctgcacgaactcagcggtggtgagggatattatcttgggatgttcctcggtggggcgtacgaggaggcgctcggtggggtccacaacctgttcggcgggccaagtgtggtccgcgtccagcagagcgacgggccgcagagctatgcggtcacgcgggccgtgcctggcccatcatcctcggatgttctccgagtgatgcaccacgagcccgagctcatgttccagactctcaagcaccgcgcagaggaatgcgacaatgactacactgcaggcccacttgccgacatgctcgcacagtcgtttaacagcacgccatacctcgtgcccgggcatgcgacaggctcttgtggtctcagtaatggcagcgggttggtgaacgggtgtcgggaatacttctacggagttgatgacgggtgcaacgcggccgctgtggacgctgcagcgggcgaggaggagcagtggtcttacgtctgcgcttga

SEQ ID NO: 58403 - protein, 725 aa, Dianthus caryophyllus
MPAVACYVDTSAAVYGGAGALSLPAPEINFSGVPPTTNSTTVNQPPLPQQWSPSLSAELYRIDRWGPPYFAVNSSGNVTVKPFGDATLPHQEIDLLKVVKKVSDPKSSSGLGLHLPVIIRFPDVLKHRLESLQSAFDFAVRTHGYGSHYQGVYPVKCNQDRYIVEDIVEFGSGFRFGLEAGSKPELLMAMSSLCKGSPDSLLVCNGFKDAEYISLAIIGRKLGLNTVIVIEQEEEVDMAIELSRKMGIRPVVGVRAKLRTKHSGHFGSTSGEKGKFGLTTTQILRVVRKLESFGMLDCLQLLHFHIGSQIPTTALLSDGVAEASQVYCELTRLGAHMRVIDIGGGLGIDYDGSKSGDSDLSVGYTLEEYASAVVGTVKSVCDRKGVKSPVICSESGRAIVSHHSILVFEAVSSSSSASPPMPGSTLALDYLVDGLTDEVKGEYRSLTAAAMRGEYESCLMYSGMLKQRCVELFKDGCLGMEQLAAVDGLCELVSKALGVADGVCTYNVNLSVFTSIPDFWGIGQLFPIMPIHRLDQQPKARGILSDLTCDSDGKIDKFIGDESSLPLHELSGGEGYYLGMFLGGAYEEALGGVHNLFGGPSVVRVQQSDGPQSYAVTRAVPGPSSSDVLRVMHHEPELMFQTLKHRAEECDNDYTAGPLADMLAQSFNSTPYLVPGHATGSCGLSNGSGLVNGCREYFYGVDDGCNAAAVDAAAGEEEQWSYVCA

SEQ ID NO: 58404 - DNA, 2851 bp, Trifolium pratense
  CDS (487)..(2676)
ggcacgaggaacacgtcttctcaatctctattccaaaacctatcccattttttctcctcttttacccattcattcattcccaattgactcattctcattaaaaaaaaaccgtttcattctattatttttccattagatccgcatgttttgcttaaccttacaaacttaatttctctcattaacctcattatcattatttcccattcctattcattcattctatcaattaaccttgtttcattacccttaattaatccttcttctgattgttagttgtggggattcatttgttcatagaacggttcgtttggttcttctccatttttcattagatctatcactgtcatcttttgggggggtagccggggcttttgcctcggcgggtttcaaagcccccatttcacaaacctaattacaaaaaacatcacaaccctaattttttttattttcaattttaacctaatttttcattcggttgcgtaagagatgccggctttagcttgttttgtggatgctgctgctgcagttcttcctcctccttccggatacgctctcgccggagattcaactcttccgccgcctctcacatttacgacagcaacaactgacggtgtcgatgatgattccgattcagcttccaattggtctccttcactttccagcaaacttttcaaaattgacggatggggatttccgtatttcggcgtcaataacgccggagatatcgccgttaggccacatggcgcggcgacgatgtctcatcaggagattgatttgctgaaagttgtgaaaaaagcttccgatccgaaatgctgtggtggactcgggttacagcttcctcttgttgttcgatttcctgatgttttgaagaatcggcttgaatcgattcaaggtgcttttgatggtgcaattcaattgcaagggtatgaatctcattaccaaggtgtttatcctgtgaaatgtaatcaggataggtttgttgtcgaggacattgttgaattcgggtcaggttttcgcttcgggctagaagctggttctaagcctgaattgcttctggctatgagctgtttgtgtaaaggtaacagagaagcttttttgatttgcaatggttttaaagacagtgaatatatttcgctggctttggttgcgagaaagcttgctttgaacactgttattgttcttgagcaagaggaagagcttgatatggtggttgagattagcaacaagctgtgtattcgtcctgtgatcggtgttcgtgcaaagctgaggacgaagcattcgggccattttggttcgacttctggtgataaaggtaaatttggtttaactacaattcagattttgcgtgtggtgaagaaacttgaacaattagatatgcttgattgtcttcaattgttgcattttcatattgggtctcaaattcccaccactgaattgcttgctgatggtgttggagaagctgcacagatttactgtgaattgcttcgtttgggtgcccagatgagagttttagatattgggggtggtttaggtatagattacgatggttccaagtcaggtgattctgatatatctgttgcttatggtatagaagagtatgctgcagctgttgttcatgctgttaagtatgtatgtgatcgtaggaatgtgaatcaccctgtgatttgtagtgaaagtggtagggccatagtgtctcatcattccgttttgattttcgaggctattggtgcaagttcaaacaaagcaccttcattgtcctccattggattgcagtacttaggagaagggctctctgaggaagcccttgcagattatcagaacatatctgctgccacccttcgcggtgaacatgaagcttgtttgctctacaccgatcaattcaagaaacgttgtgttgagcaattcaagcaaggtactttagggattgaacagcttgctgcagtggatggtttgtgtgatttgattacggagacaattggggcaaaggatttggttaagaagtaccatatgaatctttctgtgttcacatccattcctgatttttggagcatagatcagttgtttcccatagtccccattcatcgtctggatgagaaaccaactgcaaggggtattttatctgacttgacttgtgacagtgatgggaagattgacaagttcattggtggtgagtcaagcttaccacttcatgaattggaaggacacggtggaggatactatctgggaatgttcttgggcggggcttacgaggaggcgcttggtgggttgcacaacctgtttggtggccctagtgttgttagggtgttacaaagcgatggtccacacggtttcgcagtgacgcgggctgtgtccggaccatcttgtgcagatgtccttcgagtgatgcagcacgagccgcagctcatgtttgagacgcttaagcaccgtgcacttgagttttgtgaacagcatgatgatgacagtgtggtgaatgcagctggtttggcaaatagtctagctagatccttcgacaacatgccttatctggtttcatccacaacttgttgcttgaatgctctcactaacaatgatggtttttactactgttctggtgatgatttcagtgctgcagattctgcttctgttgttacttctgttgctggagaagatgagcattggaattattgctgtgcttgagtttcgtcttttagcattccctttacattatgatgttgttggttgtcgttaaggtggcctgttttttttatcattctatgttgtttttttgttttttttagtaaaggatgtatgaagaagcagaacagggtcattatgtgccctttgtttttgccatttcggcatcttaatgttc

SEQ ID NO: 58405 - protein, 729 aa, Trifolium pratense
MPALACFVDAAAAVLPPPSGYALAGDSTLPPPLTFTTATTDGVDDDSDSASNWSPSLSSKLFKIDGWGFPYFGVNNAGDIAVRPHGAATMSHQEIDLLKVVKKASDPKCCGGLGLQLPLVVRFPDVLKNRLESIQGAFDGAIQLQGYESHYQGVYPVKCNQDRFVVEDIVEFGSGFRFGLEAGSKPELLLAMSCLCKGNREAFLICNGFKDSEYISLALVARKLALNTVIVLEQEEELDMVVEISNKLCIRPVIGVRAKLRTKHSGHFGSTSGDKGKFGLTTIQILRVVKKLEQLDMLDCLQLLHFHIGSQIPTTELLADGVGEAAQIYCELLRLGAQMRVLDIGGGLGIDYDGSKSGDSDISVAYGIEEYAAAVVHAVKYVCDRRNVNHPVICSESGRAIVSHHSVLIFEAIGASSNKAPSLSSIGLQYLGEGLSEEALADYQNISAATLRGEHEACLLYTDQFKKRCVEQFKQGTLGIEQLAAVDGLCDLITETIGAKDLVKKYHMNLSVFTSIPDFWSIDQLFPIVPIHRLDEKPTARGILSDLTCDSDGKIDKFIGGESSLPLHELEGHGGGYYLGMFLGGAYEEALGGLHNLFGGPSVVRVLQSDGPHGFAVTRAVSGPSCADVLRVMQHEPQLMFETLKHRALEFCEQHDDDSVVNAAGLANSLARSFDNMPYLVSSTTCCLNALTNNDGFYYCSGDDFSAADSASVVTSVAGEDEHWNYCCA

SEQ ID NO: 58406 - DNA, 2864 bp, Trifolium pratense
  CDS (475)..(2664)
gaacacgtcttctcaatctctattccaaaacctatcccattttttctcctcttttacccattcattcattcccaattgactcattctcataaaaaaaaaccgtttcattctattatttttccattagatccgcatgttttgcttaaccttacaaacttaatttctctcattaacctcattatcattatttcccattcctattcattcattctctcaattaaccttgtttcattacccttaattaatccttcttctgattgttagttgtggggattcatttgttcatagaacggttcgtttggttcttctccatttttcattagatctatcactgtcatcttttgggggggtagccggggcttttgcctcggcgggtttcaaagcccccatttcacaaacctaattacaaaaaacatcacaaccctaatttttcttttcaattttaacctaatttttcattcggttgcgtaagagatgccggctttagcttgttttgtggatgctgctgctgcagttcttcctcctccttccggatacgctctcgccggagattcaactcttccgccgcctctcacatttacgacagcaacaactgacggtgtcgatgatgattcggattcagcttccaattggtctccttcactttccagcaaactgttcaaaattgacggatggggatttccgtatttcggcgtcaataacgccggagatatcgccgttaggccacatggcgcggcgacgatgtctcatcaggagattgatttgctgaaagttgtgaaaaaagcttccgatccgaaatgctgtggtggactcgggttacagcttcctcttgttgttcgatttcctgatgttttgaagaatcgtcttgaatcgattcaaggtgcttttgatggtgcaattcaattgcaagggtatgaatctcattaccaaggtgtttatcctgtgaaatgtaatcaggataggtttgttgtcgaggacattgttgaattcgggtcaggttttcggttcgggttagaagctggttctaagcctgaattgcttttggctatgagctgtttgtgtaaaggtaacagagaagcttttttgatttgcaatggttttaaagacagtgaatatatttctctggctttggttgcgagaaagcttgctttgaacactgttattgttcttgagcaagaggaagagcttgatatggtggttgagattagcaacaagctgtgtattcgtcctgtgattggtgttcgtgcaaagctgaggacgaagcattcgggccattttggttcgacttctggtgataaaggtaaatttggtttaactacaattcagattttgcgtgtggtgaagaaacttgaacaattagatatgcttgattgtcttcaattgttgcattttcatattgggtctcaaattcccaccactgaattgcttgctgatggtgttggagaagctgcacagatttactgtgaattgcttcgtttgggtgcccagatgagagttttagatattgggggtggtttaggtatagattacgatggttccaagtcaggtgattctgatatatctgttgcttatggtatagaagagtatgctgcagctgttgttcatgctgttaagtatgtatgtgatcgtaggaatgtgaatcaccctgtgatttgtagtgaaagtggtagggccatagtgtctcatcattccgttttgattttcgaggctattggtgcaagttcaaacaaagcaccttcattgtcctccattggattgcagtacttaggagaagggctctctgaggaagcccttgtagattatcagaacatatctgctgccacccttcgcggtgaacatgaagcttgtttgctctacaccgatcaattcaagaaacgttgtgttgagcaattcaagcaaggtactttagggattgaacagcttgctgcagtggatggtttgtgtgatttgattacggagacaattggggcaaaggatttggttaagaagtaccatatgaatctttctgtgttcacatccattcctgatttttggagcatagatcagttgtttcccatagtccccattcatcgtctggatgagaaaccaactgcgaggggtattttatctgacttgacttgtgacagtgatgggaagattgacaagttcattggtggtgagtcaagcttgccacttcatgaattggaaggacacggtggaggatactatctgggaatgttcttgggcggggcttacgaggaggcgcttggtgggttgcacaacctgtttggtggccctagtgttgttagggtgttacaaagcgatggtccacacggtttcgcagtgacgcgtgccgtgtctggaccgtcttgtgcagatgtccttcgagtgatgcagcacgagccgcagctcatgtttgagacgcttaagcaccgtgcacttgagttttgtgaacagcatgatgatgacagtgtggtgaatgcagctggtttggcaaatagtctagctagatccttcgacaacatgccttatctggtttcatccacaacttgttgcttgaatgctctcactaacaatgatggtttttactactgttctggtgatgatttcagtgctgcagattctgcttctgttgttacttctgttgctggagaagatgagcattggaattattgctgtgcttgagtttcgtcttttagcattccctttacattatgatgttgttggttgtcgttaaggtggccttttttttttatcattctatgttgttttttttgttttttttagtaaaggatgtatgaagaagcagaacagggtcattatgtgccctttgtttttgccatttcggcatcttaatgttcatttcctgtcatgtgtagactttc

SEQ ID NO: 58407 - protein, 729 aa, Trifolium pratense
MPALACFVDAAAAVLPPPSGYALAGDSTLPPPLTFTTATTDGVDDDSDSASNWSPSLSSKLFKIDGWGFPYFGVNNAGDIAVRPHGAATMSHQEIDLLKVVKKASDPKCCGGLGLQLPLVVRFPDVLKNRLESIQGAFDGAIQLQGYESHYQGVYPVKCNQDRFVVEDIVEFGSGFRFGLEAGSKPELLLAMSCLCKGNREAFLICNGFKDSEYISLALVARKLALNTVIVLEQEEELDMVVEISNKLCIRPVIGVRAKLRTKHSGHFGSTSGDKGKFGLTTIQILRVVKKLEQLDMLDCLQLLHFHIGSQIPTTELLADGVGEAAQIYCELLRLGAQMRVLDIGGGLGIDYDGSKSGDSDISVAYGIEEYAAAVVHAVKYVCDRRNVNHPVICSESGRAIVSHHSVLIFEAIGASSNKAPSLSSIGLQYLGEGLSEEALVDYQNISAATLRGEHEACLLYTDQFKKRCVEQFKQGTLGIEQLAAVDGLCDLITETIGAKDLVKKYHMNLSVFTSIPDFWSIDQLFPIVPIHRLDEKPTARGILSDLTCDSDGKIDKFIGGESSLPLHELEGHGGGYYLGMFLGGAYEEALGGLHNLFGGPSVVRVLQSDGPHGFAVTRAVSGPSCADVLRVMQHEPQLMFETLKHRALEFCEQHDDDSVVNAAGLANSLARSFDNMPYLVSSTTCCLNALTNNDGFYYCSGDDFSAADSASVVTSVAGEDEHWNYCCA

SEQ ID NO: 58408 - DNA, 2704 bp, Solanum lycopersicum
  CDS (379)..(2502)
ccggttaccgtttaggtttccgaccaattttcttcttctccggtgaactattccggttaaaagttgtatggtggggtgtttgtttgaatcttaggtttgtgtttctgttggttttgagttttaattctttgttttgatttagaaaattttgcttcttctgaagtcgttgtggggatattcgggtcgtgtaagagtgtgttagaaggtgattatcttttgattaagttctttttttgcttcttttgagggggtagccggggctctggcctcggcgggttctaaagcccccagctattacaacattggtcaacaaatcatttctgtataattagttttacacattctttgattcttttttttttgtgaagattttacgagatgcctgctttaggttgttgtgtagaatctgctgtttcccctcctcttggctattccttcctttccacgccggagattttttcctccggcgtacctccgtcgacaaacgctgtccctcttaccacccattggtcaccggagctgtcatctgatctgtatcgtattgatggttggggtgctccgtatttcaccgttaattcttccggtgatatatctgtcaggccccatggtacagatacccttcctcaccaagaaattgatctcctgaaggtcgtgaaaaaggcttccgacccgattaattctggtgggctcgggttacagcttccactcgttgttcggtttcctgatgttttgaagaaccgattggagtctcttcaatcggcttttgattatgctgttcaatctgaaggatatgaggctcattaccaaggtgtttatcctgtaaaatgcaatcaggacaggttcgttgttgaagatattgtcaaattcgggacgggtttccggtttggtcttgaagctgggtcaaaacctgagctcctcctggccatgagctctctatgcaagggcagctcggagggtcttcttgtatgcaacggattcaaggatgcagaatacatttcacttgctttggttgcaagaaagctccaattgaacacggtgattgtgctcgaacaagaggaggagcttgatttggtgattgacatcagccgtaaaatggcggtccagcctgtaattgggctccgggctaagcttaggaccaaacattccggtcattttggatccacttctggagagaaaggcaagtttgggcttacaacaactcagatccttcgtgtggtgaggaaactgaaagaatccggaatgttagattgtcttcagctgctgcatttccacattggatctcagatcccttcaacggagttgcttgctgatggtgttggtgaggctgctcaggtttattctgagttagtccgccttggtgctggcatgaaattcattgatattggtggtgggcttggaattgattatgatggtaccaaatcttccgattctgatgtttccgtcggatatggccttcaggattacgcctctacagtggttcaagctgtccggtttgtttgtgaccggaagaacgtgaagcatccggtgatctgtagcgaaagtggcagagcaattgtatctcatcactctgttctgatatttgaagctgtgtcttcaactaccacgcgttctcaagagctgtcctctatgagtctccactccttcgtggagaaactcaatgatgacgctcgtggcgattaccggaatctatctgctgctgctattcgcggagagtacgatacctgtatgctttatgccgatcagttgaaacagaggtgtgtggatcagttcaaagatggtaatctggacattgaacagcttgctgccgtagatgccgtctgtgactttgtgtcaaaagctattggtgcttctgaccctgttcgcacctatcatgtgaatctgtccgttttcacttcaattcctgatttctgggcaatcgaccaactattcccgattgttcccatccacaagctagacgaacatccttcagctcggggaattctatccgacttgacatgtgacagtgatggaaagatcgataaattcatcggaggcgagtcaagcttggctctccatgaattgggaagtggaaacagcgcaccttattatctgggaatgtttttaggcggggcatatgaggaagccctcggcggactccataacctatttggcggacccagcgtcctgcgtgtgtcacagagcgacagccctcacagcttcgctgtaacctatgcagtccctgggccttcctgtgctgacgtcctccgagcaatgcaacacgagcctgaactcatgttcgagaccctcaagcaccgtgcagaggaattcgtgcacaaggaagaagaagtagaagtctcattggccaatagcctaaatcagtcgttccacaacatgccatatcttgcaccacattcatcctgctgtttttctgggtattactattgcaatgatgagaatattgttggtgttggcgcagaatgtgcaataggggaggaagagttttggccatactgcgttgcttgaagactttttgtcttttcagtttgttgttttagtaataaagtttgtcggatggtatgttaaattaatgtaaatttttggtgtaatttactagttgtggagaaagttatggttcaatctttgtgtaattttctccttatcctatgtaaactttttccttattaaatgaatgtaccttagaaataaaaaaaaaaaaaaaaaaaaa

SEQ ID NO: 58409 - protein, 707 aa, Solanum lycopersicum
MPALGCCVESAVSPPLGYSFLSTPEIFSSGVPPSTNAVPLTTHWSPELSSDLYRIDGWGAPYFTVNSSGDISVRPHGTDTLPHQEIDLLKVVKKASDPINSGGLGLQLPLVVRFPDVLKNRLESLQSAFDYAVQSEGYEAHYQGVYPVKCNQDRFVVEDIVKFGTGFRFGLEAGSKPELLLAMSSLCKGSSEGLLVCNGFKDAEYISLALVARKLQLNTVIVLEQEEELDLVIDISRKMAVQPVIGLRAKLRTKHSGHFGSTSGEKGKFGLTTTQILRVVRKLKESGMLDCLQLLHFHIGSQIPSTELLADGVGEAAQVYSELVRLGAGMKFIDIGGGLGIDYDGTKSSDSDVSVGYGLQDYASTVVQAVRFVCDRKNVKHPVICSESGRAIVSHHSVLIFEAVSSTTTRSQELSSMSLHSFVEKLNDDARGDYRNLSAAAIRGEYDTCMLYADQLKQRCVDQFKDGNLDIEQLAAVDAVCDFVSKAIGASDPVRTYHVNLSVFTSIPDFWAIDQLFPIVPIHKLDEHPSARGILSDLTCDSDGKIDKFIGGESSLALHELGSGNSAPYYLGMFLGGAYEEALGGLHNLFGGPSVLRVSQSDSPHSFAVTYAVPGPSCADVLRAMQHEPELMFETLKHRAEEFVHKEEEVEVSLANSLNQSFHNMPYLAPHSSCCFSGYYYCNDENIVGVGAECAIGEEEFWPYCVA

SEQ ID NO: 58410 - DNA, 3344 bp, Malus domestica
  CDS (677)..(2863)
cccagcttggtaccgagctcggatccactagtaacggccgccagtgtgctggaattcggcttctaatacgactcactatagggcaagcagtggtatcaacgcagagtacgcgggggccacttaacatttcaggcttcttgaaaacctccgtgtaagaaaaaagaaacgtctccaactcaagaatctatttattttttataattttgccagcaattttctcggcctttcccggaaaataaaatttcccaaatttaggtgcctattttccatttcccaattttctcaggtgccaaacaacccacaaaagccattccctcgtccttatcctgtgacatgcactgcatgtttgggtccgatttcggtgcttaaaaacctgttttctgggccgcacaatttcaccgtcttcattccgaaacgtttccctctctctcccctgaggtttcggcgtggggatttcggatccgactgaaggggtttctgggttccttacaggtttccgtaagcccctttactgctccgtttgtgggggtagccggggctccggcctcggcgggttttaaagcccccattcattacaaactcacaattcaacgatttaaaccataacccccaagtttctctaatttttttcatcttaatttcattttttgattgattaatcgtcgcggaagaagagatgccggccctggcttgttgcgtggatgctgctgtggcgcctcccggccacgctttcgccggggatagctctcttcccgcgtcgccgttcccaggcttacctccggcgaccatcaccaccgccgccgacaattcccattggtccccttccctctcgtccgacctctaccgaatagacgcctggggtgggccctacttcaccgtcaactcctccggcaacgtcgccgtccgtcctcatgggacggcgactctgcctcaccaggagattgatctgctgaagatcgtgaagaaggtttcggattcaaaaccggagtgcggacttgggttgcagctgccgctcattgttcgcctccctgatgtgctcaaggaccggctcgagtccctccagggcgccttcgatctggcgatccggtcccacgactacggctcccactaccagggcgtgtacccggtgaaatgcaaccaggaccggttcgtcgtggaggacattgtcaagttcgggtccccgttccggttcggactggaagccgggtcgaagccggagctcctcttggccatgagctgcttgtgcaaaggtcatcccgacgcccttctcatctgcaatggattcaaagaccttgagtacatctctctggctctgttcgcccgcaagctcgccttgaacactgtgattgttcttgagcaagaggaggagctcgatttggttgttgatttcagccaaaagctcggcgtacgacccgtgattggcgtccgggccaagctcaagaccaagcattcgggccatttcggttcgacttccggcgaggagggaaagttcggactcaccaccactcagattttacgcgttgtgaagaagcttgataagctgggtatgcttgattgctttcagttgttgcattttcataccgggtctcagatcccttcgacggccctgctcgctgatggcgtatccgaggcatcgcagatatattgcgaattggtccgtctcggtgcccacatgaaggtcatagacattggaggcggtctgggtattgattacgatggatccaaatctagtgactcggagatttcggtcagctacggccttgaagagtatgcctccgccgttgtccgaacggttcggaacgtctgtgaacggaggtccgtgaagcacccggtgatttgcagtgaaagcggccgagccttggtttcccaccactcggttctcatatttgaggctatttcttccagtgcttgtgatgatgctcctcccatgtccgcctttgagcatcagtacttcattgagggtctgacggatgaagctcgtgccgattacctgaacctctccgctgcggctatcagaggtgagtacgaggcttgtttgacgtatgctgatctgttgaaacaacggagtgttgaacaattcaaagaagggtctgtcggtattgagcaattggccaccgtcgatgggttctgtgatatgttttcgaaagcaatcggggcatctgacgctgtccgtacataccatgtgaatctctcggtattcacttcaattccagacttctggggtattgggcagacgttccccatagtcccgattcaccgcctcgatcaatggcctgcagtgaggggagtattgtcagacttgacctgtgacagtgatgggaaaatcgacaagttcattggcggcgggtctagcttgccgctgcatgagctggaaggcgatggtgggaataatggcggtgggcaaaagtactatttggggatgttcctgggcggggcttatcaggaggcgctcggaggagtccacaacctcttcggtggcccgagcattgttcgggtttcgcagagcgatggtccccacagcttcgcggtgacgggagctgtgtcaggtccgtcatgtggggacgtcctgcgggtgatgcagcatgagcccgagctcatgtttgagacgctgaagcaccgcgcggaggagtgcgggcagggtgacgatgggggaatggccagtgccgctgtggccaccagcctggcccggtccttccacaacatgccgtacctggtgtcagcttcttcttgtagcctgactgcaatgaataaccatgggttctactattgcagcgaggatgattacggcgacattgttgccgattcggcgggggctgctgctcccgttggcgaggaagaacagtggtcttattgctgtgcttaagagtctcaaacatccctctagtttgatgttggtgtgtctgctggggtcgtctgttttaattttaatctttttgttttttgccttttttggtttaatgtttcatgaagagcaagggacgtgatagagagagtcctttgtaatttgtggcaaaaaagtagggggaatgggagccgaatccgctcttttgtaaattcggggcctttttcccctgttcctatgttagtagacttacaatatttttggttttttttaaaaaaaaaaaaaaaaaaaaaaaaaaaaaaagtactctgcgttgataccactgcttgccctatagtgagtcgtattagaagccgaattccagcacactggcggccgttactagtggatccgagctcggtaccaagcttggcgtaatcatggtcatagctgtttcctgtgtgaaattgttatccgctcacaattccacacaacatacgagccggaagcataaagtgtaaag

SEQ ID NO: 58411 - protein, 728 aa, Malus domestica
MPALACCVDAAVAPPGHAFAGDSSLPASPFPGLPPATITTAADNSHWSPSLSSDLYRIDAWGGPYFTVNSSGNVAVRPHGTATLPHQEIDLLKIVKKVSDSKPECGLGLQLPLIVRLPDVLKDRLESLQGAFDLAIRSHDYGSHYQGVYPVKCNQDRFVVEDIVKFGSPFRFGLEAGSKPELLLAMSCLCKGHPDALLICNGFKDLEYISLALFARKLALNTVIVLEQEEELDLVVDFSQKLGVRPVIGVRAKLKTKHSGHFGSTSGEEGKFGLTTTQILRVVKKLDKLGMLDCFQLLHFHTGSQIPSTALLADGVSEASQIYCELVRLGAHMKVIDIGGGLGIDYDGSKSSDSEISVSYGLEEYASAVVRTVRNVCERRSVKHPVICSESGRALVSHHSVLIFEAISSSACDDAPPMSAFEHQYFIEGLTDEARADYLNLSAAAIRGEYEACLTYADLLKQRSVEQFKEGSVGIEQLATVDGFCDMFSKAIGASDAVRTYHVNLSVFTSIPDFWGIGQTFPIVPIHRLDQWPAVRGVLSDLTCDSDGKIDKFIGGGSSLPLHELEGDGGNNGGGQKYYLGMFLGGAYQEALGGVHNLFGGPSIVRVSQSDGPHSFAVTGAVSGPSCGDVLRVMQHEPELMFETLKHRAEECGQGDDGGMASAAVATSLARSFHNMPYLVSASSCSLTAMNNHGFYYCSEDDYGDIVADSAGAAAPVGEEEQWSYCCA

SEQ ID NO: 58412 - DNA, 3679 bp, Pringlea antiscorbutica
  CDS (887)..(3022)
ggaccattagagaagaaacaacatttacttatttttttaacaattgacacaagaatttcattccacttaatgacataaccgtaacactaatgtagaccaccaatatacattcttatcaaatcaaatatattttcgaaatatatttaaaaagacgttgaaaaaatgaaaaaaatagaaatattagctgtaatattagacaatttattacacggaatcttccatcagcctcatttcatctccatcaatttgggatctttctaatagttttttttaaattaaaaatttgaaaaaagatatgataaatgggccccatggcccaaatccaacttgcctcagtcgtaaccttctccttgttcggttgcttttcctcttatataaacaatagcaattccccttcatcaaactcacccttctcttcttcaattccgttaaagagtctcccttttttccgctaggtttccgtctctgctttctttgcattttcccgagaaacttcacattcacattctcgtttccctgttttttttttttttttttttttttctcttctcagaagctccatataaattcaggctctgcatggtttgggaatagaatttattgtttttcagatttggaaaattccctttttcggttacatttttgagttttcttttgaacggtcatcgtggagattctcggatcaggtcgggctgcgagaggggggtttcacggcggcgatagattcatcttctgccttcttttgagggggtagccggggctccggcctcggcggtttttaaacccctaccttcacaaaatctgggaaaaacaactatcttctatttttccgtcgaattttctgtaaagtagaattgtgatcgttgctgagagagggtgaagaaggatgcttggtctagcttgcgtcgatactgcctttgtgcctcctggttacgctttctctggggatagccctctccccaccgccgctgacgtgtttatcccggcgtcaccaacttccgccgccgttcttgacagctcttgccgttggaattcctctctctccgcctcgctctatcggattgacggatggggagctccgtatttcgtcgccaacttgtccggtaacatctctgttcgtcctcatggctccgacactttgcctcaccaagatatcgatctgctgaaaatcgttaagaaggtgacggatccgaaatcctcaggtggtttgggattgcagctcccacttatcgtccggtttccggatgtattgaagaacaggctcgagtgcctccagtctgcgttcgattgcgcgattcagagtctgggatacgattcccattaccaaggtgtttttccggtaaaatgcaatcaggaccgattcgttgtggaggatatcgtcagatttggatctcctttccggtttggattggaagctggttctaaacctgagatccttctcgccatgagctgcttgtgcaaaggtaatcctgatgcctttcttgtctgtaatggcttcaaagacgctgagtacgtatccttggctctgctcgggagaaaactggcattaaacactgtgattgtgctcgagcaagaagaagagcttgatctggttatcgatctgagccagaagatgaatgtgaggcctgtgattgggttaagagctaagctgagaaccaaacactcgggccatttcggatcaacttcaggtgaaaagggcaaattcggattaaccactactcagatagttcgtgtcatggggaagcttagccaaactggtatgctcgattgcctccagctcttgcattttcacattggctcacagattccatcgacttcgttgctctctgacggtgttgccgaggctgctcagctttactgtgaactcgtgcgtctcggtgcacatatgaaagttatcgatattggtggtggtttgggaattgactatgacgggtctaaatgtggagaatcggatctctctgttgcctatactctcgaggagtatgctgaagctgttgtagcgtccgtccggtatgtatgtgaccggagatcagtgaaacatccggtaatatgcagcgaaagcggaagagcaatagtctctcatcattccgtgttgattttcgaagctgtttcggcggttaaaccaatggttcatcaagctattcccgatgatattcagttcctcctcgaaggtgaggaagctcgtgccaattacgaggatctatacgctgctgtgatgcatggagaccatgaaagatgcctactttatgtggaccagctgaagcagagatgtgttgaaggtttcaaagatggtgttttgagcatcgagcagttagcttctgttgatgggttatgcgaatgggtgttgaaggctataggcgcatcggatccagttcagacttacaatatcaacctatcggttttcacctcgattcctgatctctgggggattgatcggctgtttcctatagttcctatccataagctcgatcaaaggcccgggactcgtgggatcttatcggatttaacgtgcgacagcgatgggaagatcgacaagttcataggcggcgagtccagcttgccgttgcacgagctagacagcaatggcggtggaggaaggtactttttgggtatgttccttggaggggcttacgaggaggcgctcggtggagtccacaatttgtttggcggaccaagcgttgtccgggtctcgcagagcgatggaccacatagctttgcagtgacccgagccgtgcctggccagtcctctgcagatgttctccgagcaatgcagcatgagcccgagataatgtttcagaccctaaagcaccgagcagcggaattgatgcataccaaaggtggcgaagaagaagaagatgatgatgagttcaacaatgccgcggcttgtctcgatcgttcgttccacaacatgccgtatctagcgaacgagccggcatctctgagtaactctctttcagctgcgatcaataaccttggcttttactactgcgacgaagacggctttgactacctctccgcgtgagaaggtggtcgtgtggtttgttgttgcattctattatcgtaaaattgttattgtctgatttcttaagtttcttttaataaattagtaaaataatcacattatgagatccatcgttgtttaaggtttttaattagaggatccgaatgatgaaagcccttttgtgaaattcggatctttgtatctcatttgatttattttcccgttgaaatgtagcgttcctgtttcatttattaaatagaagatcattttatgagctttttcttttcgttcaatcaattaacaactttagtcttttttgtctgccgttagacatatctttcactttacgagtttctttcaaaccgatgaattgtataagaatttaataaaaagataaagacttttgcctagtagtcctttattatctaagggcttaggtttcgctgaagacttgaacggcgtccgtgcgcgattgtggttatgagtaaagagagagtgtgacaacacacacacaagttacatatgctagattctgacatgtatgtgttgctaccgactcacttctttattgattaggctttgggaagcgggtgaatgattgattgatatgtggctcatgtttgtgtgtttttaggtggttgcatcatcgaataatttctttattttcggtcacggctt

SEQ ID NO: 58413 - protein, 711 aa, Pringlea antiscorbutica
MLGLACVDTAFVPPGYAFSGDSPLPTAADVFIPASPTSAAVLDSSCRWNSSLSASLYRIDGWGAPYFVANLSGNISVRPHGSDTLPHQDIDLLKIVKKVTDPKSSGGLGLQLPLIVRFPDVLKNRLECLQSAFDCAIQSLGYDSHYQGVFPVKCNQDRFVVEDIVRFGSPFRFGLEAGSKPEILLAMSCLCKGNPDAFLVCNGFKDAEYVSLALLGRKLALNTVIVLEQEEELDLVIDLSQKMNVRPVIGLRAKLRTKHSGHFGSTSGEKGKFGLTTTQIVRVMGKLSQTGMLDCLQLLHFHIGSQIPSTSLLSDGVAEAAQLYCELVRLGAHMKVIDIGGGLGIDYDGSKCGESDLSVAYTLEEYAEAVVASVRYVCDRRSVKHPVICSESGRAIVSHHSVLIFEAVSAVKPMVHQAIPDDIQFLLEGEEARANYEDLYAAVMHGDHERCLLYVDQLKQRCVEGFKDGVLSIEQLASVDGLCEWVLKAIGASDPVQTYNINLSVFTSIPDLWGIDRLFPIVPIHKLDQRPGTRGILSDLTCDSDGKIDKFIGGESSLPLHELDSNGGGGRYFLGMFLGGAYEEALGGVHNLFGGPSVVRVSQSDGPHSFAVTRAVPGQSSADVLRAMQHEPEIMFQTLKHRAAELMHTKGGEEEEDDDEFNNAAACLDRSFHNMPYLANEPASLSNSLSAAINNLGFYYCDEDGFDYLSA

SEQ ID NO: 58414 - DNA, 3066 bp, Pringlea antiscorbutica
  CDS (672)..(2879)
ataataaaaaaaaaaccaaataaccaaataaaagataaacgttcatctgcccttcaaatagggcccaagcccaaatttaacctcacccaaaaatctcaccttctcctcctatataaacgttcatctgcccttcatgcaatcctcgctcatctccatttctcttttctccgctctcttcttgcaaagatttttccctggaaaatttcccgagaaaatttgcattctcatttttttttctttttttcctccctcctcaatttttcttcgaaaattccgcctttgcccgttgagggaatctttcagggaatagttttgttgccgattttcagatttggaaaattttccattccctgttttattctctcttaagttttctcctgaacgttcaacgtggggaacttcgggtcgggtcgggtcgttaaaggcgggtttcacggtggtgatagattcaccttctgcttcttctgagggggttagccccgaggctcttttgcctcggcggatttcaaagtccccccatcttcacaaaatctctcccaaccaataaaaaaaaaattcattttctcttttttgattgaaaattgattcaccaattttgtttttttttcctctttcgaataaattcgtttattaattattatcgtcgctgaagggagaagaaggagaagaagatgcctgctttagctctcgttgatactcccgtcgagaccttttccggtgactgctccggcgttttcattccgacgtcaccaaactccgccgcttctgttgattggtctccgtcggtcgagaccttttccggtgactgctccggcgttttcattccgacgtcaccaaactccgccgcttctgttgattggtctccgtcgctctccgcttcgctttaccgaatcgacagatggggcgctccgtatttcaccgccaattcctccgggaacatctccgttcgtcctcacggctccaacacgatgcctcatcaagacattgatttgatgaaagtcgttaagaaagccacagatccgaaatcaaccggtggtttagctttgcagcttcctcttatcgtccggttccctgacgttctgaagaaccggcttgagtctcttcaatcagcgtttgatttcgcgatccagacgcaagggtatgattctcattaccaaggtgtttatccggttaaatgtaaccaagatcggttcattattgaagatattgtggagttcggttcgagtttccggtttggattagaagctggttcgaaaccggagattcttcttgctatgagctgtttgtgtaaaggtaatcctgatgcctttcttgtctgtaatggtttcaaagacgctgagtatgtctcattggcgttgcttgggaggaaactggagttgaacacagtgattgttcttgagcaagaagaagagcttgagttagttattgatttgagcaagaagatgaacgtgaggcctgtgattgggttaagagccaagctgagaactaaacattctggtcattttggttctacttctggtgagaaaggcaagtttgggttgacaacgatccagattgttcgtgtggttcggaagcttcgtcaagttggtatgcttgattgtctccaactacttcattttcacattggttcacagattccgtcgacggctttgctctccgacggtgtgtctgaagctgcacagctttactgtgagcttatccgtcttggtgctcgtatggaagtgattgatattggtgggggtttagggatcgattacgacgggtctaaatctggtgaatcggatctctctgttgcttacagtcttgaggagtatgctgcagctgttgtggcgtctattaggtttgtttgtgatcagaaatctgtgaagcatccggtgatatgcagcgagagcggtcgagctattgtctctcatcactctgtgttgatctttgaagctgtctcaactggtcaacaacatgaaaccccaagtgatcatcagttcttgcttgaaggttactcagaggaagctcgaggtgattacgagaatctttatggtgctgccatgcgtggtgatcgtgaaagctgcttgctttatgttgatcagatgaaacagagatgtgttgatgggtttaaagaaggttctttgagcattgaacagttagctggtgttgatgggttatgcgagtgggtgattaaggcgattggtgcatcggatccggttcttacttacaatgtcaatctatcggttttcacttcgattcctgatttctgggggattgatcagttgtttcctatcgttcctatccataggcttgatcaaaggcctgtggcgagagggatcttatcggatttgacttgtgacagcgatggtaagatcaacaagttcataggaggagagtcgagcttgccattgcacgagctggacaacaatggctgcagcggcgggcgatactatttgggaatgtttctgggtggagcttatgaggaagctctcggtggagtccacaatttgttcggagggccaagcgtggttcgggttttgcagagcgatggacctcatgggtttgcagtgacccgtgctgtgatgggccaatcttctgcggatgtccttagagcgatgcagcacgagcctgagctcatgtttcagactcttaaacaccgagcggaagagttatcttcggtccataaagctggtggtgataaaggaaacgacaaattagcagcgtcatgtcttgctcgttcgttcaacaacatgccttacctttccatggaaacgtccacaaacgctctcaccgctgcgatcagtaacctcgccgtttactaccgcgatgaagcagcggttggtggtggcggcaaggatggaaaatggtcttgtttcggtggattgagagagacttgagacatcctctgcgtttgatcttcaccgtacgatcctagttcgtatttgtctttatattctgtttttaagtttaaagttgtttatttgtaataataaggcaaactcttagcaaatttttaatgattagaaactagtgttttttaacagtagcgaactgttaaccatgttaatgacctgttataagctt

SEQ ID NO: 58415 - protein, 735 aa, Pringlea antiscorbutica
MPALALVDTPVETFSGDCSGVFIPTSPNSAASVDWSPSVETFSGDCSGVFIPTSPNSAASVDWSPSLSASLYRIDRWGAPYFTANSSGNISVRPHGSNTMPHQDIDLMKVVKKATDPKSTGGLALQLPLIVRFPDVLKNRLESLQSAFDFAIQTQGYDSHYQGVYPVKCNQDRFIIEDIVEFGSSFRFGLEAGSKPEILLAMSCLCKGNPDAFLVCNGFKDAEYVSLALLGRKLELNTVIVLEQEEELELVIDLSKKMNVRPVIGLRAKLRTKHSGHFGSTSGEKGKFGLTTIQIVRVVRKLRQVGMLDCLQLLHFHIGSQIPSTALLSDGVSEAAQLYCELIRLGARMEVIDIGGGLGIDYDGSKSGESDLSVAYSLEEYAAAVVASIRFVCDQKSVKHPVICSESGRAIVSHHSVLIFEAVSTGQQHETPSDHQFLLEGYSEEARGDYENLYGAAMRGDRESCLLYVDQMKQRCVDGFKEGSLSIEQLAGVDGLCEWVIKAIGASDPVLTYNVNLSVFTSIPDFWGIDQLFPIVPIHRLDQRPVARGILSDLTCDSDGKINKFIGGESSLPLHELDNNGCSGGRYYLGMFLGGAYEEALGGVHNLFGGPSVVRVLQSDGPHGFAVTRAVMGQSSADVLRAMQHEPELMFQTLKHRAEELSSVHKAGGDKGNDKLAASCLARSFNNMPYLSMETSTNALTAAISNLAVYYRDEAAVGGGGKDGKWSCFGGLRET

SEQ ID NO: 58416 - DNA, 2885 bp, Nicotiana tabacum
  CDS (442)..(2607)
cagttgttagtttcacgttctcttctcaattcccataacagaaacccttccgttaggtttccgtcctatttttcctcatcttctccgtttcctcttctgaaatcaatatctgtatggtgtttttcttgttcgaattttagatttgttttatctttaatacctataaccttaaattctctgtttaaaccaaaaacttagcttcttctgaagtcagggtggggatttttggatcgtgtaagagtgtgttagagggtgattatcttttgattcagttccttttttgcttcttttgagggggtagccggggcctcggcctcggcgggttttaatagcccccatctattacaactattgggcaaaaacatcattaaatctgtacaaaacaaacccttaatttagtttaattttctgtattcattgattttttaaacagaagaagagatgccggccctaggttgttgtgtagatgctgctgttgtttcccctcctctcagctatgccttctctcgggatagctctcttcccgcgccggagttctttgcctccggcgtacctccgacaaattctgccgctgcttcccattggtctccggatttgtcgtctgctttatacggggtcgatgggtggggagctccttatttctctgttaactctaatggagatatctccgtccgaccacacggtacggacactctccctcaccaggaaattgaccttctcaaggtcgtgaaaaaggcctccgacccgaaaaattcaggtgggcttgggcttcagctgcctcttgttgttcgcttccctgatgtgttgaaaaaccggttggaatctctgcaatcggcttttgatctcgcggttcattcccagggctatggggcccactaccaaggtgtttatcccgtgaaatgcaatcaagacaggttcgtggtggaagatatcgtgaaattcgggtcgccattccggttcgggttggaagccgggtctaaacccgagctcctgttagccatgagctgtctctgcaagggcagtgctgagggccttctcgtttgcaatggtttcaaggacgctgagtacatttcgcttgctttggttgcaagaaagctcatgttaaacactgtaattgtgcttgaacaagaggaggagcttgaccttgtgattgatataagccataagatggctgttcggcctgtaattggacttcgggctaagctcaggaccaagcattcaggccattttggatccacttctggagaaaaaggtaagtttgggcttacaacgacccaaattgttcgtgtggtgaagaagctagaagaatccggaatgctggattgccttcagttgctgcattttcacattggatctcagatcccttctacggggttgctagctgatggagttggtgaggccgctcagatttattgtgaattagtccgtcttggagcgggtatgaagttcattgatattggaggtgggcttggaattgattatgatggtactaaatcatgcgattctgatgtctctgttggctatggcattcaagaatatgcctccgcagttgttcaggcggttcaatatgtaggcgaccgtaagggtgtgaaacacccagtgatctgcagcgaaagtggcagggcaattgtttctcatcactcaattctgattttcgaagccgtgtctgcttctagtactcatgtttcttcttcacatctgtcttctggtggcctccaatccatggcggagacgctcaacgaagatgcccttgctgattaccgcaatttatctgctgctgcagttcgtggagagtatgagacatgtgtactttactctgatcagttgaaacagagatgtgtggagcagtttaaagaagggtccttgggtattgaacatcttgctgctgttgatagcatctgtgactttgtatcaaaggctatgggggctgctgatcctgtccgcacttaccatgtgaatctgtcaattttcacttcaattcctgatttttgggcctttggtcaattgtttccgattgttccaattcaccgcttagatgaaaagcctgcagtgaggggaatattatcggacttaacttgtgacagtgatgggaaggttgataagttcattggtggcgaatcaagcttgccgctacatgaattgggaagtaatggcgatggtggtggttattatctggggatgtttttgggtggggcttatgaggaggcgctcggaggactccacaacctgtttggtggaccaagtgtcgtgcgcgtggtgcagagcgatagcgctcacagctttgccatgactcgctccgtccctggcccgtcttgcgctgatgtgctccgagcgatgcagcacgagcccgagctcatgttcgagactctcaagcaccgtgcggaggaattcttggaacaagaagatgacaaagggctggctgttgaatctttggccagcagcgtagctcagtccttccataacatgccttaccttgtggcgccttcatcttgccgcttcactgctgctactgataacaatggtggctataattactattacagtgatgagaatgcagcagattctgctacaggggaggatgagatttggtcctattgcactgcttgaagtgttctcgtagcatctccagtcttagtttgtcgtcgaggttgtctgtttttgaataatacccttagttggtgatgtttttctttgtttagtttcttgtttcgttggtgaattaaaagatggaatagaaagcagggatttttccctgtggtctgttgcagctttctgttattgtagtttaaaggggaagagtgtggacatgaccgaatcaatttgatgtatgattcggcctcttcctatgtaatctcctgccctttttaatgcagtttgttttagta

SEQ ID NO: 58417 - protein, 721 aa, Nicotiana tabacum
MPALGCCVDAAVVSPPLSYAFSRDSSLPAPEFFASGVPPTNSAAASHWSPDLSSALYGVDGWGAPYFSVNSNGDISVRPHGTDTLPHQEIDLLKVVKKASDPKNSGGLGLQLPLVVRFPDVLKNRLESLQSAFDLAVHSQGYGAHYQGVYPVKCNQDRFVVEDIVKFGSPFRFGLEAGSKPELLLAMSCLCKGSAEGLLVCNGFKDAEYISLALVARKLMLNTVIVLEQEEELDLVIDISHKMAVRPVIGLRAKLRTKHSGHFGSTSGEKGKFGLTTTQIVRVVKKLEESGMLDCLQLLHFHIGSQIPSTGLLADGVGEAAQIYCELVRLGAGMKFIDIGGGLGIDYDGTKSCDSDVSVGYGIQEYASAVVQAVQYVGDRKGVKHPVICSESGRAIVSHHSILIFEAVSASSTHVSSSHLSSGGLQSMAETLNEDALADYRNLSAAAVRGEYETCVLYSDQLKQRCVEQFKEGSLGIEHLAAVDSICDFVSKAMGAADPVRTYHVNLSIFTSIPDFWAFGQLFPIVPIHRLDEKPAVRGILSDLTCDSDGKVDKFIGGESSLPLHELGSNGDGGGYYLGMFLGGAYEEALGGLHNLFGGPSVVRVVQSDSAHSFAMTRSVPGPSCADVLRAMQHEPELMFETLKHRAEEFLEQEDDKGLAVESLASSVAQSFHNMPYLVAPSSCRFTAATDNNGGYNYYYSDENAADSATGEDEIWSYCTA

SEQ ID NO: 58418 - DNA, 2430 bp, Nicotiana tabacum
  CDS (1)..(2202)
atgcctgccttaggttgttgtgtagacgctgctgtttctcctcctcccggctattccttccttggggatagttctcttcccgcgccggagatttttccctccggcgtacctccgtcgacaaacaccgccgttgccaccaccaccaccacccattggtctccggcgcactcatccgctctttattctattgacggatggggcgctccgtatttcaccgttaattcctccggtgatatctccgttaagccacatggtacggatactctgcctcaccaggaaatcgatctccttaaggtcgtgaaaaaggcctccgacccgaaaaatttgggcggactcgggttgcagtttccgctcgttgttcggttccctgatattctgaaaaaccggttggagtctcttcaatccgtttttgattatgcggttcagtcacaaggttatgaagctcactaccaaggtgtttatcctgtgaaatgcaaccaggacaggttcgttgttgaagatattgtcaaattcggatcgggtttccggttcggtctcgaagctgggtctaaacctgagctcctcctagctatgagctgtctctgcaaaggcagtcatgagggtcttcttgtgtgcaacgggttcaaggatgctgagtacatttcgcttgctttggttgcaaggaagctcatgttgaatacagtaattgtccttgaacaagaggaggagcttgatttggtgattgacatcagcaagaaaatggcggtccggcctgtgatcgggcttcgggctaagctcaggaccaaacattcgggtcatttcggatccacttctggagagaaaggtaaatttgggctcacgacaacacagattgttcgtgtggtgaagaagctagaagaatccggaatgctggattgtcttcagttgctgcattttcatatcggatctcaaatcccttcgacggctttgcttgctgatggcgttggtgaggctgcccagatttactgtgaattagtccgcctcggtgctggcatgaaatacattgattgtggtggtggccttggaattgactatgatggtacaaaatcatgtgattccgattgttctgttggatatggccttcaggaatatgcatctacggttgttcaagctgttcgatttgtttgtgaccggaagaacgtgaaacatccggtgatctgtagcgagagtgggagagcaattgtatctcatcactctgttctgatatttgaggctgtgtcttcaactacaacacgctcacaagagttatcttctgttgatctccagtcatttgtggagaagctcaatgatgatgctcgtgctgattatcggaatttatctgctgctgctattcgtggagagtacgatacgtgtgtactttatgctgatcagttgaaacagagatgtgtggagcagttcaaagatggtgatttggacattgaacaacttgctgcagtagatggcatttgtgatttcgtgtcgaaggctattggggcttctgatcctgtccgcacataccatgtgaatctttcgatcttcacttcagttcctgatttttgggcaattgaccaactattcccaattgttcccatccataagctagatgaacggcctgtagttcgaggaattttatcggacttgacctgtgatagtgatgggaagattgataagttcattggaggagagtcaagcttgccgctccatgaattaggaagtaatggtggtggtggtggtgatggtggaaaatattatctaggaatgtttttgggtggggcttatgaggaggcgcttgggggactccataacctatttggcggacccagcgttttgcgtgtgtcacagagcgatagcccacacagcttcgccgtgacatgtgctgttcctggtccgtcctgtgctgacgttctccgggcgatgcagcacgagcctgaactcatgttcgagacgctcaagcaccgcgctgaagaattcgtgcacaatgacgacgaacaagaagaagataaagggcttgcatttgcatctttggccagcagcttagctcagtcattcaacaatatgccttaccttgttactaattcatcttgctgccttactgctgctgccaataacggtggctattactattgcaatgatgagaacattgttggagttggcgcagaatctgctgcagctgaagaagagctttggccttactgtgttgcatgaagtatcttggaacatttccagtttccaccattgttgttccttttttgtttcaataaagtggcaatttagtttgtcgttgaggtcgtctgtttcgttaattatgtcatagtttaagtcattttttggtttaattttctgttgttggacgccagaaattgtggagaaaccaaggactatgtaatctcccccgtcttattaaatgcatttacttttgttacaaaaaaaaaa

SEQ ID NO: 58419 - protein, 733 aa, Nicotiana tabacum
MPALGCCVDAAVSPPPGYSFLGDSSLPAPEIFPSGVPPSTNTAVATTTTTHWSPAHSSALYSIDGWGAPYFTVNSSGDISVKPHGTDTLPHQEIDLLKVVKKASDPKNLGGLGLQFPLVVRFPDILKNRLESLQSVFDYAVQSQGYEAHYQGVYPVKCNQDRFVVEDIVKFGSGFRFGLEAGSKPELLLAMSCLCKGSHEGLLVCNGFKDAEYISLALVARKLMLNTVIVLEQEEELDLVIDISKKMAVRPVIGLRAKLRTKHSGHFGSTSGEKGKFGLTTTQIVRVVKKLEESGMLDCLQLLHFHIGSQIPSTALLADGVGEAAQIYCELVRLGAGMKYIDCGGGLGIDYDGTKSCDSDCSVGYGLQEYASTVVQAVRFVCDRKNVKHPVICSESGRAIVSHHSVLIFEAVSSTTTRSQELSSVDLQSFVEKLNDDARADYRNLSAAAIRGEYDTCVLYADQLKQRCVEQFKDGDLDIEQLAAVDGICDFVSKAIGASDPVRTYHVNLSIFTSVPDFWAIDQLFPIVPIHKLDERPVVRGILSDLTCDSDGKIDKFIGGESSLPLHELGSNGGGGGDGGKYYLGMFLGGAYEEALGGLHNLFGGPSVLRVSQSDSPHSFAVTCAVPGPSCADVLRAMQHEPELMFETLKHRAEEFVHNDDEQEEDKGLAFASLASSLAQSFNNMPYLVTNSSCCLTAAANNGGYYYCNDENIVGVGAESAAAEEELWPYCVA

SEQ ID NO: 58420 - DNA, 2903 bp, Cucumis sativus
  CDS (588)..(2741)
acgcgggggctcattctaacctcgtttaaacgcattccgtcgtctccgacggctctacatttctctccgcgttttctccgttaggtttccgtttcttccttcttctttttctccgcctcttttgcccggataattctcctttccattcattcccgattcctctttgttttcttttcttttttttttttgtttttggaccgaaattcttaatcccgttctttgaattcgtttccagatctgcatgggaagaacagtttcggtgtttaaggctttgattggtgtgtgttttaatttcattttttgtttcttcgttcttgtgaaattcttcttctgaccggatcgcggtgggatattgcaagtgtataggtgatcgtggtaaatttggcggtggaaatagctactctttctgcttcttttggggggggtagccggggcctcggcctcggcgggttttaaagcccccacttgcacaaaactctgaaacttccattactttttcttaacaacttctctaactacgactctcttctttctttaatttttccattttcttctttttattcatttcttgatccgtcgtcggagagatgccggccctagcttattgcgtagacgctgctgtagctcctcctcctggctacgtttttgctggggatagctctcttccgtcgtcggttttattttccggcggacctccggagactaccatcttttcctctcctgactctcctcccacctctgaaaacatgtcatggtctcctcctctttcgtcctctctttacaagattgatgggtggggtgctccttatttctctgttaatggttctgggaatatggctgttcgtccttatgggacagctactttaccccatcagaagattgatttgcttaaaattgtgaagaaggcttcagatccgatttgttctggtggtcttggcttgcagcttcctcttattgtgagatttcccgatgtgcttaagaatcgtcttgagtctcttcagtctgcatttgattatgctattcaatctcaaggatatggttctcattaccagggtgtttatcccgttaaatgtaaccaggataggtttgttgttgaagatattgtgaaattcggatcttctttccgttttgggcttgaagctgggtcgaaaccagagcttcttctggcaatgagctgtttgtgtaaagggaattcagatgcctttttggtgtgtaatggtttcaaggatgcggagtacatttctttggcgcttattgccaggaagcttgctttgaacacggtgattgttattgaacaagaggaagaaattgatttggttattgatttgagcaagaggctgtttgttcgtcctgtggttggtatgcgcgcgaagctgagaaccaaacattctggacattttgggtccacctctggcgagaaaggaaagtttggtcttacgactacccagatccttcgggtggttcggaagcttgaacaggctgatatgcttgattgccttcaattgctacattttcacattggatcccagatcccttctacagctttgctcgctgatggcgttggcgaggctgctcagatctattgcgaattggtccgtctcggtgccaacatgcgtgttattgacattggaggtggtctgggtattgactatgacgggtcgaagtcttcggactctgagttatctgttgcttatggactcgaagagtatgctgctgcggttgttgatgcagtccgctgtgtatgcgactgtcggtccgtgaagcacccaataatttgcagtgaaagtggccgagcaatcgtctctcgtcattccgttttgatatttgaggctgtctctgctagcagctatgaggtcccatccatgagctcacttgaacttcagtatcttgtcgatgggctaaccgatgaggctcgtgtagattatcagaacctttcggctgcagcttatatgggtgagtataaaacatgcttggtgtatgcagatcaactgaaacaacgatgcgttgagaaattcaaggatgggtgtttgggaatggaacaactagctgctgtagatggactttgcgctcttgttgccaaggctgttggagagttggactctgttagaacctaccatgtgaacctctctattttcacgtcaattcctgatttctggggtatcgaccagctgtttccaattgtccccattcatcgtcttgatcagagaccaaccgtgagaggcgtgctgtctgatcttacctgtgacagtgatggtaagattgataagtttattggtggtgagtcgagtttgccgttgcatgagctggaaggcaatggcagtttgtcaggtggaggaggtgggcgatactatcttgggatgtttctgggcggggcttatgaggaggctctcggtggtgttcacaacctgtttggtggcccgagtgtgattcgggtgatgcagagtgatggaccgcatagctttgcggtgactcgcactgtgcctggcccatcatgtggggatgtcctccgagtgatgcagcacgagcccgaactcatgtttgagaccctcaagcaccgagctgaagagtttggacaggaggatgacgatggtggtgagggcatagctaatagcttggccatgtcctttcgcaatatgccttatttggcgagtgcgtcttcctgctgcagtgagactgattacaatggtgctgtggattctggtgctggcgatgccgagcaatggacttactgttatgcttgacaaagtttgttaagatttaggcgtcctccagccatccctaattagctattgcatttcttctctagtaggtctgtttttgttgtccttatgggtccgtcgatgtatttccattaatttcccttttctatattttgcaaaaaaaagaaaaaaaaaaaaaaaaaa

SEQ ID NO: 58421 - protein, 717 aa, Cucumis sativus
MPALAYCVDAAVAPPPGYVFAGDSSLPSSVLFSGGPPETTIFSSPDSPPTSENMSWSPPLSSSLYKIDGWGAPYFSVNGSGNMAVRPYGTATLPHQKIDLLKIVKKASDPICSGGLGLQLPLIVRFPDVLKNRLESLQSAFDYAIQSQGYGSHYQGVYPVKCNQDRFVVEDIVKFGSSFRFGLEAGSKPELLLAMSCLCKGNSDAFLVCNGFKDAEYISLALIARKLALNTVIVIEQEEEIDLVIDLSKRLFVRPVVGMRAKLRTKHSGHFGSTSGEKGKFGLTTTQILRVVRKLEQADMLDCLQLLHFHIGSQIPSTALLADGVGEAAQIYCELVRLGANMRVIDIGGGLGIDYDGSKSSDSELSVAYGLEEYAAAVVDAVRCVCDCRSVKHPIICSESGRAIVSRHSVLIFEAVSASSYEVPSMSSLELQYLVDGLTDEARVDYQNLSAAAYMGEYKTCLVYADQLKQRCVEKFKDGCLGMEQLAAVDGLCALVAKAVGELDSVRTYHVNLSIFTSIPDFWGIDQLFPIVPIHRLDQRPTVRGVLSDLTCDSDGKIDKFIGGESSLPLHELEGNGSLSGGGGGRYYLGMFLGGAYEEALGGVHNLFGGPSVIRVMQSDGPHSFAVTRTVPGPSCGDVLRVMQHEPELMFETLKHRAEEFGQEDDDGGEGIANSLAMSFRNMPYLASASSCCSETDYNGAVDSGAGDAEQWTYCYA

SEQ ID NO: 58422 - DNA, 2806 bp, Arabidopsis thaliana
  CDS (520)..(2655)
acgccttctcttcttcttcttcttcatttccgtcttttccgctaggtttccgtctctgttttttcttgcattttccccagaattccttcacattctctccttttcctctttttaattcctcaccacctcaaattcttcataaacaaatccacttctgcatggttgggagaatctgttagagaatttttgttgttgttgggttcagatttggaaaatttcctttttttcgagtttcttctgaattattcatcgtggagattctcggatcgggaagggctgcgagaggtggttttcacggcggggatagattcatcttctgtcttctcctgagggggtagccgaggctccggcctcggcggtttttaaacccctacctttacaaattctgggaaattagaaaaaaaaaggtttgatttttcagtttttgctctgttcttctctcgaaagtttttgttttgttcgagaatttctgtaaagtgagattgttgatcgtttgctgataagagggtgaagataaagatgcctgctttagcttgcgttgatacgtcctttgtacctcctgcctacgccttctccgacaccgccggtgatgtttttatcccggcgtcatcaccaacttccgccgccgttgttgttgaccgttggtctccgtcgctctcatcgtctctctatcgaatcgatggatggggagccccttatttcatagccaattcgtctggtaacatctctgttcgtcctcatggctctgaaactttgcctcaccaagacatcgatttgctcaaaatcgttaagaaggtgacgggtccgaaatcttccggtggtttaggattgcagcttccgttgatcgttcgtttccctgatgtgttgaagaaccgtctcgagtgtcttcaatctgcgtttgattacgcgattaaaagtcaaggatatgattctcattaccaaggtgtttatccggtgaaatgtaaccaagatcgattcgttgttgaagatattgtcaagtttggatcttcgtttcgatttggattagaagctggttctaaacctgagatccttcttgctatgagctgcttgtgtaaaggtagccctgatgcctttcttgtgtgcaatggattcaaagatgctgagtatatatcattggctctgcttgggagaaaactggcgttgaatactgtgattgtgcttgagcaagaagaagagcttgatctggttattgagctgagccagaagatgaatgtgaggcctgtcattgggttaagggctaagctgaggactaagcattcgggtcatttcggatcaacttctggtgaaaagggtaaatttggattgactactactcagattgttcgtgtggtgaggaagctgcgtcaatctggtatgcttgattgtctccagcttctgcattttcatattggttcacagattccgtcgacttcgttgctctctgatggtgtcgccgaggctgctcagctttactgtgaacttgtgcgtcttggtgcacatatgaaagttattgatatcggtggtggtttggggattgactacgacgggtctaaatctggagaatcggatctctctgttgcttatagtctcgaggagtatgctgaagcgtttgtagcttctgttcgggttgtgtgtgaccggagctcagtgaaacatccggtgatatgcagcgaaagcggtagagcgatagtctctcatcattctgtgctgatctttgaagctgtttcagcagataaaccaatggttcatcaagcaactcccggcgatattcagttcctgcttgaaggtaatgaggaagctcgagccaattatgaggatctttatgctgctgtgatgcgtggagaccacgaaagctgccttctttatgtcgatcagctgaagcagaggtgtgttgaaggttacaaagaaggtgttttgagcatcgagcagttagcttctgttgatggtttatgcgagtgggtgttgaaggctataggcgcatcggatccggttcatacttacaatatcaatctatcagttttcacttcgattcctgatctctgggggattgatcagctgttccctatagttcctatccataagctcgatcaaaggcccggggctcgcggaatcctttcagatttaacgtgtgatagtgacgggaagatcaacaagttcataggcggtgaatccagcttgccgttgcacgagctggacaagaatggcagtggaggaaggtactttttgggtatgttccttggaggggcttacgaggaggctctcggtggagtccacaatctgtttggtggaccaagcgttgtccgggtctcccagagcgatggaccacacagctttgcagtgacccgagcggtgcctggtcagtcctcagcggatgttctccgagcaatgcagcatgagccggagctaatgtttcagaccctaaagcaccgagcagaggaaatgatgcataccaaaggtggtagcgaaggtgaaaatgaagaggaagaagaagatgatgagttcaacaatgtggcggcttctctcgaccgttcgttccacaacatgccgtatcttgcaactgagcaggcatcgccaagtaactctctttcagctgcgatcagtaaccttgggttttactactgcgacgaagacgtctacgattacatctctgcgtgagaaaaggtggtcgtcgtgtggtttgttgttgcattatattatcgtaaaatcgtcattgtacgatttctttaaataaaagttattaaataagaacatgatgagatccatgatccatcgttgtttaaggttttaaagaaaaaaaaaaaaaaaa

SEQ ID NO: 58423 - protein, 711 aa, Arabidopsis thaliana
MPALACVDTSFVPPAYAFSDTAGDVFIPASSPTSAAVVVDRWSPSLSSSLYRIDGWGAPYFIANSSGNISVRPHGSETLPHQDIDLLKIVKKVTGPKSSGGLGLQLPLIVRFPDVLKNRLECLQSAFDYAIKSQGYDSHYQGVYPVKCNQDRFVVEDIVKFGSSFRFGLEAGSKPEILLAMSCLCKGSPDAFLVCNGFKDAEYISLALLGRKLALNTVIVLEQEEELDLVIELSQKMNVRPVIGLRAKLRTKHSGHFGSTSGEKGKFGLTTTQIVRVVRKLRQSGMLDCLQLLHFHIGSQIPSTSLLSDGVAEAAQLYCELVRLGAHMKVIDIGGGLGIDYDGSKSGESDLSVAYSLEEYAEAFVASVRVVCDRSSVKHPVICSESGRAIVSHHSVLIFEAVSADKPMVHQATPGDIQFLLEGNEEARANYEDLYAAVMRGDHESCLLYVDQLKQRCVEGYKEGVLSIEQLASVDGLCEWVLKAIGASDPVHTYNINLSVFTSIPDLWGIDQLFPIVPIHKLDQRPGARGILSDLTCDSDGKINKFIGGESSLPLHELDKNGSGGRYFLGMFLGGAYEEALGGVHNLFGGPSVVRVSQSDGPHSFAVTRAVPGQSSADVLRAMQHEPELMFQTLKHRAEEMMHTKGGSEGENEEEEEDDEFNNVAASLDRSFHNMPYLATEQASPSNSLSAAISNLGFYYCDEDVYDYISA

SEQ ID NO: 58424 - DNA, 2695 bp, Nicotiana tabacum
  CDS (432)..(2594)
ttcacgttctcttctcaattcccataaaagaaacccttccgttaggtttccgtcctattttctcttcttctacgcttcctcttctgatatcaatatctgtatggtgtttttcttgttcgaattttagatttgttttgcctttaatacctgtaaccttataattctctgtttaaaccaaaaacttagcttcttctgaagtcagggtggggatatttggatcgtgtaagagtgtgttagaaggtgattatcttttgattcagttccttttttgcttcttttgagggggtagccggggcctcggcctcggcgggttttaatagcccccatctattacaaccattgggcaaaaacatcattaaatctgtacaaagcaaacccttaatttagtttaattttctgtattctttgattctttaacagaagaagaagagatgccggccctaggttgttgcgtagacgctactgtttcccctcctctcggctatgccttctctcgggatagctctcttcccgcgccggagttctttacctccggcgtacctcctacaaactccgccgccggttccattgggtctccggatctgtcctctgctttgtacggggtcgatgggtggggagctccttatttctccgttaactctaacggagatatctccgtccgaccacatggtacggacacactcccccaccaggaaattgaccttctcaaggtcgtgaaaaaggcctccgacccgaaaaattcaggggggctcgggcttcagctgcctcttgttgttcgcttccctgatgtgctaaaaaaccggttggaatctctgcaatcggcttttgatctcgctgttcattcccagggctatggggcccactaccaaggtgtttatcccgtgaaatgcaatcaagacaggttcgtggtggaagatattgtcaaattcgggtcgtcattccggttcgggttggaagctgggtctaaacccgagctcctgttagccatgagctgtctctgcaggggcagtgctgagggccttctcgtttgcaatggtttcaaggacgctgagtacatttcgcttgctttggttgcaagaaagctcatgttaaacactgtaattgttcttgaacaagaggaggagcttgaccttgtgattgatataagccgtaagatggctgttcggcccgtaattggacttcgggctaagctcaggaccaagcattcaggccattttggatccacttctggagaaaaaggtaagtttgggcttacaacgacccaaattgttcgtgtagtgaagaagctggaagaatccggaatgctggattgccttcagttgctgcattttcacattggatctcagatcccttcaacggcgttgcttgctgatggtgttggtgaggctgctcagatttattgtgaattaatccgtcttggtgcgggtatgaagttcattgatactggaggtgggctcggaattgattatgatggtactaaatcatgtgattcagatgtctctgttggctatggcattcaagaatacgcctccacagttgtccaggcggttcaatatgtttgcgaccgtaagggcgtgaagcacccagtgatttgcagcgaaagtggcagggcaattgtttctcatcactcaattctgattttcgaagccgtgtctgcttctagtcactcatgttcttcttcacatctgtcttctggtggcctccaatccatggcggagacgctcaatgaagatgcccttgctgattaccgcaatttatctgctgctgcagttcgtggagagtacgagacgtgtgtactttactctgatcagttgaaacagagatgtgtggatcagtttaaagaagggtccttgggtattgaacatcttgctgctgttgatagcatctgtgattttgtatcaaaggctatgggggctgctgatcctatccgcacttaccatgtgaatctgtcaattttcacttcaattcctgatttttgggcctttggtcaattgtttccgattgttccaatacaccgtttagatgaaaagcctgcagtaaggggaatattatcggacttgacttgtgacagtgatgggaaggttgataagttcattggtggcgaatcaagcttgcagctgcatgaattgggaagtaatggcgatggtggtgggtattatctggggatgtttttgggtggggcttatgaggaggcgctcggaggactccacaacctgtttggtggaccaagcgtggtgcgcgtggtgcagagcgatagcgctcacagcttcgccatgtctcgctccgtccctggcccgtcctgcgcggacgtgctccgagcgatgcagcacgagcccgagctcatgttcgagactctcaagcaccgtgcggaggaattcttggaacaagaagaagacaaagggctggccattgcatctttggccagcagcttagctcagtccttccataacatgccttaccttgtggcgcctgcatcttgctgcttcactgcagttactgctaacaacggtggctataactactattacagtgatgagaatgcagcagattctgctacaggggaggatgagatttggtcctattgcactgcttgaagtgttgtcgtagcatctccagttttagtttgtcgtcgaagttgtctgtttttgaataatacccttagttggtgatgtttttctaaaaaaaaaaaaaaaaa

SEQ ID NO: 58425 - protein, 720 aa, Nicotiana tabacum
MPALGCCVDATVSPPLGYAFSRDSSLPAPEFFTSGVPPTNSAAGSIGSPDLSSALYGVDGWGAPYFSVNSNGDISVRPHGTDTLPHQEIDLLKVVKKASDPKNSGGLGLQLPLVVRFPDVLKNRLESLQSAFDLAVHSQGYGAHYQGVYPVKCNQDRFVVEDIVKFGSSFRFGLEAGSKPELLLAMSCLCRGSAEGLLVCNGFKDAEYISLALVARKLMLNTVIVLEQEEELDLVIDISRKMAVRPVIGLRAKLRTKHSGHFGSTSGEKGKFGLTTTQIVRVVKKLEESGMLDCLQLLHFHIGSQIPSTALLADGVGEAAQIYCELIRLGAGMKFIDTGGGLGIDYDGTKSCDSDVSVGYGIQEYASTVVQAVQYVCDRKGVKHPVICSESGRAIVSHHSILIFEAVSASSHSCSSSHLSSGGLQSMAETLNEDALADYRNLSAAAVRGEYETCVLYSDQLKQRCVDQFKEGSLGIEHLAAVDSICDFVSKAMGAADPIRTYHVNLSIFTSIPDFWAFGQLFPIVPIHRLDEKPAVRGILSDLTCDSDGKVDKFIGGESSLQLHELGSNGDGGGYYLGMFLGGAYEEALGGLHNLFGGPSVVRVVQSDSAHSFAMSRSVPGPSCADVLRAMQHEPELMFETLKHRAEEFLEQEEDKGLAIASLASSLAQSFHNMPYLVAPASCCFTAVTANNGGYNYYYSDENAADSATGEDEIWSYCTA

SEQ ID NO: 58426 - DNA, 2649 bp, Brassica juncea
  CDS (386)..(2428)
tttccgctctgtttctctttgcattttccccgagaaacttcacattctcgtcccccttctctccatataaatccattatctctctctctgcatggtcggggaatagaatctgttgtttctcaaattcgtaaaaaaaaaaccctttttttttaaattaaagtctccacctttcttctgaaacattcaccgtggagattctcggatcaggccgcgctgctcgtggtgggtttcacggcggcgacagatacatcttctgccttctcctgagggggtagccgaggctccggcctcggcggttttcaaaccccttaccttcacaaaatctggtaatcaaaaaaatcaaacctttcgaatagattcgtcaaaaacagagtattgaatcaagatgcctgctttagcttgcgtcgacacctacaccaccgacgtgttcatcccaccgtcaccacagccttcctccaccgccgccgtcgtcgacacgtggagcccctctctctcctcctctctctaccgcatcgacggatggggagctccttacttctccgccaactcctccggcaacatctccgttcgccctcacggctccaacactctccctcatcaagacatcgatctgttgaaactcgtcaagaaagtaacagatccgaaacaaaccggcggtttaggattacacctcccggttatcgtccggttccctgacgttcttaaaaaccgcctcgagtgtctccaatccgcgttcgatttcgcggtacagagccaagggtacgagtctcattaccaaggagtgtacccggtgaaatgcaatcaagaccggttcgtcgtggaggacattgtgagattcggatctcaattccggttcggtttagaagctggctctaaaccggagatcctcctcgctatgagttgtttatgtaaaggcaacaacgaagcctttcttatatgtaacggcttcaaagacgctgagtatgtctcgctagctctgttgggaaggaagctagcgttgaacactgtgattgtgttggagcaagaagaggagcttgatcttggtatcgatcttagccacaagatgaacgtgaggcctgtgattggtttacgagccaagcttaggactaaacactctggtcacttcggttcaacttcgggtgagaaggggaagttcggtttgaccactactcagatagttcgtgtcgtgaggaagcttgtatgcttgactgtctccagctttttgcatttccacatcggctcgcagatcccatccacttcgttgctatctgatggtgtctcagaagctgctcagctctactgtgagcttgtccgtctcggcgcgaacatgaaggttatagacattggtggcgggttggggattgactacgacgggtctaagtccggagagagtgatctctctgtggcttatactctcgaggagtatgccgaagctgttgtagcttctgttaggtttgtttgtgagaggagatcagtgaagcatcctgtgatatgtagtgaaagcggaagagctatcgtctctcatcactcagtgttgatctttgaagctgtctcaacggttaaacatcaagctgatcatgatgatattcagtttttgctcgaaggtgatgattacgaggagctgtactctgctgtgatgcgtggggatcaagaaaggtgtttactttatgtggaaaagctgaagcagagatgtgttgaaggttttaaagacggtgttttgagcattgagcagttagcttctgttgatgggttatgcgaatgggttttaaaggctattggcgggtcggatccggttcagacttacaatatcaacctctcggtttttacctcggttcctgatctttgggggattgagcagctgtttcctatagtccccatccataagctcgaccagaggccggggactcgtggcgtcttgtcggatttgacgtgtgatagtgacgggaagattgataagttcataggcggcgagtccaccttgccgttgcatgagctggagagtggtggtgggaggtacttcttggggatgtttcttggaggggcttacgaggaggcgctcggtggagtgcataatttgtttggtgggccgagtgttgtgcgtgtcttgcagagtgatgggcctcatagctttgctgtgactagagccgtgccggggcagtcctctgctgatgttcttaggggaatgcagcatgagccggagatgatgtttgagacgttgaagcaccgagcagaggaagtgatgcatagaaaaggtggtgaaggagaagatgatgatgaaggggagttttgtaatgtggcggcttgtcttgatcgttcgttccacaacatgccgtatctagcgaccgaggaggtattgtctatgagtaactctctttcggatgcggtcagtaaccttggcttttactactgcgatgaagacgggttttgactacctctctgcatgaggaaaggtggtcgtgtggtttgctgttgttgcattcttgtattgtcgtaatgtttctttttaataaagtagtaaaataatcacaatgatgagattcatcgttgtttaatgtttttaattagaggatccgatgatgaaagtcttttgtgaaattcggatctttgtaatgttatttgatgtttgaaatgtaacgttcttgtttcaaa

SEQ ID NO: 58427 - protein, 680 aa, Brassica juncea
MPALACVDTYTTDVFIPPSPQPSSTAAVVDTWSPSLSSSLYRIDGWGAPYFSANSSGNISVRPHGSNTLPHQDIDLLKLVKKVTDPKQTGGLGLHLPVIVRFPDVLKNRLECLQSAFDFAVQSQGYESHYQGVYPVKCNQDRFVVEDIVRFGSQFRFGLEAGSKPEILLAMSCLCKGNNEAFLICNGFKDAEYVSLALLGRKLALNTVIVLEQEEELDLGIDLSHKMNVRPVIGLRAKLRTKHSGHFGSTSGEKGKFGLTTTQIVRVVRKLVCLTVSSFLHFHIGSQIPSTSLLSDGVSEAAQLYCELVRLGANMKVIDIGGGLGIDYDGSKSGESDLSVAYTLEEYAEAVVASVRFVCERRSVKHPVICSESGRAIVSHHSVLIFEAVSTVKHQADHDDIQFLLEGDDYEELYSAVMRGDQERCLLYVEKLKQRCVEGFKDGVLSIEQLASVDGLCEWVLKAIGGSDPVQTYNINLSVFTSVPDLWGIEQLFPIVPIHKLDQRPGTRGVLSDLTCDSDGKIDKFIGGESTLPLHELESGGGRYFLGMFLGGAYEEALGGVHNLFGGPSVVRVLQSDGPHSFAVTRAVPGQSSADVLRGMQHEPEMMFETLKHRAEEVMHRKGGEGEDDDEGEFCNVAACLDRSFHNMPYLATEEVLSMSNSLSDAVSNLGFYYCDEDGF

SEQ ID NO: 58428 - DNA, 2651 bp, Brassica juncea
  CDS (335)..(2413)
ctattatcttccgcattcaccggagaaactttcacattctcttccttcctcgtaaaaattagatctgcatgataaggcaataaaacttgttgttgatttcctctttcggttcattctcaccacaatttttcaagttttctcctgaacattcaccgtggagattctggcatcgggtcggggtgcgagaggtgggtttcacggcggagacagatccatcttcccccttcttctgaggggatagccgaggctccggcctcggcgggtttcaagcccctaccttcacaaaatccagattcaaaagttttttttcttctctcctccttgttgaacaaggatgcctgctctagctctcgtcgacaccaccgccttcgcgccaccaccgtcaacaccaacctcggccgccgtcgttgacacctcttgccgttggaactcctctctctcctcctctctttaccggatcgacggatggggagctccttacttcgccgccaacacctccggcaacatctccgtacgtcctcacggatccgtcactctgcctcaccaagacatcgatctgttgaaagttgttaagaaggtgacagatcctaagccgttaggcggtttgggattacagctcccggttatcgtccggttccccgacgtgttaaaaaaccgcctcgagtgtctccagtccgcgttcgatctcgcggtccagagccaggggtacggttctcattaccagggagtgtatccggttaagtgcaaccaagaccgatttatcgtggaggacattgtgaaattcggatctggtttccggttcggtttggaagctggttctaaaccggagatcctcctcgctatgagctgcttgagtaaaggtaaccgcgaggcttttcttgtgtgtaacggttttaaagacgttgagtatatttctctggctctgctcgggaggaagcttgctttgaacactgtgattgtgttagagcaagaagaggagctcgatctcgttattgatctgagtcggaagatgaacgtgaggcctgtgattgggttacgagctaagcttaggaccaaacactctggtcatttcggatcaacgtctggagaaaaaggcaagttcggtttaacgactggtcagattgttcgtgtcgtgaggaggcttagggagtcttgtatgcttgattgtctccagcttctgcattttcacatcggctcgcagattccgtcgacggccttgctctctgacggtgtcggggaagctgctcagctttactgtgagctcgtgcgtctcggtgcggatatgaaggttatcgacgttggtggtggtttggggattgactatgacgggtctaagtctggggagtctgatctctctgttggttatactctcgaggagtatgctgaagctgttgtagcttctgttcggtctgtttgtgaccggagatcggtgaagcatccggtgatatgcagtgagagcggaagagcgatagtctctcatcattcagtgttgatcttcgaggctgtttccgcggctaagccaatggctcaggttgatcaagtgatgcatgatgatattcagttcctgcttgaatccgaggaggctagagctaattacgaggatctatacgctgcggtgatgcgtggagaccaagaaagctgcctcctttacgtagacaagctgaagcagagatgtgttgacggtttcaaagacggtgttttgagcatcgagcagttagcttctgtggatgggttatgtgagtgggtgttgaaagctataggcgcatctgatccggttcagacttacaatatcaacctatcagttttcacgtcgattcctgatctctgggggattgatcagctgtttcctatagttcctatccataagctcgaccaaaggcccggggctcgtggggtcttgtccgatttaacgtgtgacagcgatgggaagattgataagttcataggcggcgagtccagcttgcctttgcacgagctagacggtggtggaggaaagtactttttgggtatgtttctcggaggggcttatgaggaggcgctaggtggagtccacaatttatttggagggccaagcgttgtccgggtctctcagagtgatgggccacatacctttgcagtgacccgagccgtccctggccagtcctccgcagatgttctccgcgcggtgcagcatgagcctgagataatgtttcagaatctgaagcaccgagctgagaagttgatgcatgccaaaggtggtggcgaagatgaagatggtgaggaattgaacaacgttgtggcttgtcttgatcgttccttcaacaacatgccttatctcgcgactgagcaggcatctatgagcaactctctttcagctgcgattcgtaaccttgccttttattacagcgacgaagacgactacctttccgcgtgacaaaggttgtcctgtttgttgttgcatttatgtttatcataaatcgtcatcgtacgatgtcttagtttcttttaatgacttctaaaataataatcatatggagagatccattgttgtttggggttttagtttgaggatccgaatgataaaatcacttttgtgaaattcggatctttgtatcttatttcatttttttaattaaataaaagaccattttatgaaaaaaaaaaaaaaaaaa

SEQ ID NO: 58429 - protein, 692 aa, Brassica juncea
MPALALVDTTAFAPPPSTPTSAAVVDTSCRWNSSLSSSLYRIDGWGAPYFAANTSGNISVRPHGSVTLPHQDIDLLKVVKKVTDPKPLGGLGLQLPVIVRFPDVLKNRLECLQSAFDLAVQSQGYGSHYQGVYPVKCNQDRFIVEDIVKFGSGFRFGLEAGSKPEILLAMSCLSKGNREAFLVCNGFKDVEYISLALLGRKLALNTVIVLEQEEELDLVIDLSRKMNVRPVIGLRAKLRTKHSGHFGSTSGEKGKFGLTTGQIVRVVRRLRESCMLDCLQLLHFHIGSQIPSTALLSDGVGEAAQLYCELVRLGADMKVIDVGGGLGIDYDGSKSGESDLSVGYTLEEYAEAVVASVRSVCDRRSVKHPVICSESGRAIVSHHSVLIFEAVSAAKPMAQVDQVMHDDIQFLLESEEARANYEDLYAAVMRGDQESCLLYVDKLKQRCVDGFKDGVLSIEQLASVDGLCEWVLKAIGASDPVQTYNINLSVFTSIPDLWGIDQLFPIVPIHKLDQRPGARGVLSDLTCDSDGKIDKFIGGESSLPLHELDGGGGKYFLGMFLGGAYEEALGGVHNLFGGPSVVRVSQSDGPHTFAVTRAVPGQSSADVLRAVQHEPEIMFQNLKHRAEKLMHAKGGGEDEDGEELNNVVACLDRSFNNMPYLATEQASMSNSLSAAIRNLAFYYSDEDDYLSA

SEQ ID NO: 58430 - DNA, 2166 bp, Nicotiana tabacum
  CDS (1)..(2166)
atgccggccctaggttgttgtgtagatgctgctgttgtttcccctcctctcagctatgccttctctcgggatagctctcttcccgcgccggagttctttgcctccggcgtacctccgacaaattctgccgctgcttccattgggtctccggatttgtcgtctgctttatacggggtcgatgggtggggagctccttatttctctgttaactctaatggagatatctccgtccgaccacacggtacggacactctccctcaccaggaaattgaccttctcaaggtcgtgaaaaaggcctccgacccgaaaaattcaggtgggcttgggcttcagctgcctcttgttgttcgcttccctgatgtgttgaaaaaccggttggaatctctgcaatcggcttttgatctcgcggttcattcccagggctatggggcccactaccaaggtgtttatcccgtgaaatgcaatcaagacaggttcgtggtggaagatatcgtgaaattcgggtcgccattccggttcgggttggaagccgggtctaaacccgagctcctgttagccatgagctgtctctgcaagggcagtgctgagggccttctcgtttgcaatggtttcaaggacgctgagtacatttcgcttgctttggttgcaagaaagctcatgttaaacactgtaattgtgcttgaacaagaggaggagcttgaccttgtgattgatataagccataagatggctgttcggcctgtaattggacttcgggctaagctcaggaccaagcattcaggccattttggatccacttctggagaaaaaggtaagtttgggcttacaacgacccaaattgttcgtgtggtgaagaagctagaagaatccggaatgctggattgtcttcagttgctgcattttcacattggatctcagatcccttctacggggttgctagctgatggagttggtgaggccgctcagatttattgtgaattagtccgtcttggagcgggtatgaagttcattgatattggaggtgggcttggaattgattatgatggtactaaatcatgcgattctgatgtctctgttggctatggcattcaagaatatgcctccgcagttgttcaggcggttcaatatgtatgcgaccgtaagggtgtgaaacacccagtgatctgcagcgaaagtggcagggcaattgtttctcatcactcaattctgattttcgaagccgtgtctgcttctagtcactcatgttcttcttcacatctgtcttctggtggcctccaatccatggcggagacgctcaacgaagatgcccttgctgattaccgcaatttatctgctgctgcagttcgtggagagtatgagacatgtgtactttactctgatcagttgaaacagagatgtgtggatcagtttaaagaagggtccttgggtattgaacatcttgctgctgttgatagcatctgtgattttgtatcaaaggctatgggggctgctgatcctgtccgcacttaccatgtgaatctgtcaattttcacttcaattcctgatttttgggcctttggtcaattgtttccgattgttccaattcaccgcttagatgaaaagcctgcagtgaggggaatattatcggacttaacttgtgacagtgatgggaaggttgataagttcattggtggcgaatcaagcttgccgctacatgaattgggaagtaatggcgatggtggtggttattatctggggatgtttttgggtggggcttatgaggaggcgctcggaggactccacaacctgtttggtggaccaagtgtcgtgcgcgtggtgcagagcgatagcgctcacagctttgccatgactcgctccgtccctggcccgtcttgcgctgatgtgctccgagcgatgcagcacgagcccgagctcatgttcgagactctcaagcaccgtgcggaggaattcttggaacaagaagatgacaaagggctggctgttgaatctttggccagcagcgtagctcagtccttccataacatgccttaccttgtggcgccttcatcttgccgcttcactgctgctactgataacaatggtggctataattactattacagtgatgagaatgcagcagattctgctacaggggaggatgagatttggtcctattgcactgcttga

SEQ ID NO: 58431 - protein, 721 aa, Nicotiana tabacum
MPALGCCVDAAVVSPPLSYAFSRDSSLPAPEFFASGVPPTNSAAASIGSPDLSSALYGVDGWGAPYFSVNSNGDISVRPHGTDTLPHQEIDLLKVVKKASDPKNSGGLGLQLPLVVRFPDVLKNRLESLQSAFDLAVHSQGYGAHYQGVYPVKCNQDRFVVEDIVKFGSPFRFGLEAGSKPELLLAMSCLCKGSAEGLLVCNGFKDAEYISLALVARKLMLNTVIVLEQEEELDLVIDISHKMAVRPVIGLRAKLRTKHSGHFGSTSGEKGKFGLTTTQIVRVVKKLEESGMLDCLQLLHFHIGSQIPSTGLLADGVGEAAQIYCELVRLGAGMKFIDIGGGLGIDYDGTKSCDSDVSVGYGIQEYASAVVQAVQYVCDRKGVKHPVICSESGRAIVSHHSILIFEAVSASSHSCSSSHLSSGGLQSMAETLNEDALADYRNLSAAAVRGEYETCVLYSDQLKQRCVDQFKEGSLGIEHLAAVDSICDFVSKAMGAADPVRTYHVNLSIFTSIPDFWAFGQLFPIVPIHRLDEKPAVRGILSDLTCDSDGKVDKFIGGESSLPLHELGSNGDGGGYYLGMFLGGAYEEALGGLHNLFGGPSVVRVVQSDSAHSFAMTRSVPGPSCADVLRAMQHEPELMFETLKHRAEEFLEQEDDKGLAVESLASSVAQSFHNMPYLVAPSSCRFTAATDNNGGYNYYYSDENAADSATGEDEIWSYCTA

SEQ ID NO: 58432 - DNA, 2916 bp, Datura stramonium
  CDS (433)..(2607)
agcgcaattcctataacagaaacccttccccgctaggtttccgtctacttctctcatcttctccgtttcctcttatatctgtatggtgttcttcttgttcgaattttagatttgttttgccttgtgttcctgtgacctttaattttttctgtttaaagcaagaaattagcttcttctgaagtcagggtggggatttttggatcgtgtaggagtgtgttagagggtgattatcttttgattcagttctttttttgcttcttttgagggggtagccggggcctcggcctcggcgggttttaatagcccccaactattacaacattgggcaaaagatcaatctgtacaaacccttaatttagctttttttttctttctctatctgtattctttgattctttcttcttcttgagaaatcaaacagatcgggaagagatgccggccttaggttgttgtgtagacgccgctgtttcccctcctcttggctatgccttctcttgggatagctctcttcccgcgccggagttcttttcctccggcgtacctccgtcgacaaacgaaaccgccgctcacaccgccggttcccattggtctccggatctgtcctctgctttgtacagagttgatgggtggggtgctccttatttctccattaattcctccggagatatctccgtccggccacatggtacggacactcttcctcaccaggagattgaccttctcaaggtcggtaagaaagcttctgacccgaaacatttgggcggtcttgggctccagctgcctcttgttgtccgtttccctgatgttctgaagaaccgtttggaatctttgcaatcggcttttgacatggcggttcattcccagggctatgaggctcattaccaaggcgtttatcctgtgaaatgcaatcaagacaggttcgtggtggaagatatcgtgaaattcggatcgccataccgattcgggttggaggccgggtctaaaccggagctcctgctggccatgagctgtctctccaaaggtagtgccgatgcccttcttgtttgcaacggtttcaaggacaccgagtatatttcgcttgctttggttgcaagaaagctccttttgaacactgtaattgtgcttgagcaagaggaggagcttgacctggtgattgatatcagccgtaagatggctgtccggcccgtaattggacttcgcgctaaactcaggaccaagcattcgggccattttggatccacttctggagaaaaaggtaagtttgggttgaccacaactcagattcttcgggtagtgaagaagctggatgagtctggtatgctggattgtcttcagttattgcattttcacattggatctcagatcccgtcaacggacttgcttgccgatggtgttggtgaggccactcagatttactctgaattagcccgtcttggagctggtatgaaatttattgatattggaggtgggcttggaattgactatgacggtactaaatcaagcgattctgatgtctctgtcggctatggcattgaagaatatgcctccgctgttgtccaagcggtccaatatgtctgtgaccgcaagggcgtaaagcatccagtgatttgcagtgaaagtggcagggcaattgtttctcaccactcaattctgattttggaagctgtgtctgcttctactggtcatgcttctccacagctttcttccggtggactccaatccttggcggagactctcaatgaagatgcccgtgctgactaccggaacttatctgccgccgcggtccgtggagaatatgatacatgtctcctgtactctgatcagttgaaacagagatgtgtggaacagttcaaagaagggtccttggatattgaacagcttgcggcagtggatagcatctgtgacttggtgtcaaaagccattggggttgctgatcctatccgcacgtaccatgtgaacctgtcagttttcacctcaattcctgatttttgggcctttggccaattgtttccgattgttccaattcaccgtttagatgaaaagcctgtaatgcgaggaattctatcggacctgacttgtgacagtgatgggaaggtagataagttcattgggggcgaatcaagcttacccctccatgaattgggaagtgatggtgggcggtattatctggggatgtttttgggtggggcttatgaggaggcgctcggaggactccacaacctgtttggtggaccaagcgtggtgcgcgtgttgcagagcgatagccctcacagcttcgccgtgactcgctctgtccctggtccatcctgtgctgacgtgctccgggcgatgcagtttgagcctgagctcatgttcgagactctcaagcaccgtgcagaggaatacttggaacaagaagaaaaagaagaagataaaagtatgagctttgcatctttgaccagcagcttagctcagtcgttccacaacatgccttaccttgtggcgccttcatcttgctgcttcactgcagccaccggcaataatggtggctattactattacagtgaggacaaggctgcagattgtgcaacaggggaggatgacatttggtcctattgcaccgcttgaagttgtctcgtagcatcaatcatcatctccagtttgttttagtttgtcgttgttgaggtcgtctgtttttcaataatccccttagttggtgatgtcatatttctttgtttactttctcgtttttaaaaaagtagcagtagaaagcagggggactcatctctattgcagcttgtgttattttgttgtgtaaaggagagtcgtggggagtgaccgaatcaatttgatgtatggttatgtaatgtaaatctcctcctccttatgtaatgcatttttttttagtatgaatgatggctatttgtcaaaaaaaaa

SEQ ID NO: 58433 - protein, 724 aa, Datura stramonium
MPALGCCVDAAVSPPLGYAFSWDSSLPAPEFFSSGVPPSTNETAAHTAGSHWSPDLSSALYRVDGWGAPYFSINSSGDISVRPHGTDTLPHQEIDLLKVGKKASDPKHLGGLGLQLPLVVRFPDVLKNRLESLQSAFDMAVHSQGYEAHYQGVYPVKCNQDRFVVEDIVKFGSPYRFGLEAGSKPELLLAMSCLSKGSADALLVCNGFKDTEYISLALVARKLLLNTVIVLEQEEELDLVIDISRKMAVRPVIGLRAKLRTKHSGHFGSTSGEKGKFGLTTTQILRVVKKLDESGMLDCLQLLHFHIGSQIPSTDLLADGVGEATQIYSELARLGAGMKFIDIGGGLGIDYDGTKSSDSDVSVGYGIEEYASAVVQAVQYVCDRKGVKHPVICSESGRAIVSHHSILILEAVSASTGHASPQLSSGGLQSLAETLNEDARADYRNLSAAAVRGEYDTCLLYSDQLKQRCVEQFKEGSLDIEQLAAVDSICDLVSKAIGVADPIRTYHVNLSVFTSIPDFWAFGQLFPIVPIHRLDEKPVMRGILSDLTCDSDGKVDKFIGGESSLPLHELGSDGGRYYLGMFLGGAYEEALGGLHNLFGGPSVVRVLQSDSPHSFAVTRSVPGPSCADVLRAMQFEPELMFETLKHRAEEYLEQEEKEEDKSMSFASLTSSLAQSFHNMPYLVAPSSCCFTAATGNNGGYYYYSEDKAADCATGEDDIWSYCTA

SEQ ID NO: 58434 - DNA, 2109 bp, Arabidopsis thaliana
  CDS (1)..(2109)
atgcctgctctagcttttgttgatactcccatcgataccttttccagtatctttacaccgtcgtctgtttccaccgccgttgttgacggttcctgccattggtctccgtccctctcctcctctctttaccgtatcgacggatggggagctccgtatttcgcagcgaattcctccgggaacatctctgttcgtcctcatggctcaaacactttacctcaccaagacatcgatctgatgaaagttgtgaagaaagttacagatccgagtggtttaggattacagcttccgcttattgttcgtttccctgatgttctgaagaatcgtcttgagtgtcttcaatccgcgtttgattacgcgattcagagtcaaggatatgattctcattaccaaggtgtgtatcctgtgaaatgtaatcaagatcggtttatcatcgaagatattgtcgaattcggatccggttttcgattcggtttagaagctggttccaagcctgagattcttcttgctatgagttgtttgtgtaaaggtaatcctgaagcttttcttgtgtgtaatggttttaaagactctgagtatatctcattggctttgtttgggaggaaacttgaattgaatactgttattgttcttgagcaagaagaagagcttgatttggttattgatttgagccagaagatgaatgttaggcctgttattgggttaagagctaagcttagaactaaacattctggtcattttggttctacttctggtgagaaggggaagtttggtttgactacggttcagattcttcgtgtggtgaggaagctgagtcaagttggtatgcttgattgtctccagcttctgcattttcacattggttcacagattccgtccacggctttgctttccgacggtgtggctgaggctgcgcagctttactgtgagcttgtccgtcttggtgctcatatgaaggtgattgatattggtggtgggttggggattgattacgacgggtctaaatcgggggagtcggatctctctgttgcttatagtctcgaggagtatgctgcagctgttgtggcttcggttaggtttgtttgtgatcagaagtctgtgaagcatccggtgatttgcagcgagagcggtcgagccattgtgtctcatcactcggtgttgatctttgaagctgtctcagctggtcaacaacatgagacccctactgatcatcagtttatgcttgaagggtactctgaggaagttcgaggtgattacgagaatctttatggtgctgctatgcgtggtgatcgtgaaagctgcttgctttatgttgatcagctgaagcagagatgtgttgaagggttcaaagaaggttccttgggcattgaacagttagctggtgttgatggattatgcgagtgggtgattaaggcgattggtgcatcggatccggttcttacttaccatgtcaatctatcggttttcacttcgattcctgatttctgggggattgatcagctgtttcctattgttccaatccataaacttgaccaaaggcctgccgcgagagggatcttatcggatttgacgtgtgacagcgacggaaagatcaacaagttcataggcggagaatcgagcttgccattgcacgagatggacaacaatggctgcagcggtgggcggtactatttgggaatgttcctaggtggagcttatgaggaagctctcggtggagtccacaatctgttcggtggaccaagcgtggttcgcgtattgcagagcgatggacctcacggattcgcagtgacccgtgctgtgatgggccaatcctctgcagatgtcctcagagcaatgcagcatgagcctgagctcatgtttcagactcttaaacaccgagccgaggagccgaggaacaacaacaacaaagcttgtggtgataaggggaacgacaaactagtagtcgcatcgtgtcttgctaagtcattcaacaacatgccttatctttccatggaaacgtcaacaaacgctctcaccgcagcggtcaataaccttggcgtttactactgcgatgaagctgcagctggtggcggcggcaagggcaaagatgagaattggtcttatttcggttga

SEQ ID NO: 58435 - protein, 702 aa, Arabidopsis thaliana
MPALAFVDTPIDTFSSIFTPSSVSTAVVDGSCHWSPSLSSSLYRIDGWGAPYFAANSSGNISVRPHGSNTLPHQDIDLMKVVKKVTDPSGLGLQLPLIVRFPDVLKNRLECLQSAFDYAIQSQGYDSHYQGVYPVKCNQDRFIIEDIVEFGSGFRFGLEAGSKPEILLAMSCLCKGNPEAFLVCNGFKDSEYISLALFGRKLELNTVIVLEQEEELDLVIDLSQKMNVRPVIGLRAKLRTKHSGHFGSTSGEKGKFGLTTVQILRVVRKLSQVGMLDCLQLLHFHIGSQIPSTALLSDGVAEAAQLYCELVRLGAHMKVIDIGGGLGIDYDGSKSGESDLSVAYSLEEYAAAVVASVRFVCDQKSVKHPVICSESGRAIVSHHSVLIFEAVSAGQQHETPTDHQFMLEGYSEEVRGDYENLYGAAMRGDRESCLLYVDQLKQRCVEGFKEGSLGIEQLAGVDGLCEWVIKAIGASDPVLTYHVNLSVFTSIPDFWGIDQLFPIVPIHKLDQRPAARGILSDLTCDSDGKINKFIGGESSLPLHEMDNNGCSGGRYYLGMFLGGAYEEALGGVHNLFGGPSVVRVLQSDGPHGFAVTRAVMGQSSADVLRAMQHEPELMFQTLKHRAEEPRNNNNKACGDKGNDKLVVASCLAKSFNNMPYLSMETSTNALTAAVNNLGVYYCDEAAAGGGGKGKDENWSYFG

SEQ ID NO: 58436 - DNA, 2124 bp, Avena sativa
  CDS (20)..(1843)
gcgagataactcacctatcatggccaagaactacggcgatgtgtaccatgtcgagggctggggagagccctactttgccgtgaacaaggacggccacctctgcgtcagaatctatggccgcgagacgcttccagggcaggagatcgacgtgctctccgtcatcgagcaagccacgagcgccgatggcacggggaagaaactccaattccccatgatccttcgcttccccgatgtgctgaggcaccgcatcaactcgctccacaccgcattcgccaacgccatcaagtacacccagtacggttctgtctaccagggcgtgttcccggtgaaggtgaaccagcacaaggacgtcgtgcaggacatggttcactttggctacgaccacagctacgggctggaggcaggctccaagccagagttgctgattgccatgagctgcctcaccaaagccaagcctggagcctacctggtatgcaacggctacaaggactcggcttatgtcgcgctcgccctggcggcgcgcgccatgggcctgaacgtcatcatcgtgctggagatggaggaggagctggacatcgtcatcgaggagagcagcaagctcggcgtggagcccgtcatcggcgtccgcgccaagctgctcaccaagataccgggccattttggctccacggccggcaagcacggtaagttcgggctaccggcggagaagatttatgaggtggccaagaagctcaaggctctgaacaagctgcattggctcaagctgctgcacttccacgtcggctccatgatcccgaccacagacattgtcttcaaggcagctagcgaggcctctgatatctactgcgccctggtgaaggagtacggggtggagacgatgaccacgctggactgcggcggggggctgggagtggactacgacgggacccgttcgggcagctccgacatgtccgtggcgtacgggctggaggagtacgcgtccagcatcgtgcaggcggtgcggctcaagtgcgactatcacggcgtcccccaccccgttctatgcaccgagagtgggcgcgccatggcgtcataccactccatgatcatcctggaggcgctctccgcgatccccgagccgaaagatgatgaagacgaggccaccaccgagcagctgcacggacggatccgcgatctctcttccaagctgcagccgacaggcttgtccatgtcctcccacgccgtgcacatcaagaagcacggcatcgagatgtacaagctgggaaagaagctctccaagagcgtcaccaccgatgcccacaccatctataactaccacatgaacctctcggtcttctcgctaatgcccgactactggggcatccagcatctgttcccgatgatgccggtgagccggctagatgagaagccgactcacaaggccacgctcgtcgatgtcacctgcgacagcgacggcaaagtcgacaagttcatacgcgacaccgagacgatgccgctgcacccgctagatccgaagctcggtggctactatgtggccgtgctcctgaccggcgcgtaccaggaggccctatccaacaagcacaacctgttcggcggcccgagtctggtgcgcgtagtcggcaccggcaatggcggcgcattcaacgtcgaggcggccctcctgggatcgacaacggaggagctcatcggcactgtgagttacgacgtgaaacaggatatcagcagcgtgattgaggagcgggcgagagagaataaggtgtgggaaatggtggagaagctcgtggaatccggacttcacaccatgccgtacctcgctgactacaagcccccaccaatggcctagctggctgttaattgctgtctgccaagcactctactactgtagcttcaacgcatagtgtcgtacacatcggtttcgtccttgggtttgtagactaagtataagctgctgcatatcccatctgtatcgagttatgtttctttgagagtcttgtaaactgtaccgaacatttggactttgggtactgtcctgttggtgtaggtgccagctagtgttggagatgaaatgagatgaaatattcactggccgtcgttttacaacgtcgtgactgggaaaacctggcg

SEQ ID NO: 58437 - protein, 607 aa, Avena sativa
MAKNYGDVYHVEGWGEPYFAVNKDGHLCVRIYGRETLPGQEIDVLSVIEQATSADGTGKKLQFPMILRFPDVLRHRINSLHTAFANAIKYTQYGSVYQGVFPVKVNQHKDVVQDMVHFGYDHSYGLEAGSKPELLIAMSCLTKAKPGAYLVCNGYKDSAYVALALAARAMGLNVIIVLEMEEELDIVIEESSKLGVEPVIGVRAKLLTKIPGHFGSTAGKHGKFGLPAEKIYEVAKKLKALNKLHWLKLLHFHVGSMIPTTDIVFKAASEASDIYCALVKEYGVETMTTLDCGGGLGVDYDGTRSGSSDMSVAYGLEEYASSIVQAVRLKCDYHGVPHPVLCTESGRAMASYHSMIILEALSAIPEPKDDEDEATTEQLHGRIRDLSSKLQPTGLSMSSHAVHIKKHGIEMYKLGKKLSKSVTTDAHTIYNYHMNLSVFSLMPDYWGIQHLFPMMPVSRLDEKPTHKATLVDVTCDSDGKVDKFIRDTETMPLHPLDPKLGGYYVAVLLTGAYQEALSNKHNLFGGPSLVRVVGTGNGGAFNVEAALLGSTTEELIGTVSYDVKQDISSVIEERARENKVWEMVEKLVESGLHTMPYLADYKPPPMA

SEQ ID NO: 58438 - DNA, 2540 bp, Brassica juncea
  CDS (286)..(2394)
caaattgcttttaaacatcttctcctgaacgttcatcgtggggaatctcgggtcgggtcgggttgttaaaggcgggtttcacggtggtgatagattcaccttctgcttcttctgagggggttagccccgaggctcttttgccttggcggatttcaatatccccccatcttcacaaaatcagaatcattttctctttttgattaaaaattgattcaccattttagttttttttttctctttcggaaattcgtttattaataattgtgaaggaagaagaagaagaagatgcctgctctcgctctcgttgatactcccgtcgacgccttctccggcgactgctccggcgttttcatcccgccgtctccaaactcctcctccgcatccctcgactggtctccctcgctctcctcctccctctaccgaatcgacggatggggcgctccgtacttcgccgccaactcctccgggaacatctccgttcgtccccacggctccaacaccatgcctcaccaagaaatcgatctcacgaaagtcgttaagaaagcaacagatccgaaatcctccggcggtttagctctgcagtttccactcatcgtccgcttccctgacgtcctcaagaaccgcctcgagtctcttcaatccgcgtttgaattcgcgatccagacgcaagggtacgagtctcgttaccaaggcgtgtatccggttaagtgtaaccaagaccggttcattattgaagatattgtcgagtttggttcgagtttccggtttgggttagaagccggttcgaagcctgagattcttctcgccatgagctgtttgtgtaaaggtagccctgaggcctttcttgtgtgtaacggtttcaaagacgctgagtatgtctcgctagcgttgcttgggaggaagcttcaattgaacacagtgattgttctcgagcaagaagaggagcttgatttggttattgcgttgagcaagaaggtaaacgtgaggcctgtgattgggttaagagccaagctgaggactaaacattcaggtcacttcggttctacttccggtgagaaaggcaagtttggtttgacaacggtccagatcattcgtgtggttaggaagcttcgtgatgtgggtatgcttgactgtctccagctacttcattttcacatcggttcgcagattccatccacggctttgctttccgatggtgtgtctgaagctgcgcagctttactgtgagcttgtccgtctcggtgctcgtatggaagtgattgacattggtggtgggttggggatagactacgacgggtctaagtctggtgaatcggatctctctgttgcctacagtcttgaggagtacgctgcagctgttgtggcgtctgttaggtttgtttgtgatcagaagtctgtgaagcatccggtgatatgcagcgagagcggtcgagccattgtctctcatcattctgtgttgatctttgaagctgtctcagctggtaaacgacatgaaaccaccccgagtgatcttcagttcttgcttgaagggtactcggaggaagctcgcggtgattacgagaatctttacgatgctgtgatgcgtggtgatcgtgaaagctgcttgctttatgttgatcagctgaaacagagatgtgttgaagagttcaaagaaggttctttgagcattgaacagttagctggtgttgatgggttatgcgagtgggtgactaaggagattggcggatcggatccggttcttacgtacaacgtcaacctatcggtcttccattcgattcctgatttctgggggattgatcagctgtttcctatagttcctatccataggcttgatcaaaggcctgtggcgagagggatcttgtctgatttgacttgtgacagcgacgggaagatcaacaagttcataggcggagagtcgagtttgccattgcacgagctagacaacaatggctactatttgggaatgttccttggtggggcttatgaggaagctctcggtggagtccacaatctgttcggagggccaagcgttgttcgggttttgcaaaaggatggtcctcatgggtttgcagtgactcgcgccatgatgggtcaatcttctgcggatgtccttagagcgatgcagcacgagcctgagctcatgtttcagactcttaaacaccgagctgaagagttgtctttggtccacaaacctggtggtgataagggaaatgacaaactagttgcatcatgtcttgctcgttcattcaacaacatgccttatctttccgtggggacgtccacaaacgctctcaccgctgcgataaataacctcgtttactacagcgatgaagcagcggttggtaatggtggcggttgcggcaagaatggaaaatggtcttattcggtggactgagagagacgtgaggacatcttgtgcgtttgatcttcaccgtaccatcctagttcctatatgttctgttctgtttttaagttgaaagttgtttctttgtaataaggcaaactcttagcaaattttaatgattataaactagtggttaa

SEQ ID NO: 58439 - protein, 702 aa, Brassica juncea
MPALALVDTPVDAFSGDCSGVFIPPSPNSSSASLDWSPSLSSSLYRIDGWGAPYFAANSSGNISVRPHGSNTMPHQEIDLTKVVKKATDPKSSGGLALQFPLIVRFPDVLKNRLESLQSAFEFAIQTQGYESRYQGVYPVKCNQDRFIIEDIVEFGSSFRFGLEAGSKPEILLAMSCLCKGSPEAFLVCNGFKDAEYVSLALLGRKLQLNTVIVLEQEEELDLVIALSKKVNVRPVIGLRAKLRTKHSGHFGSTSGEKGKFGLTTVQIIRVVRKLRDVGMLDCLQLLHFHIGSQIPSTALLSDGVSEAAQLYCELVRLGARMEVIDIGGGLGIDYDGSKSGESDLSVAYSLEEYAAAVVASVRFVCDQKSVKHPVICSESGRAIVSHHSVLIFEAVSAGKRHETTPSDLQFLLEGYSEEARGDYENLYDAVMRGDRESCLLYVDQLKQRCVEEFKEGSLSIEQLAGVDGLCEWVTKEIGGSDPVLTYNVNLSVFHSIPDFWGIDQLFPIVPIHRLDQRPVARGILSDLTCDSDGKINKFIGGESSLPLHELDNNGYYLGMFLGGAYEEALGGVHNLFGGPSVVRVLQKDGPHGFAVTRAMMGQSSADVLRAMQHEPELMFQTLKHRAEELSLVHKPGGDKGNDKLVASCLARSFNNMPYLSVGTSTNALTAAINNLVYYSDEAAVGNGGGCGKNGKWSYSVD

SEQ ID NO: 58440 - DNA, 2881 bp, Dianthus caryophyllus
  CDS (439)..(2616)
tattttgcatgcagaaatcccttcacatttagatctacaatcgccaatcatcaagatcattttgattagtattcgtcgctaaattttaaaaaaacttctgaagtcggcgtggggaaatttggtcagaagattgacgagtttgttatatttgtacggtggaattccgccgtcgtttgcttcttctgagggggtagccgagcggtacgcctcggcgggtttttaaacccccattttaattctcccattggggtaaattaaaatttttacaaaattcctccttttattttcattttttctccccaaaacaataaatccagaaaaaaacctcccccttttttttcgtttcttttaattaattttccgtctttttagtttttaattcgaaaaacagatcggggaagagcagagagaaaaaaaacaaagaaaatcgaaatcgaaatgccggctgtcgcttgctacgtcgacacatccgccgccgtgtacggcggcgcaggcgcactctctcttcccgcgtcggaaatcaacttttccggcgtacctccgacgactacttccaccaccgttaaccaaccaccgccgccgcagcagtggtccccatcactctccgctgagctctaccgaattgacaggtggggaccaccgtacttcgccgtgaactcctccggcaacgtcaccgtgaaaccttttggagacgccacgcttcctcaccaggaaatcgacctcttgaaagtcgtgaagaaagtttccgactcgaaatcgtcttcgggtttggggctccatttgcccgtgattatccgctttcccgacgtactcaaacaccgtctcgagtcccttcaatcggcttttgatttcgcggtccgtacccacgggtacgggtcccactaccagggagtttaccctgtgaagtgcaaccaggaccgatacattgtcgaagatattgtcgaatttgggtccgggtttaggttcgggcttgaggccgggtcgaagcccgaacttctgatggctatgagctctctttgtaagggtagcccggactcgttgctcgtttgtaacgggtttaaggacgccgagtatatttcgcttgctataattggtcgtaaactcgggttgaatactgttattgttattgaacaggaggaggaagtcgacatggcgattgaattgagtcgaaaaatggggattcggcccgttgttggggttagggccaagctgaggacgaagcattcgggccattttgggtcgacttcgggtgagaaggggaagtttgggcttacgacgacgcagattctccgtgttgttaggaagcttgagaatttcgggatgttggattgtttgcagctcctgcatttccacattggttcgcaaatcccgacgactacgcttttgagcgatggggtggcagaagcgtcacaagtttactgtgagctcacccgccttggggcccacatgagggtcattgatatcggtggcggtcttgggattgactatgacgggtcgaagtcgggtgattcggatttatcggttgggtacactctcgaggagtacgccagcgctgttgtggggacagtcatgagcgtctgtgaccgaaaaggcgtcaaaagccccgtgatttgtagcgagagcgttcgtgccattgtgtcgcaccactcgatcctcgtctttgaggcagtttcttcctcgtcatcggcctccccaccaatgccggggtccaccctggcgctcgattacctcgttgacgggcttactgacgaggtgaagggggagtaccgtagcctgactgctgcagcgatgagaggcgagtacgagagctgtctgatgtactctgggatgctgaagcaaagatgtgtcgagcttttcaaagacgggtgtctcgggatggagcagctagcggctgtcgacgggctttgcgagctcgtgtcgaaggcgcttggcgttgctgacggtgtttgtacttacaacgttaacctctccgttttcacctcgattcccgacttctgggggatcggtcagctgttccctataatgcccattcaccgtctcgatcagcagccgaaagcgagagggattttatcggatttaacctgcgacagcgacggtaaaatcgacaagttcattggggacgagtcgagcctaccgctgcacgaactcagcggaggtgagggatattatctggggatgtttctcggtggcgcatacgaggaggcactcggtggggtccacaacctgtttggcgggccgagtgtggtccgcgttcagcagagcgacgggccacagagctatgcggtcacgcgggccgtgcctggcccatcatcctcggatgttctccgagtgatgcaccacgagcccgagctcatgttccagactctcaagcaccgcgcagaggaatgcgacaacgactacactgcaggcccacttgctgacatgctcgcgcagtcgtttaacagcacgccatacctcgtgcccgggcatgcgacaggctcttgcggtttcagtaatggcagcgggttggtgaacgggtgtcgggaatacttctacggggttgatgacgggtgcaatgcggccgctgtggacgctgcagcgggcgaggaggagcagtggtcttatgtctgcgcttgagtttagttttacgggtttaagttggtcgtcgaggtcgtctgttttttcagaatttgtcgtttttttccttttaacttttcgttgtttcgattttcttgtttccaattgttacagatgatgataaatttgtaaggtttgggggggagggttagatgtttctgggtttaatgttttggttaaaatctgggcattcttaatttcctccttttagtttctttgttagacataaaatttcgacttcaatttagctctccacatttctaat

SEQ ID NO: 58441 - protein, 725 aa, Dianthus caryophyllus
MPAVACYVDTSAAVYGGAGALSLPASEINFSGVPPTTTSTTVNQPPPPQQWSPSLSAELYRIDRWGPPYFAVNSSGNVTVKPFGDATLPHQEIDLLKVVKKVSDSKSSSGLGLHLPVIIRFPDVLKHRLESLQSAFDFAVRTHGYGSHYQGVYPVKCNQDRYIVEDIVEFGSGFRFGLEAGSKPELLMAMSSLCKGSPDSLLVCNGFKDAEYISLAIIGRKLGLNTVIVIEQEEEVDMAIELSRKMGIRPVVGVRAKLRTKHSGHFGSTSGEKGKFGLTTTQILRVVRKLENFGMLDCLQLLHFHIGSQIPTTTLLSDGVAEASQVYCELTRLGAHMRVIDIGGGLGIDYDGSKSGDSDLSVGYTLEEYASAVVGTVMSVCDRKGVKSPVICSESVRAIVSHHSILVFEAVSSSSSASPPMPGSTLALDYLVDGLTDEVKGEYRSLTAAAMRGEYESCLMYSGMLKQRCVELFKDGCLGMEQLAAVDGLCELVSKALGVADGVCTYNVNLSVFTSIPDFWGIGQLFPIMPIHRLDQQPKARGILSDLTCDSDGKIDKFIGDESSLPLHELSGGEGYYLGMFLGGAYEEALGGVHNLFGGPSVVRVQQSDGPQSYAVTRAVPGPSSSDVLRVMHHEPELMFQTLKHRAEECDNDYTAGPLADMLAQSFNSTPYLVPGHATGSCGFSNGSGLVNGCREYFYGVDDGCNAAAVDAAAGEEEQWSYVCA

SEQ ID NO: 58442 - DNA, 2434 bp, Oryza sativa
  CDS (19)..(2127)
tctccggtttgtgacgagatgcctgcgctcgccgtggacgccgctgcacctgtcgcgcacgccttcgcgtgcgacgcggcgcgcttccccgcgccgctgctgggccccgccgccgcggctgcggcggtggcggagaagccggacgcggccgcgtggtcggccgacctctcgtccgcgctgtacaacgtggacggctggggcgcgccgtacttcttcgtcaacgacgacggcgacgtcgccgtgcgcccgcacggcgccgcaaccctgcccgggcaggagatcgacctcgccaaggtggtggccaaggccgccggcccgcgctccggcggcgggctcggcctgccgctccccctgctggtgcggttccccgacgtgctccgccaccgcgtggaggccctgaacgcggcgttcgactacgccgtgcgctccaccggctatggcgggaggtaccagggcgtgtaccccgtcaagtgcaaccaggaccgccacgtcgtggaggacattgtggagttcggcgagccgttccgcttcggcctggaggccggctccaagcccgagctgctgctcgccatgagctgcctcgccgcgcgcggcaacccggacgccctgctcatctgcaacggctacaaggacgacgagtacgtctcgctcgcgctcatcgcgcgcaccatggggctcaacacggtcatcgtgctcgagcaggaggaggagctcgacattgtggtcgacgctagccgccgcctcggcgtgcgcccggtggtcggcatgcgcgccaagctgcgcaccaagcacgccggccacttcggctccacgtccggggagaagggcaagttcggcctcaacgccgcgcagattctctccgtcgtcgccaagctcaagacccttggtatgctcgactgcctccagctcctgcacttccacattggctcccagatcccgaccactgctctgctcggcgatggcgtcggggaggccgcgcagatctactgcgagctcgcccgcctgggcgcggccatgcgcgtcatcgacgttggtggaggcctcggcattgactacgacgggagtcactcggcgcagaccgacatgtccgtggcatacagcttggaggagtacgcggcggccgtggtggccgccgtcggccgcgtctgtgaccgcaagggcgtcgcgcatcccatcatctgcagcgagagcggccgcgcgctggtgtcgcaccactctgtcctggtgttcgaggccttctcggcttcggcgcccggccgcattgacccggccacgggctacctgctcgacgagctcaccgacgactgccacgccgactaccgcaacctcatggccgccgcggtgcgcggcgacttcgacacctgcgctctgtacgccgaccagctgaagcggcgctgcgccgatcagttcaaggacggcgttcttggcctggagcacctcgccgcggtggacagcctctgcgagatcgtcgcccgcggcatgggcgccgccgagccgccgcgcacgtaccacatcaacctgtccgtgttcacctccctgccggacatgtgggcgatcgggcagatgttcccgatcatcccaatccagcgcctcggtgagcgccctgcggtcgacggcgtcctctccgacctcacctgcgacagcgacggcaaggtcgaccacttcatcggcgggaggcacagcctgccgctgcacgagctccccgtccacggcacccgcggctactacctcggcatgttcctcggcggcgcctaccaggaggccctcggcggcctccacaacctgttcggcgggccgagcgtggtgcgcgtgtcgcagagcgacgggccgcactgcttcgccgtcacgcgcgcggcggcggggccgtcgtgcgccgacgtgctccgctcgatgcagcacgagcccgaggtgatgttcgaggtgctcaagcagaggaccgacggcgccaccgccgccgcgctcgccagggcgttcggcgcaatgccgtacctgtcgttcgacccggaggccgcggcgatggccagcggggagagcagcggcatgagcagcgactcggaggggtcggccgccggcgcggcggaggaggatgacgacgagtgggagttcatgcgggggctcaccgtgtgaccgaggcagccatcgccggcttcttggtgttcacgcgaggagttcttgcacctccttctcctcctccattgtacctgtcgcactgagcagtcgtcgtcgccgtcgtgttcgtcgccgtcgccgacggtaatctccacccagtgtgtggttgtatcgtgtcatggtcgttgtcgtcgggcgtctcgtcgccgtagtctcgccggagtttctggcgccacctttttatttcgcaagcgtcagtgtccactgtttcgctctccttttgaaatttcatcagagaataagatgaggaacaaataagtttcgt

SEQ ID NO: 58443 - protein, 702 aa, Oryza sativa
MPALAVDAAAPVAHAFACDAARFPAPLLGPAAAAAAVAEKPDAAAWSADLSSALYNVDGWGAPYFFVNDDGDVAVRPHGAATLPGQEIDLAKVVAKAAGPRSGGGLGLPLPLLVRFPDVLRHRVEALNAAFDYAVRSTGYGGRYQGVYPVKCNQDRHVVEDIVEFGEPFRFGLEAGSKPELLLAMSCLAARGNPDALLICNGYKDDEYVSLALIARTMGLNTVIVLEQEEELDIVVDASRRLGVRPVVGMRAKLRTKHAGHFGSTSGEKGKFGLNAAQILSVVAKLKTLGMLDCLQLLHFHIGSQIPTTALLGDGVGEAAQIYCELARLGAAMRVIDVGGGLGIDYDGSHSAQTDMSVAYSLEEYAAAVVAAVGRVCDRKGVAHPIICSESGRALVSHHSVLVFEAFSASAPGRIDPATGYLLDELTDDCHADYRNLMAAAVRGDFDTCALYADQLKRRCADQFKDGVLGLEHLAAVDSLCEIVARGMGAAEPPRTYHINLSVFTSLPDMWAIGQMFPIIPIQRLGERPAVDGVLSDLTCDSDGKVDHFIGGRHSLPLHELPVHGTRGYYLGMFLGGAYQEALGGLHNLFGGPSVVRVSQSDGPHCFAVTRAAAGPSCADVLRSMQHEPEVMFEVLKQRTDGATAAALARAFGAMPYLSFDPEAAAMASGESSGMSSDSEGSAAGAAEEDDDEWEFMRGLTV

SEQ ID NO: 58444 - DNA, 3161 bp, Pisum sativum
  CDS (558)..(2744)
cacgtcttctgttatctgttcctctttcaagcactccaaatccaaaataacctctttgctttctgtcatacacaaccttttccatttttctctccacatctttctcctattttacccattcccctctccctctctctctctcacctcacctcaccataattctctctctctataaccgattttctctctcaacaccctcaaaaacaaaccaattcatcctcctattttctacctcattataattttcactagatccgcatgctttgctttcccttacgtgcttgaatatttccctcacctcgttttcgttcccgttttcgtaacctctttagctctatctttcttctgagggatagttgtggggattgattttgttagagagagtttcgaggggaagttctccttttttgattcagtttttcactgtcttcttttgggggggtagccggggcttttgcctcgcgggttttaaagcccccacgttcacaaactaattacttttcctcattcaaacaaaccctatttaacctattttttcgttcacggaagatatagatatgccggctttaacttgttttgtggatggtgctgctgcactcctacatcctcccggatacgctctcgccggagatttcactcttccgttgccgttcacattttctgctgcggcgacaataaccgatgatgctgatgccaccgcggttgaggattccaattccatttggtctccttcactttccagcaaactgttcagaattgatggctggggctttccctattttggtgttaacgctgctggtgacatctccgttaggcctcatggctcggcgacgatgtctcaccaggagattgatttgctcaaggttgtgaaaaaagcctccgatccgaaatgctgtggcggactcgggttacagctgcctcttgttgttcggtttcctgatgttttgaaggatcgtcttgagtccattcatgcggcttttgacggtgcgattcagttgcaggggtatgaatctcattaccaaggtgtttatcctgtgaagtgtaaccaggataggtatattgtggaggacattgttgagttcgggtcttcgtttcggttcgggttagaagctgggtcgaaacccgaactgcttctggctatgagctgtttgtgtaaaggcaacagagaagcctttctggtttgcaatggtttcaaagacagtgagtatatctctctggctttgattgcaaggaagctggctttgaacactgttattgttcttgagcaagaggaagagcttgatatggtggttgagatcagcaacaagctctgcattcgtcctgtgattggtgttcgtgcgaagttgaagaccaaacattctggccattttggtgcaacttctggtgataaaggtaaatttggtttaactacaattcagattttgcatgtggtgaagaagcttgaacaattagatatgcttgattgtctccaattgttgcattttcatattggttctcaaattcccacaactgagttgcttgctgatggtgttagagaagcttcacagatctattgtgaattgcttcgtttgggtgcccagatgaaagttttggatattgggggtggtttgggaatagattacgatggttcaaagtctggtgattctgatgaatctgttgcttatggtttagaagagtatgcagctgctgttgttcatgctgtgaaatatgtatgtgatcgtaagaacgtgaagcaccctgtgatttgcagtgagagtggtagggccattgtgtctcatcattccattttgatttttgaggctagtggtgcaagtacaaacactgctccttcgttgtcctccattgagttacagtatttaggcgaagggctctctgaagaagcacttgctgattatcagaacatttctgctgctacccttcgcggtgaatatgaagcatgcttgctctacactgaacaattcaagaaacgctgtgttgaggaattcaagcaagggactttagggattgaacagcttgctgcagtggatggtctgtgtgatttgataacggagacaatcggggtcaaggatcctgttaagaagtaccatgtgaacctttctgtgttcacctctgttcctgatttttggggcataaatcagttgtttcccattgtccccattcaccgtttggatgagaaaccaactgcgaggggtattttatctgacctgacttgtgacagtgatgggaagattgacaagttcattggcggtgagtcaagcttgccgcttcatgaaatggaaggacacggtgggggatactatctaggaatgttcttgggcgggtcttatgaggaggcgcttggtgggttgcacaacctgtttggtggccctagtgtagttagggtgttacagagcgatggtccacacggttttgctgttacgcgggcagttgctggatcgtcttgtgcagatgtccttcgagtgatgcagcacgagccgcagctcatgtttgagacgcttaagcaccgggcacttgagttttgtggacagcatgatgatgacagtgtggtgaatgcaggggtgttggcaaatagtttagctcaatcctttgataacatgccttatctggtttcatccacaacctgttgcttgaatgctctcacgaacaataatggattttactactgttctggtgatgatttcagtgcagatactgtttctgttgccacttctgttgctggagaagatgagaattggtcttattgatgtgcttgagtatcgacttttctagcattcccttttcattatgatgttgttggttgttgtcaaggtggtcttttctttatcattctatttttttttttttggtttagcaaagaatgtttgaagaagcagcacagggtcttcatgtgcctttgtttgcaatttcgacttcttaatgttggatttctgtagtttattttctttgttgccttgatttttgtgtttggaataaaccattcaactccttgatttttggtgtgttgagaataaacaattcaacttcatattccttttccagccgagttaattttcttttcttctttagagtattttgtgatttgacagtttaatattgtccgataacgaagaacatgtaaactagtattaatcatgacataatataatgaattttgtctgtta

SEQ ID NO: 58445 - protein, 728 aa, Pisum sativum
MPALTCFVDGAAALLHPPGYALAGDFTLPLPFTFSAAATITDDADATAVEDSNSIWSPSLSSKLFRIDGWGFPYFGVNAAGDISVRPHGSATMSHQEIDLLKVVKKASDPKCCGGLGLQLPLVVRFPDVLKDRLESIHAAFDGAIQLQGYESHYQGVYPVKCNQDRYIVEDIVEFGSSFRFGLEAGSKPELLLAMSCLCKGNREAFLVCNGFKDSEYISLALIARKLALNTVIVLEQEEELDMVVEISNKLCIRPVIGVRAKLKTKHSGHFGATSGDKGKFGLTTIQILHVVKKLEQLDMLDCLQLLHFHIGSQIPTTELLADGVREASQIYCELLRLGAQMKVLDIGGGLGIDYDGSKSGDSDESVAYGLEEYAAAVVHAVKYVCDRKNVKHPVICSESGRAIVSHHSILIFEASGASTNTAPSLSSIELQYLGEGLSEEALADYQNISAATLRGEYEACLLYTEQFKKRCVEEFKQGTLGIEQLAAVDGLCDLITETIGVKDPVKKYHVNLSVFTSVPDFWGINQLFPIVPIHRLDEKPTARGILSDLTCDSDGKIDKFIGGESSLPLHEMEGHGGGYYLGMFLGGSYEEALGGLHNLFGGPSVVRVLQSDGPHGFAVTRAVAGSSCADVLRVMQHEPQLMFETLKHRALEFCGQHDDDSVVNAGVLANSLAQSFDNMPYLVSSTTCCLNALTNNNGFYYCSGDDFSADTVSVATSVAGEDENWSY

SEQ ID NO: 58446 - DNA, 2783 bp, Glycine max
  CDS (370)..(2448)
gacccttttacttagcattccctgtttccggtattcgctccctttttttttctgcattctgtctggttttacttagatctctgtcccgcaccagatctggtgcagggtgagagggttgggttcattaattttgtatcaatcttccttctgagcggtaggcgtggggataccagagtcttttcgggaagcaagagagggttctctccgttttcaatagatctctcactgtcttcttttgagggggaagccggggcctcggcctcggcggctttcaaagcccccaccttcacagccctatcaacaaaaccctaaccctatttttttcttcttcattttctaattcaattttgatcgtcgccgtcactagagatgcctgtcctggcttgttgcgtggatgctgcagcacctcccggctatgcatttgccggtgacatctcttttccggcgccgatcgcctttactggcgtacctccggccacggcagacgacaccaacaacagcaacaaccattggtcgccgtctctctccgccgccctttacaacgtcgacggctggggcggcccctacttcgccgtcaacaccgccgggaacatctccgttcgcccacatggttccgacaccgtgtcgcaccaggagatcgatttgctgaagattgtgaagaaggcctccgatcccaaatctctcggtggtctcagcctccagcttcctctcattgcccgcttccctgacgttctgaagaaccggttggagtccctccagtcggcgttcgattatgcaatccaatctggagggtacgagtctcattaccaaggagtttaccccgtgaaatgcaaccaggaccggttcgtggtggaggatatcgtgaaattcggttcacccttccggttcggtctggaggccgggtctaagccggaactccttctggccatgagctgtctttgcaaaggcaaccccgacggccttttgatttgcaacggcttcaaggacgcggagtacatttctcttgccctggttgccaacaaacttgccctcaacaccgtgattgttgtggagcaggaggaggaggttgatttgatcgttgaattgagcaagaagctctgtattaagcccgtgattgggcttcgtgcgaagcttcggaccaagcattccggccatttcggtgggatcttcaggagaaggggaaagtttgggctgaccaccgctcgagttcttagggttgtgaagaacctggacctcgcgggcatgctggattgcctgcaactgctgcattttcatattggttctcagattccctcaacagcgttgcttgctgatggtgtgggagaggctgcgcagatctactgcgagttggttcggctcggggcgaacatgcgagtcatcgatattggaggtggactgggaattgactacgacggttccaaatcttgtgactcagatatttctgttgagtacggtctcgaggagtatgctgcagcggttgttcacgcggttcagtgtgtgtgcgaccgaagcgtgaaacaccctgtcatctgcagcgagagtgggagagccatcgtgtctcatcattcggtcttgattttcgaggcggttggcaccagcagcacaaacggcggaggagctcccccggcattgtcagcgcattacctggcggaggagctgtcggaggactacggatatctctcggagctggcgttccgaggggactatgaaacgtgcctggtgtacacggaggagatgaaagagcggtgcgtggagcagttcaagcaggggacggtgtgtatggaacagctggcagcggtggaagggttgtgtgaattggtgaggaaggcggttggggcggcggaatcggttcggagatatcacgtgaacttgtctattttcacgtccgttccagacgcgtggggaattgaacaggtgtttcccattatcccaattcaccgtttggacgaaaagccttcggtgaggggtattctctcggacttgacttgtgacagcgacgggaagattgacaagttcatcaacggagagtccagcctgccgcttcatgagatggaaggaggaagaacttactatctgggaatgtttttgggtggggcttacgaggaggcgctcggtggagtccacaacttgttcggcggccccagcgtggtcagggtgtcgcagagcgatggccctcacagctttgcggtcacgcgtgccgtgccggggccatcctgtggagatgttcttcgagtgatgcagcaccagcccgagctcatgttcgagacactcaagcaccgcgcgcaggagtatgtcagccacgacaacgcagcagcgcttctggctgctggccttgctcgcacctttgacagaatgccttatctgctgtctctgtcttcctttgtggctgacgatgttgccgctgctgttcctgctgctcaagatctgggggagcagtggtcttattaatggatgtgcttcaattcaaatagtctcgcactagtcatcattccctttgtttctgttgcttgcttggttgttcttcttcttcttgttgatcgtcgtggtcgttgaggtcttcaatttttttttattattattccgttttccgctgtttttagttttgtcctggatgcaatgctggataaagacagggtcagtcagttattgttctctgcattttgttcccaaatgaaatgtctatgactttcgtcgtcaagttctagggtaacaaattttattgttgccttgcttgttattattatacttagaataaaaatgttctcgcatggacaagttcttta

SEQ ID NO: 58447 - protein, 692 aa, Glycine max
MPVLACCVDAAAPPGYAFAGDISFPAPIAFTGVPPATADDTNNSNNHWSPSLSAALYNVDGWGGPYFAVNTAGNISVRPHGSDTVSHQEIDLLKIVKKASDPKSLGGLSLQLPLIARFPDVLKNRLESLQSAFDYAIQSGGYESHYQGVYPVKCNQDRFVVEDIVKFGSPFRFGLEAGSKPELLLAMSCLCKGNPDGLLICNGFKDAEYISLALVANKLALNTVIVVEQEEEVDLIVELSKKLCIKPVIGLRAKLRTKHSGHFGGIFRRRGKFGLTTARVLRVVKNLDLAGMLDCLQLLHFHIGSQIPSTALLADGVGEAAQIYCELVRLGANMRVIDIGGGLGIDYDGSKSCDSDISVEYGLEEYAAAVVHAVQCVCDRSVKHPVICSESGRAIVSHHSVLIFEAVGTSSTNGGGAPPALSAHYLAEELSEDYGYLSELAFRGDYETCLVYTEEMKERCVEQFKQGTVCMEQLAAVEGLCELVRKAVGAAESVRRYHVNLSIFTSVPDAWGIEQVFPIIPIHRLDEKPSVRGILSDLTCDSDGKIDKFINGESSLPLHEMEGGRTYYLGMFLGGAYEEALGGVHNLFGGPSVVRVSQSDGPHSFAVTRAVPGPSCGDVLRVMQHQPELMFETLKHRAQEYVSHDNAAALLAAGLARTFDRMPYLLSLSSFVADDVAAAVPAAQDLGEQWSY

SEQ ID NO: 58448 - DNA, 2136 bp, Arabidopsis thaliana
  CDS (1)..(2136)
atgcctgctttagcttgcgttgatacgtcctttgtacctcctgcctacgccttctccgacaccgccggtgatgtttttatcccggcgtcatcaccaacttccgccgccgttgttgttgaccgttggtctccgtcgctctcatcgtctctctatcgaatcgatggatggggagccccttatttcatagccaattcgtctggtaacatctctgttcgtcctcatggctctgaaactttgcctcaccaagacatcgatttgctcaaaatcgttaagaaggtgacgggtccgaaatcttccggtggtttaggattgcagcttccgttgatcgttcgtttccctgatgtgttgaagaaccgtctcgagtgtcttcaatctgcgtttgattacgcgattaaaagtcaaggatatgattctcattaccaaggtgtttatccggtgaaatgtaaccaagatcgattcgttgttgaagatattgtcaagtttggatcttcgtttcgatttggattagaagctggttctaaacctgagatccttcttgctatgagctgcttgtgtaaaggtagccctgatgcctttcttgtgtgcaatggattcaaagatgctgagtatatatcattggctctgcttgggagaaaactggcgttgaatactgtgattgtgcttgagcaagaagaagagcttgatctggttattgagctgagccagaagatgaatgtgaggcctgtcattgggttaagggctaagctgaggactaagcattcgggtcatttcggatcaacttctggtgaaaagggtaaatttggattgactactactcagattgttcgtgtggtgaggaagctgcgtcaatctggtatgcttgattgtctccagcttctgcattttcatattggttcacagattccgtcgacttcgttgctctctgatggtgtcgccgaggctgctcagctttactgtgaacttgtgcgtcttggtgcacatatgaaagttattgatatcggtggtggtttggggattgactacgacgggtctaaatctggagaatcggatctctctgttgcttatagtctcgaggagtatgctgaagctgttgtagcttctgttcgggttgtgtgtgaccggagctcagtgaaacatccggtgatatgcagcgaaagcggtagagcgatagtctctcatcattctgtgctgatctttgaagctgtttcagcagataaaccaatggttcatcaagcaactcccggcgatattcagttcctgcttgaaggtaatgaggaagctcgagccaattatgaggatctttatgctgctgtgatgcgtggagaccacgaaagctgccttctttatgtcgatcagctgaagcagaggtgtgttgaaggtttcaaagaaggtgttttgagcatcgagcagttagcttctgttgatggtttatgcgagtgggtgttgaaggctataggcgcatcggatccggttcatacttacaatatcaatctatcagttttcacttcgattcctgatctctgggggattgatcagctgttccctatagttcctatccataagctcgatcaaaggcccggggctcgcggaatcctttcagatttaacgtgtgatagtgacgggaagatcaacaagttcataggcggtgaatccagcttgccgttgcacgagctggacaagaatggcagtggaggaaggtactttttgggtatgttccttggaggggcttacgaggaggctctcggtggagtccacaatctgtttggtggaccaagcgttgtccgggtctcccagagcgatggaccacacagctttgcagtgacccgagcggtgcctggtcagtcctcagcggatgttctccgagcaatgcagcatgagccggagctaatgtttcagaccctaaagcaccgagcagaggaaatgatgcataccaaaggtggtagcgaaggtgaaaatgaagaggaagaagaagatgatgagttcaacaatgtggcggcttctctcgaccgttcgttccacaacatgccgtatcttgcaactgagcaggcatcgccaagtaactctctttcagctgcgatcagtaaccttgggttttactactgcgacgaagacgtctacgattacatctctgcgtga

SEQ ID NO: 58449 - protein, 711 aa, Arabidopsis thaliana
MPALACVDTSFVPPAYAFSDTAGDVFIPASSPTSAAVVVDRWSPSLSSSLYRIDGWGAPYFIANSSGNISVRPHGSETLPHQDIDLLKIVKKVTGPKSSGGLGLQLPLIVRFPDVLKNRLECLQSAFDYAIKSQGYDSHYQGVYPVKCNQDRFVVEDIVKFGSSFRFGLEAGSKPEILLAMSCLCKGSPDAFLVCNGFKDAEYISLALLGRKLALNTVIVLEQEEELDLVIELSQKMNVRPVIGLRAKLRTKHSGHFGSTSGEKGKFGLTTTQIVRVVRKLRQSGMLDCLQLLHFHIGSQIPSTSLLSDGVAEAAQLYCELVRLGAHMKVIDIGGGLGIDYDGSKSGESDLSVAYSLEEYAEAVVASVRVVCDRSSVKHPVICSESGRAIVSHHSVLIFEAVSADKPMVHQATPGDIQFLLEGNEEARANYEDLYAAVMRGDHESCLLYVDQLKQRCVEGFKEGVLSIEQLASVDGLCEWVLKAIGASDPVHTYNINLSVFTSIPDLWGIDQLFPIVPIHKLDQRPGARGILSDLTCDSDGKINKFIGGESSLPLHELDKNGSGGRYFLGMFLGGAYEEALGGVHNLFGGPSVVRVSQSDGPHSFAVTRAVPGQSSADVLRAMQHEPELMFQTLKHRAEEMMHTKGGSEGENEEEEEDDEFNNVAASLDRSFHNMPYLATEQASPSNSLSAAISNLGFYYCDEDVYDYISA

SEQ ID NO: 58450 - DNA, 1893 bp, Bacteroides thetaiotaomicron
  CDS (1)..(1893): transl_table=11
atgagaaagtggcgtattgaagattctgaagaactctacaacattacgggttggggtacttcgtactttagtattaatgacgcaggtcatgttgttgttacaccgcggagagatggagtgaccgtcgacctgaaggaactggttgacgagttacaattgcgggatgtggcatctcccatgctgttgcgtttcccggatattttggacaaccgtattgaaaagatgtcttcctgttttaagcaggctgccgaagagtacgggtataaagccgagaattttatcatctatcccattaaggtcaaccagatgcgtcctgtggtagaagagattatcagccacggaaagaaattcaatctcggactggaagccggttccaaaccggaacttcatgcggtgattgccgtcaatacggattctgactcattgattgtttgtaacggctataaagacgaaagttatatcgaactggcactccttgcccaaaagatgggcaaacgtatcttcctcgtagtagagaagatgaacgaactgaaactgatagccaaaatggcgaagcagttgaatgtgcagcccaatatcggtattcgtattaaactggcttcttccggcagtggaaaatgggaagaatcgggcggtgatgccagcaagttcggtctgacttccagcgaactgctcgaagcgcttgactttatggaaagcaagggcttgaaagattgcctgaaactgattcatttccatattggcagccaggtgacgaagattcgtcgcattaagacggctttgcgcgaagcttctcaattttacgtgcagcttcactctatgggattcaatgtggagtttgtggacatcggcggcggactgggcgttgattatgacggaacccgttcttccaatagtgaaggtagtgtaaactattctattcaggaatatgtgaatgactccatttctacattggtagatgtcagcgataaaaacggcatcccgcatccgaacatcattaccgagagcggacgggcattgacggctcatcactctgtcttgatcttcgaggtgctcgaaacagctactcttccggaatgggatgatgaagaggaaatcgctccggatgcacatgagcttgtgcaggaactgtacagtatctgggattcgttgaaccagaataagatgctggaagcatggcatgatgcacaacagattcgggaagaagcgctcgacttgttcagtcatggtattgtggatttgaagacccgtgctcagatcgagcgtttgtattggtccattacgcgggaaattaatcagatcgccggaggcttgaaacatgcgccggatgaattccggggattgtccaagttgctggcggataaatatttttgtaatttctcattgttccagtccttgcccgactcttgggcgattgatcagatatttccgattatgcctattcagcggttggatgagaagccggagcgttcggctaccctgcaggatatcacctgtgattcggacggaaagattgcaaatttcatttctacccggaatgtggctcattatctgcctgtgcatagtctgaagaaaacagaaccttactatctggctgttttcctggtcggagcttatcaggagattctgggagatatgcataatctgtttggagatacgaatgctgttcacgtttctgtgaatgaaaagggatataatatcgaacagattattgatggtgagacagtagcggaagtgttggattacgtacaatataatcctaaaaaactggtacgtacccttgaaacatgggtgaccaagtctgtaaaagaaggaaagatatcattggaagagggtaaagagtttctgtccaactatcgttcgggactttacggctatacttacttagaataa

SEQ ID NO: 58451 - protein, 630 aa, Bacteroides thetaiotaomicron
MRKWRIEDSEELYNITGWGTSYFSINDAGHVVVTPRRDGVTVDLKELVDELQLRDVASPMLLRFPDILDNRIEKMSSCFKQAAEEYGYKAENFIIYPIKVNQMRPVVEEIISHGKKFNLGLEAGSKPELHAVIAVNTDSDSLIVCNGYKDESYIELALLAQKMGKRIFLVVEKMNELKLIAKMAKQLNVQPNIGIRIKLASSGSGKWEESGGDASKFGLTSSELLEALDFMESKGLKDCLKLIHFHIGSQVTKIRRIKTALREASQFYVQLHSMGFNVEFVDIGGGLGVDYDGTRSSNSEGSVNYSIQEYVNDSISTLVDVSDKNGIPHPNIITESGRALTAHHSVLIFEVLETATLPEWDDEEEIAPDAHELVQELYSIWDSLNQNKMLEAWHDAQQIREEALDLFSHGIVDLKTRAQIERLYWSITREINQIAGGLKHAPDEFRGLSKLLADKYFCNFSLFQSLPDSWAIDQIFPIMPIQRLDEKPERSATLQDITCDSDGKIANFISTRNVAHYLPVHSLKKTEPYYLAVFLVGAYQEILGDMHNLFGDTNAVHVSVNEKGYNIEQIIDGETVAEVLDYVQYNPKKLVRTLETWVTKSVKEGKISLEEGKEFLSNYRSGLYGYTYLE

SEQ ID NO: 58452 - DNA, 1881 bp, Chromobacterium violaceum
  CDS (1)..(1881): transl_table=11
atggcttggtctgtggctgatagccggagcctgtacggcatccggcattggggggctggttatttcgatgtcggggacagcggcaacatcgtcgtgcgtcccaatgtgcgccagcgcaaggaaatcgatctgtaccgcctggtgcgcgatctgggcggcaaaggcctggatctgcctcttctggtccgtttcccggacattctgcaggaccgcgtgacccgcctgtgcggcgccttcgacaaggccatcgccgaacagggctacggcaaccgctacaccgccatctacccgatcaaggtcaaccagcaggaagcggtggtcaagagcatcatcgccacccaggacgtgtccatcggcctggaagccggctccaagccggagctgatggcggtgctggccttggcgcccaagggctgcaccatcgtctgcaacggctacaaggaccgcgaattcatccgtctcgcgctgatcggcgagcgcctgggccaccaggtgttcatcgtgatcgagaaggagtccgaggtcgatctggtgatcgaggaatcccgcaagctggaagtgcgccccaatatcggcctgcgcgtgcgcctgtcgtcgctggcgtccagcaagtggtccgacaccggcggggaaaagggcaagttcggcctgtccgccggccaactgatctcggccaccgacaagctgatcgcggccggcctgggcgactgcgtgcgcctgatgcacttccacatgggttcgcagatcgccaacatcgcagattaccgcctgggcttccgcgaagcgatccgctacttcgccgagctgcgcgcgctgggcctgccggtcgaccatgtcgacgtcggcggcggcctgggcgtcgattacgacggcacccactcgcgcaacgacagttcgatcaactacgacatggccgaatacgcgcacgtgatcgtgtccatgctgtccgagttctgcgccgagaacggcatcccgcacccgcgcatcctgtccgaatccggccgcgcgatgaccgcccaccacgcggtactgctgatgaacgtgaccgatgtcgagcgcctgcccgacacagtggcgccgatcgacaaagcggaagagctgtcgctgccactgcgcaagctggtggagctggccaacctcaatgacgaggagctggtcaccgagatctactaccgcgccagccactgcgtgtcggaagtgagcgagatgtacgccgaaggccgtctgtcgctgcaggaaaaggcgctggccgaagacctgcacgccacgctgtgccgccgtctgcacaaccagctgcaggccagccagcgctcgcagcgccaggtgtacgatgaactgaccgaccgtctggccgacaagtatttctgcaacttctccgtgttccagagcttgccggacacctgggccatcgatcaggtgctgcccatcatgccggtgcatcgcctggccgagcagccgacccgccgcgcggtgctgcaggacctgacctgcgactccgacggcaagctgaagcagtacgtcgaccagcagagcatcgagtccagcatgtcggtgcacgaagtgaagcagggcgacgagtacctgatcgcggtgttcctggtgggcgcctaccaggaaatcctgggcgacatgcacaacctgttcggcgataccgactcggtcaacgtctacgtccgcgagggcggcgagctggagatttccggcatcgaggaacacgataccatcgaggacatgctgcgctatgtgcacctgtcgccggaggacctgctcaaccgctacgaggccaagacccgcgaatgcgatctgaacccggaagagcgcagcctgtacttcgccgaattctgccgcggcctgaagcagtcgtcttacctggcggtctga

SEQ ID NO: 58453 - protein, 626 aa, Chromobacterium violaceum
MAWSVADSRSLYGIRHWGAGYFDVGDSGNIVVRPNVRQRKEIDLYRLVRDLGGKGLDLPLLVRFPDILQDRVTRLCGAFDKAIAEQGYGNRYTAIYPIKVNQQEAVVKSIIATQDVSIGLEAGSKPELMAVLALAPKGCTIVCNGYKDREFIRLALIGERLGHQVFIVIEKESEVDLVIEESRKLEVRPNIGLRVRLSSLASSKWSDTGGEKGKFGLSAGQLISATDKLIAAGLGDCVRLMHFHMGSQIANIADYRLGFREAIRYFAELRALGLPVDHVDVGGGLGVDYDGTHSRNDSSINYDMAEYAHVIVSMLSEFCAENGIPHPRILSESGRAMTAHHAVLLMNVTDVERLPDTVAPIDKAEELSLPLRKLVELANLNDEELVTEIYYRASHCVSEVSEMYAEGRLSLQEKALAEDLHATLCRRLHNQLQASQRSQRQVYDELTDRLADKYFCNFSVFQSLPDTWAIDQVLPIMPVHRLAEQPTRRAVLQDLTCDSDGKLKQYVDQQSIESSMSVHEVKQGDEYLIAVFLVGAYQEILGDMHNLFGDTDSVNVYVREGGELEISGIEEHDTIEDMLRYVHLSPEDLLNRYEAKTRECDLNPEERSLYFAEFCRGLKQSSYLAV

SEQ ID NO: 58454 - DNA, 1977 bp, Escherichia coli
  CDS (1)..(1977): transl_table=11
atgtctgacgacatgtctatgggtttgccttcgtcagcgggcgaacacggtgtactacgctccatgcaggaggttgcaatgagctcccaggaagccagcaagatgctgcgtacttacaatattgcctggtggggcaataactactatgacgttaacgagctgggccacattagcgtgtgcccggacccggacgtcccggaagctcgcgtcgatctcgcgcagttagtgaaaactcgtgaagcacagggccagcgtctgcctgcactgttctgtttcccacagatcctgcagcaccgtttgcgttccattaacgccgcgttcaaacgtgcgagggaatcctacggctataacggcgattacttccttgtttatccgatcaaagttaaccagcaccgccgcgtgattgagtccctgattcattcgggcgaaccgctgggtctggaagccggttccaaagccgagttgatggcagtactggcacatgctggcatgacccgtagcgtcatcgtctgcaacggttataaagaccgcgaatatatccgcctggcattaattggcgagaagatggggcacaaggtctatctggtcattgagaagatgtcagaaatcgccattgtgctggatgaagcagaacgtctgaatgtcgttcctcgtctgggcgtgcgtgcacgtctggcttcgcagggttcgggtaaatggcagtcctccggcggggaaaaatcgaagttcggcctggctgcgactcaggtactgcaactggttgaaaccctgcgtgaagccgggcgtctcgacagcctgcaactactgcacttccacctcggttcgcagatggcgaatattcgcgatatcgcgacaggcgttcgtgaatccgcgcgtttctatgtggaactgcacaagctgggcgtcaatattcagtgcttcgacgtcggcggcggtctgggcgtggattatgaaggtactcgttcgcagtccgactgttcggtgaactacggcctcaatgaatacgccaacaacattatctgggcgattggcgatgcgtgtgaagaaaacggtctgccgcatccgacggtaatcaccgaatcgggtcgtgcggtgactgcgcatcacaccgtgctggtgtctaatatcatcggcgtggaacgtaacgaatacacggtgccgaccgcgcctgcagaagatgcgccgcgcgcgctgcaaagcatgtgggaaacctggcaggagatgcacgaaccgggaactcgccgttctctgcgtgaatggttacacgacagtcagatggatctgcacgacattcatatcggctactcttccggcatctttagcctgcaagaacgtgcatgggctgagcagctttatttgagcatgtgccatgaagtgcaaaagcagctggatccgcaaaaccgtgctcatcgtccgattatcgacgagctgcaggaacgtatggcggacaaaatgtacgtcaacttctcgctgttccagtcgatgccggacgcatgggggatcgaccagttgttcccggttctgccgctggaagggctggatcaagtgccggaacgtcgcgctgtgctgctggatattacctgtgactctgacggtgctatcgaccactatattgatggtgacggtattgccacgacaatgccaatgccggagtacgatccagagaatccgccgatgctcggtttctttatggtcggcgcatatcaggagatcctcggcaacatgcacaacctgttcggtgataccgaagcggttgacgtgttcgtcttccctgacggtagcgtagaagtagaactgtctgacgaaggcgataccgtggcggacatgctgcaatatgtacagctcgatccgaaaacgctgttaacccagttccgcgatcaagtgaagaaaaccgatcttgatgctgaactgcaacaacagttccttgaagagttcgaggcaggtttgtacggttatacttatcttgaagatgagtaa

SEQ ID NO: 58455 - protein, 658 aa, Escherichia coli
MSDDMSMGLPSSAGEHGVLRSMQEVAMSSQEASKMLRTYNIAWWGNNYYDVNELGHISVCPDPDVPEARVDLAQLVKTREAQGQRLPALFCFPQILQHRLRSINAAFKRARESYGYNGDYFLVYPIKVNQHRRVIESLIHSGEPLGLEAGSKAELMAVLAHAGMTRSVIVCNGYKDREYIRLALIGEKMGHKVYLVIEKMSEIAIVLDEAERLNVVPRLGVRARLASQGSGKWQSSGGEKSKFGLAATQVLQLVETLREAGRLDSLQLLHFHLGSQMANIRDIATGVRESARFYVELHKLGVNIQCFDVGGGLGVDYEGTRSQSDCSVNYGLNEYANNIIWAIGDACEENGLPHPTVITESGRAVTAHHTVLVSNIIGVERNEYTVPTAPAEDAPRALQSMWETWQEMHEPGTRRSLREWLHDSQMDLHDIHIGYSSGIFSLQERAWAEQLYLSMCHEVQKQLDPQNRAHRPIIDELQERMADKMYVNFSLFQSMPDAWGIDQLFPVLPLEGLDQVPERRAVLLDITCDSDGAIDHYIDGDGIATTMPMPEYDPENPPMLGFFMVGAYQEILGNMHNLFGDTEAVDVFVFPDGSVEVELSDEGDTVADMLQYVQLDPKTLLTQFRDQVKKTDLDAELQQQFLEEFEAGLYGYTYLEDE

SEQ ID NO: 58456 - DNA, 1935 bp, Gloeobacter violaceus
  CDS (1)..(1935): transl_table=11
atgcaagattggacaatcgaagacagcgccgagctgtaccagattcacggttggggggagccctacttcaagatcaacgacaaagggcacgtcgctgtgatgccgcgcggcgagggcaacggtgagatcgacctgttccacctggtgcaagacatccagaagcgcggcctgaacatgccgatgctgattcgcttctccgatatcctggccgaccgcatcgcccgcctcaacgcctgctttgtcgaggccatccgcgaatacgactacccggggatctacaaaggcgtctacccggtcaaggtcaaccagcagcgccacgtcgtcgaggaagtggtcgaatttggccggccctttcaatatggtctggaagcaggttccaagcccgaactgctcatcgccctggccaccctcaagacgccgggggccttgattatctgcaacggctacaaagacagcgaatatatcgagacggcgctgttggcccaacggctcggccacacccctttcgtggtgatcgaacgctttcacgagttgacgctgctcatcgaagcggcccaaaagctcggcatccgtccgctcatcggtgtgcgggccaagcttaccgcccggggcatcgggcgctggggcgattccaccggcgatcgagccaaattcggcctgagcgccggggagatcatggaggtggtggcccaactcaaagccgccgacttgctttcctcgctgcaactgctgcactttcacatcggctcgcaaatctcggccatcaacgtgatcaagacggccctgcgcgaggcgtcctgcgtctacgtcgaacttgcgcagatgggagcccccatgcagtactgcgacgtgggcggggggctggccatcgactatgacggctcgaagaccaactttcgcgcctccaaaaactacaacatgcaggagtacgcctacgacgtggtggccgccttccaggacgcctgccgcaccaagaacgtgccggtgccgaccctggtgagcgagtcgggtcgggcgatcaccagccaccagtcggtgctcgtcttcgatgtgatgggggtgagccacctgcaattcggcgaaccggagcctcccgcccgcaacgagcactcgatcatccgcaacctctacgagacctatacccagatcacccccgacaacgtgcaagaagccttcaacgacgcttcgcaatttaaagaagaagccctcagcctttttgctctgggctacttgggcctgggggaacgcgcccgggccgagcggctctactggggctgctgcgagaagatcctcaacctggtgcgcgaactcgactacatcccggacgagctggcggacctcgagaagaatatggcttcgacctactactgcaacttctcggtcttccagtccgcccccgatagttgggccatcgaccagctctttccgatcatgcccatccacaggctggacgaggagcccaaggcccgcggcaccctcgcggatctcacctgcgacagcgacggcaaaatcgaccagtttatcgacctgcgcgacgtcaagggcgtgctcgaactgcacccggtgcggccggaggaaccctattacctggggatgttcctcaacggtgcctaccaagaaattctgggggacatgcacaacctgttcggcgacaccaacaccgttcacattcatctcgcctccgacgagccgggcgagcagagttaccggcttgaacacgtcgtcaagggcgacacgatgaccgaggtgctcaagtacgtccagtacgaccacgaagcgatgctggagagtattcgccgcgagaccgagcaggcgctcagggagcggcgcatcaccctgagcgaatcgcggttgttgctgcagcactacgagcgctccttgagcggctacacctacctcaccaacgaactccaggtcgaactggccgcgcgctag

SEQ ID NO: 58457 - protein, 644 aa, Gloeobacter violaceus
MQDWTIEDSAELYQIHGWGEPYFKINDKGHVAVMPRGEGNGEIDLFHLVQDIQKRGLNMPMLIRFSDILADRIARLNACFVEAIREYDYPGIYKGVYPVKVNQQRHVVEEVVEFGRPFQYGLEAGSKPELLIALATLKTPGALIICNGYKDSEYIETALLAQRLGHTPFVVIERFHELTLLIEAAQKLGIRPLIGVRAKLTARGIGRWGDSTGDRAKFGLSAGEIMEVVAQLKAADLLSSLQLLHFHIGSQISAINVIKTALREASCVYVELAQMGAPMQYCDVGGGLAIDYDGSKTNFRASKNYNMQEYAYDVVAAFQDACRTKNVPVPTLVSESGRAITSHQSVLVFDVMGVSHLQFGEPEPPARNEHSIIRNLYETYTQITPDNVQEAFNDASQFKEEALSLFALGYLGLGERARAERLYWGCCEKILNLVRELDYIPDELADLEKNMASTYYCNFSVFQSAPDSWAIDQLFPIMPIHRLDEEPKARGTLADLTCDSDGKIDQFIDLRDVKGVLELHPVRPEEPYYLGMFLNGAYQEILGDMHNLFGDTNTVHIHLASDEPGEQSYRLEHVVKGDTMTEVLKYVQYDHEAMLESIRRETEQALRERRITLSESRLLLQHYERSLSGYTYLTNELQVELAAR

SEQ ID NO: 58458 - DNA, 1893 bp, Neisseria meningitidis serogroup B
  CDS (1)..(1893): transl_table=11
atgcctatccttaccatccgtgaagtgtgcaacattaatcattggggcataggttattatgatgttgacgattccggcgaaatcatcgtccgccccaatccctcgcaacacaatcaaactgtttcactgcaaaaactgactgaagccgtgcaacaaaaacatcaggcgcgcctgcctgttttgttttgttttccgcaaatcctcgaacaccgcctccgcgacattaaccgcgcctttcagacggcacgggaagagtgcggctataagggcggttattgtttggtttaccctatcaaggtcaaccaacaccgccgcgtcatcgaatcgcttatgtcaagcggacaaccgcatggtttggaagctggttctaaagccgaactgatggcggttttggcacacgccggcaaccggcaaacattaatcgtctgcaacggctataaagaccgtgaatatatccgtttcgccttgatgggcgaaaaactggggcatcaggtttatttggtgattgagaagctgtccgaaatacaaatggtattggaagaggcggaaaaactcggcatcaagccccgtttgggtgtgcgcgccagactggcttcccaaggttcgggaaaatggcagtcttcgggtggggaaaaatcaaaattcggcttgtcggcttcccaagttttgcaactggtcgatattttgaaacaaaaaaacaggctggattgcctgcagcttttgcatttccatttgggctcgcagcttgggaacatccgtgatgttgccacaggtgtacacgaatcggctcggttttatgttgagttgcacaaactgggggtaaatatccgctgttttgatgtaggcggcgggcttggcgtggattacgaaggaaaccgcacacaatcggattgttccgttaattacagcctcaacgaatatgccgccacagtcgtatggggcatcagtcaggcttgtctcgaacacgggctgccgcatccgacaatcatcaccgagagcgggcgcggcattaccgcacatcacgccgttttggttgctaatgttataggcgttgaacgttacaaaccgcgccggctggatgcgccatcgcccgaagcaccgcgtgtgttgcacagtatgtgggaaacttggacggatatttccgcctcgcgggaaaaacgttccttacgcagctggatacacgaagggcagtttgatcttgctgatgtgcataatcagtataatgtcgggctgttgagtttggcgcaacgtgcgtgggcggagcaactgtatttaaatatctgtcatgaagtcggcgaattgtttaatgaaaaacaccggtctcaccgaaccattattgacgaattgcaagaacgttttgccgataagctgtatgtcaatttctcactcttccaatctttgcccgatgcttggggcatagatcaacttttccctgtttgtcccattaccggtttgaatgaaccgattgcgcgccgcgccgtgttgttggacattacctgcgattcagacggtacgattgaccactacatcgacggagacggcatcgccggtacgatgcctatgcctgattatcccgaagaagagccgccgcttttaggcttttttatggtgggagcatatcaggaaatactcggcaatatgcacaatcttttcggcgacactgccactgccgatgttgttgtaggggaagacggacaatttaccgtcatcgattacgatgaaggaaacaccgttgccgatatgctcgaatacgtttatcaagatccgaaagagctgatgaaacgctatcgcgaacaaatcgaacattcagaccttcctgcctcgcaggctatgtctttcttaaaagaactcgaagcggggcttaatggttatacctatttggaagacgaatag

SEQ ID NO: 58459 - protein, 630 aa, Neisseria meningitidis serogroup B
MPILTIREVCNINHWGIGYYDVDDSGEIIVRPNPSQHNQTVSLQKLTEAVQQKHQARLPVLFCFPQILEHRLRDINRAFQTAREECGYKGGYCLVYPIKVNQHRRVIESLMSSGQPHGLEAGSKAELMAVLAHAGNRQTLIVCNGYKDREYIRFALMGEKLGHQVYLVIEKLSEIQMVLEEAEKLGIKPRLGVRARLASQGSGKWQSSGGEKSKFGLSASQVLQLVDILKQKNRLDCLQLLHFHLGSQLGNIRDVATGVHESARFYVELHKLGVNIRCFDVGGGLGVDYEGNRTQSDCSVNYSLNEYAATVVWGISQACLEHGLPHPTIITESGRGITAHHAVLVANVIGVERYKPRRLDAPSPEAPRVLHSMWETWTDISASREKRSLRSWIHEGQFDLADVHNQYNVGLLSLAQRAWAEQLYLNICHEVGELFNEKHRSHRTIIDELQERFADKLYVNFSLFQSLPDAWGIDQLFPVCPITGLNEPIARRAVLLDITCDSDGTIDHYIDGDGIAGTMPMPDYPEEEPPLLGFFMVGAYQEILGNMHNLFGDTATADVVVGEDGQFTVIDYDEGNTVADMLEYVYQDPKELMKRYREQIEHSDLPASQAMSFLKELEAGLNGYTYLEDE

SEQ ID NO: 58460 - DNA, 1947 bp, Prochlorococcus marinus
  CDS (1)..(1947): transl_table=11
atgtcggcagccgaccccatccaggacaacaagtcatggaccgttgcagacagtgcagctctctatggcctcgatcactggggacacccttacttctcagccaacgctaacggccacgtgcaggtccagccacgcggcgatcaaggcagctgcctggatctggtggaactggtagaggagctcaaaagccgtaacctcaacttgcctctgctgatccgctttgatgacatcctcgaagaccggctagagaggctgcacagcgccttcgaagaagctattagcaaatacggatacgccggtcgatatcaaggcgtattcccggtgaagtgcaaccaacagcgccacgtcgtagaacaactggtagaaagtggtcgccaatggcactttggcctagaggctggcagcaaggctgagctgctgattgctctttcactcgtcaacgacccagaggcactactgatctgtaacggctacaaagatcagcgctacatcgaaaccgcgatcctggcccgcaggcttggtcgccaacctgtggtagtgattgaacaacccgatgaagtggaacggattatccgctccagccaagaacttggcgcagcacccttcctcggtgtacgagcaaagctaacgacacgcagtacgggccactggagtagctcagtaggcgagaaagccaagttcggtctctcagtgccggatctgctagccacagtggaagccttaagacaagctgatctacttagcgatctgcgcctactgcacttccacatcgggagccaaatcaacgacatcgctgtactcaaagacgcgcttcaagaggcagcgcaaatttacgtagagctgaccaagctgggagcccccatggggtatttggatgttgggggtggtctgggtgtcgactacgacggcagccgcagcgctagcgcagcatcgaccaactactccctacaaaactacgccaatgatgtagtcgcaacggtgcgcgaatgctgtaaaccccatggcatcactttgcctatccttgtgagcgaaagcggacgcgcgatcgctagtcatttctcaatactcgtgttcgatgtactgggtacaggaactgtcccaggagctatccccaagcaaacagtagaggaacccctcaccattcacaaccttagggagacgctctcaggagttatggcaactcaaaagggtgctgtatctgaaatatcgcgcctacaggaagcatggaacgacgcgatcaaattcaaagaagatgccctcgccgccttccgcttgggttacatcagcctgccagagcgggctctggcagaacaacttacaggggcttgcgccgaagcaattatgggccaattgccttgcaacgaaacaattcccgacgacttacaaagtttaagagctgttctcgctagcacctactacgccaacctttcaatatttcgttcagccccagacacctgggccatcgaacaactcttcccgctcatgccgattcatcgattgaatgaagagccaactcagctaggtcacttcgctgacctcacctgcgactccgacggcaaactggaccgcttcatcgggaatgggcaaaccaaaactctgctggagcttcacaacctgcgccaaaacgaggcttacatgattggcatgtttctcgccggtgcttaccaggaagtgatgggcaatctgcacaacctgttcggcagtaccaatgcagtgcacatccgtttaacaactgctggtggctaccaggtggaccacgttgtgcgaggcaacaccaattccgaggtgctcgaagccatggagcacaaccctgagctcctgctagagaggctgcgcttggctagtgaacttgcgattcaacgaggtgagctaaagatcaacgatgtgcgccggctgatggaccatctagaagcgagcctgcgtcagaccacgtaccttcaaggctag

SEQ ID NO: 58461 - protein, 648 aa, Prochlorococcus marinus
MSAADPIQDNKSWTVADSAALYGLDHWGHPYFSANANGHVQVQPRGDQGSCLDLVELVEELKSRNLNLPLLIRFDDILEDRLERLHSAFEEAISKYGYAGRYQGVFPVKCNQQRHVVEQLVESGRQWHFGLEAGSKAELLIALSLVNDPEALLICNGYKDQRYIETAILARRLGRQPVVVIEQPDEVERIIRSSQELGAAPFLGVRAKLTTRSTGHWSSSVGEKAKFGLSVPDLLATVEALRQADLLSDLRLLHFHIGSQINDIAVLKDALQEAAQIYVELTKLGAPMGYLDVGGGLGVDYDGSRSASAASTNYSLQNYANDVVATVRECCKPHGITLPILVSESGRAIASHFSILVFDVLGTGTVPGAIPKQTVEEPLTIHNLRETLSGVMATQKGAVSEISRLQEAWNDAIKFKEDALAAFRLGYISLPERALAEQLTGACAEAIMGQLPCNETIPDDLQSLRAVLASTYYANLSIFRSAPDTWAIEQLFPLMPIHRLNEEPTQLGHFADLTCDSDGKLDRFIGNGQTKTLLELHNLRQNEAYMIGMFLAGAYQEVMGNLHNLFGSTNAVHIRLTTAGGYQVDHVVRGNTNSEVLEAMEHNPELLLERLRLASELAIQRGELKINDVRRLMDHLEASLRQTTYLQG

SEQ ID NO: 58462 - DNA, 2085 bp, Zea mays
  CDS (1)..(2085)
atgcctgcgctcgccgtcgacgccgcgacacccgtggcgcacgccttcgcgtcctgcgacgcggcgcgcttccccgccccgcccgtggtgggccccgccgccgcggccgaggccgccccctggtcggccgacctctccgcggcgctctacaacgtggacggctggggcgcgccctacttcttcgtcaacgacgacggcgacgtggccgtgcgcccgcacggcgccgcgactctcccgggccaggagatcgacctggccaaggtcgtggccaaggccgcgggcccgcgcgccggaggcgggctcggcctgccgctgccgctgctcgtgcgcttccccgacgtcctgcgccaccgcgtcgagacgctcaacgccgccttcggctacgccgtccgctccaccggctacggctcaaggtaccagggcgtgtacccggtcaagtgcaaccaggacaggtacgtcgtcgaggacattgtggagttcggcgcgccctttgggttcggcctcgaggccggctccaagcccgagctgctgctcgccatgagctgcctcgccgcgcgcggcggcctggacgccctgctcatctgcaacgggtacaaggacgacggctacgtctcgctcgcgctcatggcgcgctccatgggcctcaacaccgtcatcgtgctcgagcaggaggaggagctcgacattgtcgtcgaggccagccgccgcctcggcgtgcgccccgtcgtcggcatgcgcgccaagctgcgcaccaagcacgccggccacttcggctccacgtccggggagaagggcaagttcggcctcagcgccgcgcagatactgtccgtggtcaccaagctcaaggccatcggtatgctcgactgcctccagctgctgcacttccacatcggctcccagatcccgaccaccgccctgctctccgacggcgtcggcgaggccgcgcagatctactgcgagctcgcccgcctcggcgcggacatgcgcgtcatcgacgtcggcggcggcctcggcattgactacgacgggacccactcggcgcagaccgacatgtcggtggcgtacagcctggaggagtacgcgggcgccgtggtggccgccgtgggccgcgtgtgtgaccgcaagggggtgcagcaccccatcatctgcagcgagagcggccgcgcgctggtgtcgcaccactcggtcctggtgttcgaggccttctcggctacggcgccgggacgcctggacgcggccacggcctacctcctcgacgagctcacggacgactgccgcgccgactaccgcaacgtcatggccgccgccgtgcgcggcgactacgacacgtgcggcctgtacgccgaccagctgaagcggcggtccgcggagctgttcaaggagggggtccttggcctggagcacctcgccgcggtggacgccttctgcgagctcgtcgcccgcggcatgggcgcgcccgagccgccgcgcacctaccacatcaacctgtccgtgttcacctccctgccggacatgtgggccatcgggcagcagttccccatcatcccgatccagcggctgcaggagcgacccgccgtcgacggcgtgctctcggacctcacctgcgacagcgacggcaaggtgagcgagttcatcggcgggaggcacagcctgccgctgcacgagctgcccacccacgccacccgcggctactacctgggcatgttcctcgggggcgcctaccaggaggccctcggcgggctgcacaacctcttcggcgggcccagcgtggtgcgcgtgtcccagtgcgacgggccccactgcttcgccgtgacgcgcgccgccgcgggcccgtcctgcgccgacgtgctccgcgcgatgcagcacgagcccgaggtgatgtacgaggtgctgaagcagaggaccgacggcgccacggccgccgccctcgcccgggccttcggcgcaatgccgtacctggtgttcgaccccgaggccgccgtgatgtccggcggcgagagcagcgactcggagcggtcggccgccggcgccgccgaggaggaagacgatgaggagtgggagttcatgcgcgggctcaccgtctga

SEQ ID NO: 58463 - protein, 694 aa, Zea mays
MPALAVDAATPVAHAFASCDAARFPAPPVVGPAAAAEAAPWSADLSAALYNVDGWGAPYFFVNDDGDVAVRPHGAATLPGQEIDLAKVVAKAAGPRAGGGLGLPLPLLVRFPDVLRHRVETLNAAFGYAVRSTGYGSRYQGVYPVKCNQDRYVVEDIVEFGAPFGFGLEAGSKPELLLAMSCLAARGGLDALLICNGYKDDGYVSLALMARSMGLNTVIVLEQEEELDIVVEASRRLGVRPVVGMRAKLRTKHAGHFGSTSGEKGKFGLSAAQILSVVTKLKAIGMLDCLQLLHFHIGSQIPTTALLSDGVGEAAQIYCELARLGADMRVIDVGGGLGIDYDGTHSAQTDMSVAYSLEEYAGAVVAAVGRVCDRKGVQHPIICSESGRALVSHHSVLVFEAFSATAPGRLDAATAYLLDELTDDCRADYRNVMAAAVRGDYDTCGLYADQLKRRSAELFKEGVLGLEHLAAVDAFCELVARGMGAPEPPRTYHINLSVFTSLPDMWAIGQQFPIIPIQRLQERPAVDGVLSDLTCDSDGKVSEFIGGRHSLPLHELPTHATRGYYLGMFLGGAYQEALGGLHNLFGGPSVVRVSQCDGPHCFAVTRAAAGPSCADVLRAMQHEPEVMYEVLKQRTDGATAAALARAFGAMPYLVFDPEAAVMSGGESSDSERSAAGAAEEEDDEEWEFMRGLTV

SEQ ID NO: 58464 - DNA, 20 bp, Artificial sequence
  primer
atgggggaagaacctgtgcc

SEQ ID NO: 58465 - DNA, 20 bp, Artificial sequence
  primer
ttaacttagataggtgtagc

SEQ ID NO: 58466 - protein, 710 aa, Artificial sequence
  consensus sequence
  Variant (2)..(6): Xaa in position 2 to 6 is any amino acid
  Variant (7)..(14): Xaa in position 7 to 14 is any or no amino acid
  Variant (16)..(19): Xaa in position 16 to 19 is any amino acid
  Variant (22)..(23): Xaa in position 22 to 23 is any amino acid
  Variant (26)..(30): Xaa in position 26 to 30 is any amino acid
  Variant (32)..(34): Xaa in position 32 to 34 is any amino acid
  Variant (36)..(36): Xaa in position 36 is any amino acid
  Variant (38)..(42): Xaa in position 38 to 42 is any amino acid
  Variant (43)..(49): Xaa in position 43 to 49 is any or no amino acid
  Variant (51)..(64): Xaa in position 51 to 64 is any amino acid
  Variant (65)..(73): Xaa in position 65 to 73 is any or no amino acid
  Variant (75)..(77): Xaa in position 75 to 77 is any amino acid
  Variant (80)..(82): Xaa in position 80 to 82 is any amino acid
  Variant (84)..(85): Xaa in position 84 to 85 is any amino acid
  Variant (87)..(89): Xaa in position 87 to 89 is any amino acid
  Variant (91)..(92): Xaa in position 91 to 92 is any amino acid
  Variant (95)..(96): Xaa in position 95 to 96 is any amino acid
  Variant (98)..(102): Xaa in position 98 to 102 is any amino acid
  Variant (104)..(106): Xaa in position 104 to 106 is any amino acid
  Variant (108)..(109): Xaa in position 108 to 109 is any amino acid
  Variant (111)..(111): Xaa in position 111 is any amino acid
  Variant (113)..(113): Xaa in position 113 is any amino acid
  Variant (115)..(115): Xaa in position 115 is any amino acid
  Variant (118)..(118): Xaa in position 118 is any amino acid
  Variant (120)..(122): Xaa in position 120 to 122 is any amino acid
  Variant (124)..(127): Xaa in position 124 to 127 is any amino acid
  Variant (128)..(128): Xaa in position 128 is any or no amino acid
  Variant (130)..(131): Xaa in position 130 to 131 is any amino acid
  Variant (132)..(137): Xaa in position 132 to 137 is any or no amino acid
  Variant (145)..(145): Xaa in position 145 is any amino acid
  Variant (148)..(160): Xaa in position 148 to 160 is any amino acid
  Variant (161)..(170): Xaa in position 161 to 170 is any or no amino acid
  Variant (174)..(174): Xaa in position 174 is any amino acid
  Variant (177)..(178): Xaa in position 177 to 178 is any amino acid
  Variant (180)..(182): Xaa in position 180 to 182 is any amino acid
  Variant (184)..(188): Xaa in position 184 to 188 is any amino acid
  Variant (190)..(195): Xaa in position 190 to 195 is any amino acid
  Variant (197)..(197): Xaa in position 197 is any amino acid
  Variant (199)..(201): Xaa in position 199 to 201 is any amino acid
  Variant (203)..(216): Xaa in position 203 to 216 is any amino acid
  Variant (217)..(218): Xaa in position 217 to 218 is any or no amino acid
  Variant (220)..(221): Xaa in position 220 to 221 is any amino acid
  Variant (223)..(223): Xaa in position 223 is any amino acid
  Variant (225)..(226): Xaa in position 225 to 226 is any amino acid
  Variant (228)..(232): Xaa in position 228 to 232 is any amino acid
  Variant (234)..(239): Xaa in position 234 to 239 is any amino acid
  Variant (240)..(241): Xaa in position 240 to 241 is any or no amino acid
  Variant (243)..(245): Xaa in position 243 to 245 is any amino acid
  Variant (250)..(260): Xaa in position 250 to 260 is any amino acid
  Variant (262)..(263): Xaa in position 262 to 263 is any amino acid
  Variant (264)..(266): Xaa in position 264 to 266 is any or no amino acid
  Variant (268)..(269): Xaa in position 268 to 269 is any amino acid
  Variant (271)..(271): Xaa in position 271 is any amino acid
  Variant (277)..(277): Xaa in position 277 is any amino acid
  Variant (282)..(292): Xaa in position 282 to 292 is any amino acid
  Variant (295)..(297): Xaa in position 295 to 297 is any amino acid
  Variant (299)..(299): Xaa in position 299 is any amino acid
  Variant (302)..(304): Xaa in position 302 to 304 is any amino acid
  Variant (306)..(311): Xaa in position 306 to 311 is any amino acid
  Variant (312)..(313): Xaa in position 312 to 313 is any or no amino acid
  Variant (315)..(315): Xaa in position 315 is any amino acid
  Variant (321)..(321): Xaa in position 321 is any amino acid
  Variant (326)..(330): Xaa in position 326 to 330 is any amino acid
  Variant (331)..(333): Xaa in position 331 to 333 is any or no amino acid
  Variant (335)..(336): Xaa in position 335 to 336 is any amino acid
  Variant (338)..(341): Xaa in position 338 to 341 is any amino acid
  Variant (344)..(346): Xaa in position 344 to 346 is any amino acid
  Variant (348)..(353): Xaa in position 348 to 353 is any amino acid
  Variant (355)..(360): Xaa in position 355 to 360 is any amino acid
  Variant (361)..(361): Xaa in position 361 is any or no amino acid
  Variant (363)..(366): Xaa in position 363 to 366 is any amino acid
  Variant (372)..(374): Xaa in position 372 to 374 is any amino acid
  Variant (376)..(378): Xaa in position 376 to 378 is any amino acid
  Variant (380)..(434): Xaa in position 380 to 434 is any amino acid
  Variant (435)..(445): Xaa in position 435 to 445 is any or no amino acid
  Variant (447)..(448): Xaa in position 447 to 448 is any amino acid
  Variant (450)..(456): Xaa in position 450 to 456 is any amino acid
  Variant (458)..(473): Xaa in position 458 to 473 is any amino acid
  Variant (474)..(497): Xaa in position 474 to 497 is any or no amino acid
  Variant (499)..(500): Xaa in position 499 to 500 is any amino acid
  Variant (502)..(502): Xaa in position 502 is any amino acid
  Variant (504)..(504): Xaa in position 504 is any amino acid
  Variant (506)..(506): Xaa in position 506 is any amino acid
  Variant (508)..(508): Xaa in position 508 is any amino acid
  Variant (511)..(511): Xaa in position 511 is any amino acid
  Variant (513)..(513): Xaa in position 513 is any amino acid
  Variant (515)..(515): Xaa in position 515 is any amino acid
  Variant (517)..(517): Xaa in position 517 is any amino acid
  Variant (520)..(521): Xaa in position 520 to 521 is any amino acid
  Variant (523)..(525): Xaa in position 523 to 525 is any amino acid
  Variant (527)..(529): Xaa in position 527 to 529 is any amino acid
  Variant (531)..(537): Xaa in position 531 to 537 is any amino acid
  Variant (539)..(539): Xaa in position 539 is any amino acid
  Variant (546)..(549): Xaa in position 546 to 549 is any amino acid
  Variant (552)..(556): Xaa in position 552 to 556 is any amino acid
  Variant (557)..(561): Xaa in position 557 to 561 is any or no amino acid
  Variant (563)..(564): Xaa in position 563 to 564 is any amino acid
  Variant (566)..(571): Xaa in position 566 to 571 is any amino acid
  Variant (572)..(595): Xaa in position 572 to 595 is any or no amino acid
  Variant (597)..(598): Xaa in position 597 to 598 is any amino acid
  Variant (600)..(600): Xaa in position 600 is any amino acid
  Variant (603)..(603): Xaa in position 603 is any amino acid
  Variant (607)..(607): Xaa in position 607 is any amino acid
  Variant (609)..(610): Xaa in position 609 to 610 is any amino acid
  Variant (612)..(613): Xaa in position 612 to 613 is any amino acid
  Variant (619)..(622): Xaa in position 619 to 622 is any amino acid
  Variant (624)..(639): Xaa in position 624 to 639 is any amino acid
  Variant (640)..(644): Xaa in position 640 to 644 is any or no amino acid
  Variant (646)..(650): Xaa in position 646 to 650 is any amino acid
  Variant (653)..(686): Xaa in position 653 to 686 is any amino acid
  Variant (687)..(708): Xaa in position 687 to 708 is any or no amino acid
WXXXXXXXXXXXXXYXXXXWGXXYFXXXXXGXXXVXPXXXXXXXXXXXXLXXXXXXXXXXXXXXXXXXXXXXXPXXXRFXXXLXXRXXXLXXAFXXAXXXXXYXXXYXXVXPXKXNQXRXXXEXXXXXGXXXXXXXXGLEAGSKXELXXXXXXXXXXXXXXXXXXXXXXXCNGXKDXXYXXXAXXXXXLXXXXXXVXEXXXEXXXXXXXXXXXXXXXXPXXGXRXXLXXXXXGXXXXXXXXGXXXKFGLXXXXXXXXXXXLXXXXXLXXLXLLHFHXGSQIXXXXXXXXXXXEAXXXYXELXXXGXXXXXXXXDXGGGLGXDYDGXXXXXXXXSXXYXXXXYAXXXVXXXXXXCXXXXXXXPXXXXESGRAXXXHXXXLXXXXXXXXXXXXXXXXXXXXXXXXXXXXXXXXXXXXXXXXXXXXXXXXXXXXXXXXXXXXXXXXXXFXXGXXXXXXXAXXXXXXXXXXXXXXXXXXXXXXXXXXXXXXXXXXXXXXXXYXXNXSXFXSXPDXWXIXQXFPXXPXXXLXXXPXXXXXXXDXTCDSDGXXXXFIXXXXXXXXXXLXXHXXXXXXXXXXXXXXXXXXXXXXXXXXXXXXYXXGXFLXGAYXEXXGXXHNLFGXXXXVXXXXXXXXXXXXXXXXXXXXXGXXXXXVLXXXXXXXXXXXXXXXXXXXXXXXXXXXXXXXXXXXXXXXXXXXXXXXXXXXXXXXXYL

SEQ ID NO: 58467 - protein, 40 aa, Artificial sequence
  protein pattern
  Variant (3)..(4): Xaa in position 3 to 4 is any amino acid
  Variant (5)..(5): Xaa in position 5 is Ile, Leu or Val
  Variant (7)..(8): Xaa in position 7 to 8 is any amino acid
  Variant (10)..(10): Xaa in position 10 is Ile, Leu or Val
  Variant (11)..(12): Xaa in position 11 to 12 is any amino acid
  Variant (13)..(13): Xaa in position 13 is Ile, Leu or Met
  Variant (14)..(15): Xaa in position 14 to 15 is any amino acid
  Variant (16)..(16): Xaa in position 16 is Ala, Cys or Val
  Variant (18)..(19): Xaa in position 18 to 19 is any amino acid
  Variant (20)..(20): Xaa in position 20 is Ala, Asn or Ser
  Variant (21)..(25): Xaa in position 21 to 25 is any amino acid
  Variant (26)..(26): Xaa in position 26 is Phe or Tyr
  Variant (27)..(32): Xaa in position 27 to 32 is any amino acid
  Variant (33)..(33): Xaa in position 33 is Phe, Ile, Leu or Val
  Variant (34)..(34): Xaa in position 34 is Phe or Tyr
  Variant (36)..(36): Xaa in position 36 is Ile or Val
  Variant (38)..(38): Xaa in position 38 is Cys or Val
RFXXXLXXRXXXXXXXFXXXXXXXXXXXXXXXXXPXKXNQ

SEQ ID NO: 58468 - protein, 29 aa, Artificial sequence
  protein pattern
  Variant (2)..(2): Xaa in position 2 is any amino acid
  Variant (3)..(3): Xaa in position 3 is Ile, Leu, Met or Val
  Variant (4)..(4): Xaa in position 4 is Ala or Gly
  Variant (5)..(5): Xaa in position 5 is any amino acid
  Variant (8)..(8): Xaa in position 8 is any or no amino acid
  Variant (10)..(10): Xaa in position 10 is any or no amino acid
  Variant (13)..(13): Xaa in position 13 is Glu or Gln
  Variant (15)..(15): Xaa in position 15 is any amino acid
  Variant (16)..(16): Xaa in position 16 is Leu or Met
  Variant (18)..(18): Xaa in position 18 is Asp, Gly or Asn
  Variant (19)..(19): Xaa in position 19 is any amino acid
  Variant (25)..(25): Xaa in position 25 is Asp, Gly, Ser or Thr
  Variant (26)..(28): Xaa in position 26 to 28 is any amino acid
  Variant (29)..(29): Xaa in position 29 is Ala, Ile, Leu or Val
YXXXXFLXGXAYXEXXGXXHNLFGXXXXX

SEQ ID NO: 58469 - protein, 20 aa, Artificial sequence
  protein pattern
  Variant (3)..(3): Xaa in position 3 is any amino acid
  Variant (4)..(4): Xaa in position 4 is Ile, Leu, Met or Val
  Variant (5)..(7): Xaa in position 5 to 7 is any amino acid
  Variant (8)..(8): Xaa in position 8 is Asp or Asn
  Variant (9)..(9): Xaa in position 9 is any amino acid
  Variant (14)..(14): Xaa in position 14 is Ala or Gly
  Variant (15)..(15): Xaa in position 15 is Ile or Val
  Variant (18)..(18): Xaa in position 18 is Asp or Glu
  Variant (20)..(20): Xaa in position 20 is Ala, Ser or Thr
GAXXXXXXXGGGLXXDYXGX

SEQ ID NO: 58470 - protein, 15 aa, Artificial sequence
  protein pattern
  Variant (8)..(8): Xaa in position 8 is Ala or Pro
  Variant (10)..(10): Xaa in position 10 is any or no amino acid
  Variant (12)..(12): Xaa in position 12 is any amino acid
  Variant (13)..(13): Xaa in position 13 is any or no amino acid
  Variant (15)..(15): Xaa in position 15 is Leu, Met or Val
GLEAGSKXEXLXXAX

SEQ ID NO: 58471 - protein, 21 aa, Artificial sequence
  protein pattern
  Variant (2)..(2): Xaa in position 2 is any amino acid
  Variant (3)..(3): Xaa in position 3 is Ala, Glu, Gly, Asn or Ser
  Variant (5)..(5): Xaa in position 5 is Asp, Glu, Gly, Asn, Ser or Thr
  Variant (6)..(6): Xaa in position 6 is any amino acid
  Variant (7)..(7): Xaa in position 7 is Ala, Asp, Glu, Gly, Asn, Gln or Ser
  Variant (8)..(8): Xaa in position 8 is Ala, Asp, Glu, Asn, Gln or Thr
  Variant (11)..(12): Xaa in position 11 to 12 is any amino acid
  Variant (13)..(13): Xaa in position 13 is Phe, Ile or Val
  Variant (15)..(16): Xaa in position 15 to 16 is any amino acid
  Variant (17)..(17): Xaa in position 17 is Phe, Ile, Leu or Val
  Variant (18)..(20): Xaa in position 18 to 20 is any amino acid
SXXYXXXXYAXXXVXXXXXXC

SEQ ID NO: 58472 - DNA, 882 bp, Synechocystis sp.
  CDS (1)..(882): transl_table=11
atgcccacccagcgaattattagtgcagtcatcggtattgccttggcgttttccctactaattttggggggctggtactttagcgcggcgatcgccctagtaatttatttaggattgcgggaatatttccaaatggtgcgggctaagggcattgccccagccgctaagaccaccatggtgctgtcattaatgttgctgctgtcggccacggttaccccccatttaactgatgcattttttcctttaaccggggcattaatttgcttttatctgctgtttcaacccaaaatggccaccattgccgacatttctacttcgttactgggcctgttttatgggggctatttgcccagctattgggtgcgactgcggttgggggatggagccgttaaccctatgggtttgcacttgcccctgaatggtttttggccggagtcctgggcccatccggaaaattttcccacgggcttactggtcactatccttgcctttgcttgcatctgggcggcggacattggcgcttacattatggggaaatggttaggacgtacccgtctgtcggacattagcccgaaaaaaaccgtggaaggttccctctggggagtaggaggcagtttgctggtgggggtattgggagcttggtatttgcaatggccctactgggaaattaccggcgctttactgggcctattaattggcatagttagcctgctgggggacttgacggaatcaatgatgaaacgggatgcgggagttaaggattctgggcaattaattcctggccacggaggaattttagaccgcaccgacagctacgttttcaccgctcccctggtctattactttgtcgttttactgttgcctgtgttgaataatttgtaa

SEQ ID NO: 58473 - protein, 293 aa, Synechocystis sp.
MPTQRIISAVIGIALAFSLLILGGWYFSAAIALVIYLGLREYFQMVRAKGIAPAAKTTMVLSLMLLLSATVTPHLTDAFFPLTGALICFYLLFQPKMATIADISTSLLGLFYGGYLPSYWVRLRLGDGAVNPMGLHLPLNGFWPESWAHPENFPTGLLVTILAFACIWAADIGAYIMGKWLGRTRLSDISPKKTVEGSLWGVGGSLLVGVLGAWYLQWPYWEITGALLGLLIGIVSLLGDLTESMMKRDAGVKDSGQLIPGHGGILDRTDSYVFTAPLVYYFVVLLLPVLNNL

SEQ ID NO: 58474 - DNA, 1293 bp, Arabidopsis thaliana (mouse-ear cress)
  CDS (1)..(1293)
atgacaaatacgaacacactcttcctcagacatgatgatgattcagagattttgatttttcaagaaaactctgtttttcctctttttgtttttgcctcttggggcatttggagagcaatggcgacttttgctgaacttgttttatcgacttctcgctgtacatgcccttgccgttcattcactagaaaacccctaattcgtccccctttatctggtctgcgtctccccggtgataccaaaccattgtttcgttccggacttggtcggatttctgttagccggcgtttcctcacggccgttgctcgagctgaatcagaccagcttggtgatgatgaccactcaaagggaattgatagaatccataacttgcagaatgtggaagataagcagaagaaagcaagccagcttaagaaaagagtgatctttggtattggcattggtttacctgttggatgtgttgtgttagctggaggatgggttttcactgtagctttagcatcttctgtttttatcggttcccgcgaatatttcgagcttgttagaagtagaggcatagctaaaggaatgactcctcctccacgatatgtatctcgagtttgctcggttatatgtgcccttatgcccatacttacactgtactttggtaacattgatatattggtgacatctgcagcatttgttgttgcaatagcattgttagtacaaagaggatccccacgttttgctcagctgagtagtacaatgtttggtctgttttactgtggttatctcccttctttctgggttaagcttcgctgtggtttagctgctcctgcgcttaacactggtatcggaaggacatggccaattcttcttggtggtcaagctcattggacagttggacttgtggcaacattgatttctttcagcggtgtaattgcgacagacacatttgcttttctcggtggaaagacttttggtaggacacctcttactagtattagtcccaagaagacatgggaaggaactattgtaggacttgttggttgtatagccattaccatattactctctaaatatctcagttggccacaatctctgttcagctcagtagcttttgggtttcttaacttctttgggtcagtctttggtgatcttactgaatcaatgatcaagcgtgatgctggcgtcaaagactctggttcacttatcccaggacacggtggaatattagatagagttgatagttacattttcaccggcgcattagcttattcattcatcaaaacatccctaaaactttacggagtttga

SEQ ID NO: 58475 - protein, 430 aa, Arabidopsis thaliana (mouse-ear cress)
MTNTNTLFLRHDDDSEILIFQENSVFPLFVFASWGIWRAMATFAELVLSTSRCTCPCRSFTRKPLIRPPLSGLRLPGDTKPLFRSGLGRISVSRRFLTAVARAESDQLGDDDHSKGIDRIHNLQNVEDKQKKASQLKKRVIFGIGIGLPVGCVVLAGGWVFTVALASSVFIGSREYFELVRSRGIAKGMTPPPRYVSRVCSVICALMPILTLYFGNIDILVTSAAFVVAIALLVQRGSPRFAQLSSTMFGLFYCGYLPSFWVKLRCGLAAPALNTGIGRTWPILLGGQAHWTVGLVATLISFSGVIATDTFAFLGGKTFGRTPLTSISPKKTWEGTIVGLVGCIAITILLSKYLSWPQSLFSSVAFGFLNFFGSVFGDLTESMIKRDAGVKDSGSLIPGHGGILDRVDSYIFTGALAYSFIKTSLKLYGV

SEQ ID NO: 58476 - DNA, 1146 bp, Oryza sativa (japonica cultivar-group)
  CDS (1)..(1146)
atggccgccgcggtggccacagcgacgacgccggccgccgcccacctccaccaccaccaccgccaccaccgcctccccctcctcccctcccagccacgtccccgccccaccctccgcctccgcctcctcatcccgacaccaccccctctccgccgcctcctccgccgctccccgctcctcgcggccgccgctgtctccgccgatggaggcggcggcgggggcggcggcggggaggaggcggagaggaagagggagaagtcgcggcagcttcagaagcgtgtgctcgtgggcgtcgccatcggggtgggcgcgggcggcgtcgtggtggccggcgggtgggtgttcgcggccgccgtggccgcggctgtcctcgccggagctcgtgagtacttcgggctcgtccgcgggaccgccggcgggggaggcacgccgccgccgcgcttcgtgtcccgcgtctgctctgccatctgcgctctcatgcctatccttaccctgtactatgggcatatggatgttaccgtgacgttttctgcattccttattgcgatatcattgttattgcaaagaggaaatcctcgttttgcacagctgactagttcagtttttggtctcttttattgtggctatcttccttctttctgggttaagctccgatctggactagctgctcctgccttaaatacaatatgtgttttgccagaaattgcatacagttggccaatacttcttggtgggcaagctcactggacagttggacttgtagcaaccttgatttctattagtagcattattgccgctgatacatctgctttcctttgtggacgggcatttggtcgcactcctcttactgatataagccctaagaagaccttggagggtgctttagctggtctaactggctgtgtactgaccactgtgcttctttcaagcgtcttacattggccaagatcgctgctgagtgctactgcttacggaatcttgatctttctgggttcgttgttcggggatcttgtcgagtctctgatcaagcgtgatgctggtgtgaaggactctggatcactcattcctggccatgcgattctgcgcagaggggaagccttcacggtgagattttctggagacaaccatcatttcgaaagccagtaa

SEQ ID NO: 58477 - protein, 381 aa, Oryza sativa (japonica cultivar-group)
MAAAVATATTPAAAHLHHHHRHHRLPLLPSQPRPRPTLRLRLLIPTPPPLRRLLRRSPLLAAAAVSADGGGGGGGGGEEAERKREKSRQLQKRVLVGVAIGVGAGGVVVAGGWVFAAAVAAAVLAGAREYFGLVRGTAGGGGTPPPRFVSRVCSAICALMPILTLYYGHMDVTVTFSAFLIAISLLLQRGNPRFAQLTSSVFGLFYCGYLPSFWVKLRSGLAAPALNTICVLPEIAYSWPILLGGQAHWTVGLVATLISISSIIAADTSAFLCGRAFGRTPLTDISPKKTLEGALAGLTGCVLTTVLLSSVLHWPRSLLSATAYGILIFLGSLFGDLVESLIKRDAGVKDSGSLIPGHAILRRGEAFTVRFSGDNHHFESQ

SEQ ID NO: 58478 - DNA, 1200 bp, Arabidopsis thaliana
  CDS (1)..(1200)
atggcgccttttgttgaagtctgtaggtataagccattaccgctttcattgagctctctctgtacatgcccttgccgttcctctccaaggaaatatctaattcttcctcaattctctgaaaagtacccgaaaccattgttgtctcattctcgctttactccgatttctgttaaccggagagttatcacggccgttgctcgagctgaatcaaatcaaattggtgacgatgccaactcaaaggaggaacacaacatagatcaagaattgcaaaatgttgaagaagattcgagtttagatgatcagaagcaaaaatctagaagccagtttaagaaaagagtaactttcggtctaggaattggattgtctgtaggaggtattgtattagctggaggatgggtattcacagtagcagtagcagctgcggttcttctaagtgcccgggaatatttcgagctggtgagaagtaaaggaattgctcaaggaatgacacctcctccacgatatctttctagagtctgctccattatctgtgctcttatgcccatacttacattgtattttggtcatatagatatctcgataacttcagcggcgtttgttgttgcaatggcattgttgttacagagaggaaacccgcgtttttctcagctgagtagtacgatgtttggcctgttttactgtggatatcttccttgtttctgggttaagctacgttgtggtcttactgctccagttctaaacaccggaattgggagaagctggcctactatcctcggcggccaagcacattggacagttggacttgttgctatattgatttctttctgtggtataattgcctcagacacgtttgcttttcttggtggcaaggcatttggtagaactcctcttattagcattagtccaaagaagacatgggaaggagcttttgcaggacttgttggttgtatttccattaccattttactctccaaatcgttgtcctggcctcaatctcttgtcagcaccatagcttttggagttcttaacttcttcggatcggtctttggtgacttaactgagtcaatgatcaaacgtgatgcgggtgtcaaagactccggctcactcatccctggacacggtggcatattggacagagttgatagttacattttcactggtgcattagcctactcgttcgtaagacttcatggagtttga

SEQ ID NO: 58479 - protein, 399 aa, Arabidopsis thaliana
MAPFVEVCRYKPLPLSLSSLCTCPCRSSPRKYLILPQFSEKYPKPLLSHSRFTPISVNRRVITAVARAESNQIGDDANSKEEHNIDQELQNVEEDSSLDDQKQKSRSQFKKRVTFGLGIGLSVGGIVLAGGWVFTVAVAAAVLLSAREYFELVRSKGIAQGMTPPPRYLSRVCSIICALMPILTLYFGHIDISITSAAFVVAMALLLQRGNPRFSQLSSTMFGLFYCGYLPCFWVKLRCGLTAPVLNTGIGRSWPTILGGQAHWTVGLVAILISFCGIIASDTFAFLGGKAFGRTPLISISPKKTWEGAFAGLVGCISITILLSKSLSWPQSLVSTIAFGVLNFFGSVFGDLTESMIKRDAGVKDSGSLIPGHGGILDRVDSYIFTGALAYSFVRLHGV

SEQ ID NO: 58480 - DNA, 870 bp, Pasteurella multocida subsp. multocida str. Pm70
  CDS (1)..(870): transl_table=11
gtgcttaaagaacgtgttttgtcagcgatcatgttaattgcaatagtatttattgcattgtttttcttttcacccttctattttgcacttgcagtaggtgttgtcgttattctcgctgtttgggagtggacgcaatttgcgcatttcaaatggtctttctggcgtttaggtttaacgggtttatccgcagcctttctatttctttggatttatggtgaaagtgactatttaaatgcgggtcgtgtgtttgaaaatacgctctcacttcttttattctcttctgtgctttggtggtttgtcgccttaggcttagtgataagttatcccaaaggggcgacctattggggaaaaaacaaattattgcaatttgcttttgcttttttaaccttagtgcctttctttgctggcgtgttacgtttacgcttagcacattatgtaacagatccctatcacggtttaattttattactctatgttttcattcttgtttggagcgcggattcgggagcatattttgctgggcgccagttcggcaaaaataaacttgcaccaaaagtttctcccggtaaaagttgggaaggcgtgatcggtggcttagtcacagcaggaattctagccagtatttttattcacttcacgcaagaaagtttgctttctggcatctcaatacctgctttcattgccctttctgttgccactgttgctgtatcaatattaggtgatctcaccgaaagtatgtttaaacgtcaaagtggcattaaagacagtagtcagctcattccgggacatggtggtattttagatcggattgatagtttaacggcggccgttccgttctttgcttatttttactttttcgtgatttcatga

SEQ ID NO: 58481 - protein, 289 aa, Pasteurella multocida subsp. multocida str. Pm70
MLKERVLSAIMLIAIVFIALFFFSPFYFALAVGVVVILAVWEWTQFAHFKWSFWRLGLTGLSAAFLFLWIYGESDYLNAGRVFENTLSLLLFSSVLWWFVALGLVISYPKGATYWGKNKLLQFAFAFLTLVPFFAGVLRLRLAHYVTDPYHGLILLLYVFILVWSADSGAYFAGRQFGKNKLAPKVSPGKSWEGVIGGLVTAGILASIFIHFTQESLLSGISIPAFIALSVATVAVSILGDLTESMFKRQSGIKDSSQLIPGHGGILDRIDSLTAAVPFFAYFYFFVIS

SEQ ID NO: 58482 - DNA, 897 bp, Escherichia coli O157:H7 EDL933
  CDS (1)..(897): transl_table=11
atgctggaaaaatctctggcaacacttttcgcgttgttaattttagcaacgctgataaaccgttttcgggtatggcggttaccggagagaaaaggggatgaagttacactacgtattcgtacctggtggggtatcgtcatttgtttttcactggtgatttcaggtccacgctggatgacgttgacgttttttgcgctgataagttttctggcattgaaagaatattgtacgcttatatccgtacattttccgcgttggttatattgggttattcctcttaactatttgcttatcggttttagttgctttgagctgtttctgttatttatacctttggctgggtttctgatattaaccacctggcgagttttagtaggtgatacctccggttttctgcataccgtgagcgccattttttggggctggataatgaccgttttcgccttgagtcatgccgcctggttattaatgttgacaaccacaaatacccagggcggggcgttactggtgttatttcttttggcgttaacagagtcaaacgatattgcacagtatttatgggggaaatcctgcggcagaagaaaagtggtccccaaagtcagcccgggaaaaacgctggaaggtctggtggggggcgtaatcaccaccatgattgcgtcactgattattggaccgttgctgacaccgctaaatacattacaggcattattagcgggtttgttaattggtattagtggtttttgcggcgatgtagtgatgtcagccgtcaaacgagatgtgggtgttaaagatagcggaaaactattaccaggacatggcggactccttgacaggattgactcattaattttcaccgctccggtatttttttattttattcgctactgctgttactga

SEQ ID NO: 58483 - protein, 298 aa, Escherichia coli O157:H7 EDL933
MLEKSLATLFALLILATLINRFRVWRLPERKGDEVTLRIRTWWGIVICFSLVISGPRWMTLTFFALISFLALKEYCTLISVHFPRWLYWVIPLNYLLIGFSCFELFLLFIPLAGFLILTTWRVLVGDTSGFLHTVSAIFWGWIMTVFALSHAAWLLMLTTTNTQGGALLVLFLLALTESNDIAQYLWGKSCGRRKVVPKVSPGKTLEGLVGGVITTMIASLIIGPLLTPLNTLQALLAGLLIGISGFCGDVVMSAVKRDVGVKDSGKLLPGHGGLLDRIDSLIFTAPVFFYFIRYCCY

SEQ ID NO: 58484 - DNA, 855 bp, Xylella fastidiosa 9a5c
  CDS (1)..(855): transl_table=11
atgacccgaacccgtgtcattgccgcgctggtcatggcacccgtcgcaatgtgttcgatcctgtttttaccaacggcctggttagcctcattgacagcaatcatcttcctatggggcttatgggaatggatgaagttgtcccaggtagaggacaccttggtacgcaccgtgctgctgacactgaacctgctgctcatggtgttattggtttgggtttcagctcacacactggtgctgtttcagattgccacgctcattggtatcgcctggtggatcctagcattgttatggctacgcttcctcggattttgtgccgaccctaaccaacgcaccgcaaagatagtcaaactcaccgcaggcacgttagcggtgattccagcgtggtctgcactggtcctactccactcaggtgataagcctggctcaacatttccagagagcttacatgcccacctgtggctgctaacggctcagataatggtatgggccgctgactccggagcgtattttgctggtcgcctctttggtaaacacaaactggcacctcagatcagccccaacaaaactgtagaaggcctcctcggcggcatactcactggattggcagtagcgactggttttggtctattgaatggcgtcaccatgacccagttcccatcactattgctcgtttcattcgtagcaatcttggcttcggtgatcggcgatttgttcgaaagcctgcttaagcgccacgccggcatcaaagattccgggagtatgattccaggccacggcggcgttctcgatcgtatcgatagcacgctcgccgcacttcccgtgttcgcactgggaaaagacatcttcggtttctga

SEQ ID NO: 58485 - protein, 284 aa, Xylella fastidiosa 9a5c
MTRTRVIAALVMAPVAMCSILFLPTAWLASLTAIIFLWGLWEWMKLSQVEDTLVRTVLLTLNLLLMVLLVWVSAHTLVLFQIATLIGIAWWILALLWLRFLGFCADPNQRTAKIVKLTAGTLAVIPAWSALVLLHSGDKPGSTFPESLHAHLWLLTAQIMVWAADSGAYFAGRLFGKHKLAPQISPNKTVEGLLGGILTGLAVATGFGLLNGVTMTQFPSLLLVSFVAILASVIGDLFESLLKRHAGIKDSGSMIPGHGGVLDRIDSTLAALPVFALGKDIFGF

SEQ ID NO: 58486 - DNA, 885 bp, Nostoc sp. PCC 7120
  CDS (1)..(885): transl_table=11
atgccttggtctcggattattagtggaattgttgcgatcgcccttgctttagttgctgtcctgttggggggttggtattttaccatcatgctggcgatcgttgttttcttaggacaacaggaatattttgatttagttcgcactagaggcattttgccagccgcgaaaactactttattccttagtcaagttttactagttacttgtactttggacagcaatttagttgatgctgtcatgcccattgcaggtacatttatttgcttttatttactatttcaaccgaaaatggccacaatcgccgatgtttcggcatcgattatgggactattttatgtagggtacttgccgagttattgggtgcggttacggtcaattggtagcacgtccatcagtaatttacctttaggaggctactggccaggaagtttgacagatattctcgaagaaagaaattttgcctctctaccccaagggttcaaaattacagtgctgacatttctgtgcatctgggcagcagacatcggtgcatatactatcggtaaattctttggcaaaacccgcctgtctgatatcagcccgaaaaaaacagttgaaggtgctgtttttggtatcagtgctagtctagccgtagccctggctggtgctttctatcttcacttaccccaatttcttttgactggcacaattttaggcttactaattggcttggctagtctattaggcgacctcaccgagtcaatgctgaagcgcgatgctggtgtgaaggactccggacaattgatccccggtcatggtggcatcttagatcgcacagatagttatatctttacagctcctttggtttactatttcgtcacgctcattttgccattacttagttaa

SEQ ID NO: 58487 - protein, 294 aa, Nostoc sp. PCC 7120
MPWSRIISGIVAIALALVAVLLGGWYFTIMLAIVVFLGQQEYFDLVRTRGILPAAKTTLFLSQVLLVTCTLDSNLVDAVMPIAGTFICFYLLFQPKMATIADVSASIMGLFYVGYLPSYWVRLRSIGSTSISNLPLGGYWPGSLTDILEERNFASLPQGFKITVLTFLCIWAADIGAYTIGKFFGKTRLSDISPKKTVEGAVFGISASLAVALAGAFYLHLPQFLLTGTILGLLIGLASLLGDLTESMLKRDAGVKDSGQLIPGHGGILDRTDSYIFTAPLVYYFVTLILPLLS

SEQ ID NO: 58488 - DNA, 1176 bp, Streptomyces coelicolor A3(2)
  CDS (1)..(1176): transl_table=11
atgaacgactcttcctggggagcgccgccacaagccgggtactgggggccgtccgaccagggacccgtccagggcgccggtccggcgggtcccgcgtacgatgcgcactacgcgcagcagactcgccccatgcccatcgtgcccgacgtacccgaacacggcggagaccaggacgacgaccaggggaccgctcggctgagcggtcccttgttccgggacgagccgtttcacgaccagccccctcgcgacgagccgtaccgcgatcagaacccgtcggcgcagccgtatgcggcggtgccgcagaatccggagcccatgcccgacgccccgcagccggcgcagtcccagccgccgccgcagaagaagagcgcggggcgtgacctgggcgccgcgataggggtgggcgtcggactcggcgtggtgatcatcgcgtcgctgttcgtcgtcaaggccgtcttcgtcggtgtgatcgcggtcgccgtcgtggtgggcctgtgggagctgaccaagcggctggaggagcgcaagggcatcaaggcgcccctcgtaccgctcgcgatcggcggcgcggcgatggtggtcgccggctacgcgcgcggcgccgagggggcgtgggtcgccatggccctcaccgcgctcgcggtcctggtctggcggatgacggagccgccggaggggtacctcaaggacgtcacggcagggctcttcgccgcgttctacgtgccgttcctggccaccttcgtcgccatgatgctggcggcggacgacggcgcctggcgcgtcctggtcttcctgatactgacggtcgtcagcgacaccggggcctacgccgtcggctggcgcttcggcaggaagaagctcgccccgcgcatcagccccggcaagacccgcgagggcctgctgggagccatcgcgttcgcgatggtggcgggtgcgctgtgcatgcagttcctgatcgacgacggtgcctggtggcagggcctgctgctcggcctcgtggtcgccgtcagcgccaccctgggcgacctcggcgagtccatgatcaagcgagacctcggcatcaaggacatgggcaccctcctgccgggccacggcggcatcatggaccgcctcgactccctcctcccgacggcaccggtggtgtggctgctgctggtgatcttcgtggggtcgtga

SEQ ID NO: 58489 - protein, 391 aa, Streptomyces coelicolor A3(2)
MNDSSWGAPPQAGYWGPSDQGPVQGAGPAGPAYDAHYAQQTRPMPIVPDVPEHGGDQDDDQGTARLSGPLFRDEPFHDQPPRDEPYRDQNPSAQPYAAVPQNPEPMPDAPQPAQSQPPPQKKSAGRDLGAAIGVGVGLGVVIIASLFVVKAVFVGVIAVAVVVGLWELTKRLEERKGIKAPLVPLAIGGAAMVVAGYARGAEGAWVAMALTALAVLVWRMTEPPEGYLKDVTAGLFAAFYVPFLATFVAMMLAADDGAWRVLVFLILTVVSDTGAYAVGWRFGRKKLAPRISPGKTREGLLGAIAFAMVAGALCMQFLIDDGAWWQGLLLGLVVAVSATLGDLGESMIKRDLGIKDMGTLLPGHGGIMDRLDSLLPTAPVVWLLLVIFVGS

SEQ ID NO: 58490 - DNA, 822 bp, Chlorobium tepidum TLS
  CDS (1)..(822): transl_table=11
gtgttgatgcaaagcaatctcatgcagagagtggcggttgccattgtgggcattccgctgttactctggctcaatatgcaaggtggtttgtattttctggggctggtgctcgcgctcagcctcatggcgacctgggagttctggcgcctggccacgcatcgggcacatccgccgtcggttgttattctgctgccgctgactgcctttgtgcagctcgatttctattacggcttcatcggctactgggaggcgattctcgccgtggtcatgcttctgtatgtgcttgaaatatggcggaaccagggttcccagttcatgaacctcggtgcgacgcttgtcggtctgctctacgtgaacctaagctttggtgcgttgctcaggctccgcttgtcggagaccaccggcgagggttccggcgaggcgctggtgctgctcatgttgctgtgtgtctgggcggcggatattttcgcctatttcggcggacgcggattcggaggcaagtttatcaaaaagaggctctttgcgcgcatcagcccgaagaagacctgggagggctatcttgctggaattgccggaagcgcgctggcggcgtgggcctgctcggcgtacatctccggctgccccgacgggcgggcgataccggcgggcctgctcatcggcgtggtcgcgcccgcaggcgacctgctcgaatcgatgttcaagcgtgatgcgggagtcaaggactcatcgggtgtcattccggggcacggcggtgtgcttgaccgctttgataccgtgatgttcgtctccccgctgctctatttcctcgtgcatcactggtga

SEQ ID NO: 58491 - protein, 273 aa, Chlorobium tepidum TLS
MLMQSNLMQRVAVAIVGIPLLLWLNMQGGLYFLGLVLALSLMATWEFWRLATHRAHPPSVVILLPLTAFVQLDFYYGFIGYWEAILAVVMLLYVLEIWRNQGSQFMNLGATLVGLLYVNLSFGALLRLRLSETTGEGSGEALVLLMLLCVWAADIFAYFGGRGFGGKFIKKRLFARISPKKTWEGYLAGIAGSALAAWACSAYISGCPDGRAIPAGLLIGVVAPAGDLLESMFKRDAGVKDSSGVIPGHGGVLDRFDTVMFVSPLLYFLVHHW

SEQ ID NO: 58492 - DNA, 876 bp, Thermosynechococcus elongatus BP-1
  CDS (1)..(876): transl_table=11
atgctctggatccgcattgctagtggacttgtcgcgatcgccctcgcgctgctaatgaccttcctgggcggttggtatttttgtctggggattggggcgctgatttatctggggcaactggaatattttgaactagcccgcgcgaaagggagtgcaccggctgctaaaacaaccctcgtcgtcagtcaagtgctgctgatcacttccctcctgcggcctgaccttgcggatgctgtctttccggttgcgggtacctttatttgtttttacctgctgtttcaacctaagctggcctcgatcgccgatatttccacctccattatgggcttgttttatggcggctatttgcccagctattgggtgcggctgcggggactagaacagcagtcaactctgcccttggggggcttctggccagaacggctgcaactgagcgactttcccttgggattgcaggtgacgctgttggcctttgcctgtatttgggcggcagatattggtgcctatgcggttgggaagctctttggccgcacccgcctctctcacatcagtcccaagaaaaccgtcgaaggagcggtgtttggcgtcttggcaagtttaggcatcgccctttggggggcctattccctcacctggccgctcccttggtttgcgggagccctgtttggtctgatgattgggattgccagcctcttgggcgatttaaccgagtcaatgatgaaacgggatgccggcgtcaaagattctgggcagttgattccgggccatggcggcattttagaccgcgccgatagctacgtattcacagcacccttggtcttttattttgtaacgctgctcttgcctatcttcgccactcgaaccggtttggattaa

SEQ ID NO: 58493 - protein, 291 aa, Thermosynechococcus elongatus BP-1
MLWIRIASGLVAIALALLMTFLGGWYFCLGIGALIYLGQLEYFELARAKGSAPAAKTTLVVSQVLLITSLLRPDLADAVFPVAGTFICFYLLFQPKLASIADISTSIMGLFYGGYLPSYWVRLRGLEQQSTLPLGGFWPERLQLSDFPLGLQVTLLAFACIWAADIGAYAVGKLFGRTRLSHISPKKTVEGAVFGVLASLGIALWGAYSLTWPLPWFAGALFGLMIGIASLLGDLTESMMKRDAGVKDSGQLIPGHGGILDRADSYVFTAPLVFYFVTLLLPIFATRTGLD

SEQ ID NO: 58494 - DNA, 816 bp, Pseudomonas putida KT2440
  CDS (1)..(816): transl_table=11
atgcttaaacaacgcatcattactgcgctgatcctgctgccggtcgcgctgggtggtttcttcctgctcaatggcggggatttcgccctgttcatcggcttcgtagtgaccctcggtgcctgggagtgggcgcgccttgccgggctgatggcccagccgctgcgcattgcctatgcagcggtggtcgcgggggcgctgatgctgctgcacatccttccggaactggcgccctgggtgctgggcgctgccgtgatctggtgggggctggccacctggctggtgcttacctacccgcgcagcagcgacctgtgggccagtgcggcctgtcggttgttgatcggcctgctggtgttgctgccggcctggcaagggctggtgctgctcaagcactggcccttgggcaactggctgatcctgtcggtcatggtgctggtgtgggccgccgacatcggtgcgtacttctctggccgggcattcggcaagcgcaagctggctccgcaggtcagcccaggcaagagctgggaaggcgtgtacggtggtctggcggtcagcctgttgattaccctgggtgtcggcatcagccgcgactggggctttggtcagatcctgctgggcctgttgggcgctgcgttgctggtgatgtcctcggtggtcggtgacctgaccgagagcatgttcaagcgtcgctccggcatcaaggacagcagcaatctgctgcccgggcatgggggtgtgctcgatcgcattgacagcctgactgccgcaatcccgatcttcgccgtgctgttgtgggctgccgaatggggtgtgatgtga

SEQ ID NO: 58495 - protein, 271 aa, Pseudomonas putida KT2440
MLKQRIITALILLPVALGGFFLLNGGDFALFIGFVVTLGAWEWARLAGLMAQPLRIAYAAVVAGALMLLHILPELAPWVLGAAVIWWGLATWLVLTYPRSSDLWASAACRLLIGLLVLLPAWQGLVLLKHWPLGNWLILSVMVLVWAADIGAYFSGRAFGKRKLAPQVSPGKSWEGVYGGLAVSLLITLGVGISRDWGFGQILLGLLGAALLVMSSVVGDLTESMFKRRSGIKDSSNLLPGHGGVLDRIDSLTAAIPIFAVLLWAAEWGVM

SEQ ID NO: 58496 - DNA, 858 bp, Escherichia coli CFT073
  CDS (1)..(858): transl_table=11
ttgctgaagtatcgcctgatatctgcttttgtgttaatacccgtcgtcatcgcggcgttgtttctgttgccgccggtggggttcgccattgtaacgctggtggtctgtatgctggcagcgtgggaatggggacagcttagcggttttaccactcgttcgcagcgagtatggttggcggtgttatgcgggttattgttggcgctgatgctttttctgttgccggaatatcaccgaaatattcatcaaccgctggttgaaatctcactttgggcttcgctgggttggtggattgtcgcgctattgctggtgctgttttacccaggttccgcagcaatctggcgtaactctaaaacattgcgcattatttttggcgtgctaaccattgttcccttcttctggggcatgctggcgttacgggcctggcactacgacgagaatcattacagtggcgcaatatggctgctctatgtcatgatcctggtatggggcgctgactctggcgcatatatgtttggcaaattgtttggtaaacataaactggcaccgaaggtttctccgggtaaaacctggcaaggctttatcggtggactcgcgaccgcagcggtaatctcatggggttatggcatgtgggtgaatctcgacgtcgctcccgtcaccttactcatttgctctattgtcgcagcgttagcctcagtgctcggcgatctgaccgaaagtatgtttaagcgtgaagcaggaattaaggacagcggtcatttaattccaggacacggtggtattttagatcgtattgatagcctgacggctgcggtaccggtctttgcttgcttgttgttactggtattcaggacgctttaa

SEQ ID NO: 58497 - protein, 285 aa, Escherichia coli CFT073
MLKYRLISAFVLIPVVIAALFLLPPVGFAIVTLVVCMLAAWEWGQLSGFTTRSQRVWLAVLCGLLLALMLFLLPEYHRNIHQPLVEISLWASLGWWIVALLLVLFYPGSAAIWRNSKTLRIIFGVLTIVPFFWGMLALRAWHYDENHYSGAIWLLYVMILVWGADSGAYMFGKLFGKHKLAPKVSPGKTWQGFIGGLATAAVISWGYGMWVNLDVAPVTLLICSIVAALASVLGDLTESMFKREAGIKDSGHLIPGHGGILDRIDSLTAAVPVFACLLLLVFRTL

SEQ ID NO: 58498 - DNA, 816 bp, Pseudomonas syringae pv. tomato str. DC3000
  CDS (1)..(816): transl_table=11
atgctgaaacaacggatcatcacggcactcattctgttgccgattgccctgtgtggctttttcctgctgaccggcatgtactttgctctttttatcggcgtagtggtcgtactgggtgcctgggaatgggcgcggttggcgggctttgctgcccagtcgatgcgtgtggggtacgcggccctggtcgctgtgctgctgtttttcatgtacctgctgccgggtcttgaaccctgggtactggtcgcggcggtcatctggtggagcgttgcgaccttccttgttctgacttatcccgattccagcagtcactgggccagtgctgcctgcaagctggtgatcggtctgctgatcctgctgcccgcgtggcaggggctggtgctcatcaagcaatggccgctgggcaactggctgatcctgtcggtgatggtgctggtgtgggcggctgacatcggcgcgtatttctccggcaaggctttcggcaggcgcaagctggctcccaaggtcagtcccggtaaaagctgggagggcgtatacggcggtctggtggtcagtctgggtatcaccgcggcagtcggtgtttggcgtgactggactgtcgttcagttcatcgccgcactgttgggtgccgctgtgatcgtgttcatttccgtgatcggtgacctcaccgaaagcatgttcaagcgccagtccggggtcaaggacagcagtaatctgctgcctgggcacggcggcgttctggaccgcatcgacagcctgacggccgccattccggtatttgccgtgctgttgtgggccgctgactggggtgtcatgtga

SEQ ID NO: 58499 - protein, 271 aa, Pseudomonas syringae pv. tomato str. DC3000
MLKQRIITALILLPIALCGFFLLTGMYFALFIGVVVVLGAWEWARLAGFAAQSMRVGYAALVAVLLFFMYLLPGLEPWVLVAAVIWWSVATFLVLTYPDSSSHWASAACKLVIGLLILLPAWQGLVLIKQWPLGNWLILSVMVLVWAADIGAYFSGKAFGRRKLAPKVSPGKSWEGVYGGLVVSLGITAAVGVWRDWTVVQFIAALLGAAVIVFISVIGDLTESMFKRQSGVKDSSNLLPGHGGVLDRIDSLTAAIPVFAVLLWAADWGVM

SEQ ID NO: 58500 - DNA, 843 bp, Vibrio parahaemolyticus RIMD 2210633
  CDS (1)..(843): transl_table=11
ttgaaacagagaataataacagcactaattttagctcccctggttattttaggtatttttaagttacccctaatgggctttattatcgcgttgacggcgataacactgttaggtttttgggagtggacacaatttacagaaagcaattctcgcattgctgcactgattccggcagccgttgttaccggacttagttttctctttatctcacctgacgcacatagcttaaaccatttgagtacacctcattatgttgtgttagggcttggttttgtgtggtggattattgcgagcttgatggcaattacttacccgaaaaccacaaaatcttggcaaggcaatcttgttttacgacatgtttttggttttctgacattactcccttttctttggagtgtaatcattctaagagcctcagacatttcggtagatccataccacggtgcaaagctcgtaatgtacgtttgcttcttggtatgggctgcagacagcggtgcttacttcgctggtaaaagtttaggcaagcgcaagatggcaccacatgttagcccaaacaaaacgattgaaggtcttattggcggtatcatcgcggcactgattgttggctggttgtttgccgattggttcaatatccagttcacgagcccaattcatatgatcatcattacgttgatcactgtcgtgatttctgtattaggtgatttagtcgaaagcatgtttaagcgtgtctctggcatcaaagacagcagtaacatcattccaggccacggtggcgtattagatcgcatcgatagcctgactgctgcatttccagtctttgctcttctatactacgtattctaa

SEQ ID NO: 58501 - protein, 280 aa, Vibrio parahaemolyticus RIMD 2210633
MKQRIITALILAPLVILGIFKLPLMGFIIALTAITLLGFWEWTQFTESNSRIAALIPAAVVTGLSFLFISPDAHSLNHLSTPHYVVLGLGFVWWIIASLMAITYPKTTKSWQGNLVLRHVFGFLTLLPFLWSVIILRASDISVDPYHGAKLVMYVCFLVWAADSGAYFAGKSLGKRKMAPHVSPNKTIEGLIGGIIAALIVGWLFADWFNIQFTSPIHMIIITLITVVISVLGDLVESMFKRVSGIKDSSNIIPGHGGVLDRIDSLTAAFPVFALLYYVF

SEQ ID NO: 58502 - DNA, 858 bp, Salmonella enterica subsp. enterica serovar Typhi Ty2
  CDS (1)..(858): transl_table=11
ttgctgaagtatcgcctgatttctgcttttgtgttaatacccgcggtcatcgctgcgctttttttattgccgccggtggggttcgccattattacgctggttgtctgtatgctggccgcgtgggaatgggggcagttaagcggtttcgccgcgcgttcacagcgggtttggctggcggtgctgtgtggtctgttattggcgctgatgttatttttgttgcctgagtatcatcacaacattcgtcaaccgctggttgagatgtcgctttgggcatcgttaggatggtgggttgtcgcgctactgctggtgctattttatcccggttcggcggcaatctggcgcaactcaaaaacattgcgtctcattttcggtttgttaactattgtgccatttttctggggcatgctggcgctgcgcgcctggcactatgacgagaatcattacagtggcgcaatatggttactctatgtcatgatcctggtctggggagcggactctggcgcgtatatgtttggtaaattgtttggcaaacataagctggcgccgaaggtttccccgggtaaaacctggcaagggtttatcggcgggcttgctacggctgccgtgatctcatggggttacggtatgtgggcgaatctgaatgttgcgcctgttatcttgctgatttgctctgtggtggcggctctggcttctgtactgggcgacctcaccgagagtatgtttaagcgcgaagcaggaattaaggatagcggccacttgatcccaggccatggcggcattctggaccgaattgacagtctgacggctgccgtaccggtctttgcttgcctgttgttactggtgttcaggacgctctaa

SEQ ID NO: 58503 - protein, 285 aa, Salmonella enterica subsp. enterica serovar Typhi Ty2
MLKYRLISAFVLIPAVIAALFLLPPVGFAIITLVVCMLAAWEWGQLSGFAARSQRVWLAVLCGLLLALMLFLLPEYHHNIRQPLVEMSLWASLGWWVVALLLVLFYPGSAAIWRNSKTLRLIFGLLTIVPFFWGMLALRAWHYDENHYSGAIWLLYVMILVWGADSGAYMFGKLFGKHKLAPKVSPGKTWQGFIGGLATAAVISWGYGMWANLNVAPVILLICSVVAALASVLGDLTESMFKREAGIKDSGHLIPGHGGILDRIDSLTAAVPVFACLLLLVFRTL

SEQ ID NO: 58504 - DNA, 858 bp, Prochlorococcus marinus subsp. pastoris str. CCMP1986
  CDS (1)..(858): transl_table=11
atgagattgcgaagtggcttattaattggattgtttgggttagttgttgttttattaggcggatggtatttcacaatagcaattgcattacttacctacattgcacttctcgaattttttagaatggcagaattcacaggaattaaaccagccaccaaaactaccttattttcttgcttcataattacaattgctacatatctagaagttattggattccttgatagagagatatacaattcaatattaccaatatgttcagtaggaatatgcacgtggttattgctgcagccaaagtcaggcaccatttcagatattgcagcatcaattttcggattattttatttaggttttttacctagttattggattaaattaagagcaatacaatcgactataaataattcttccaatggaatattatcctttgaaaatatctcaaattcgacaggtctttatttaacattaatttcatgtttattaattgtggcaagtgatataggttcttattttattggaaagtcatttggggaaagggctctttccccattatctccaagtaaaactatcgaaggtctgatcggaggaataatatgctcaatttcagtagcaaccttttttgcgtttttacttagttggcagaatccattcttaattgggattttatatggaatattagtttctcttatggcattagtaggagatttaattgaatcaatgatgaaaagagatgcgaaaattaaagattctggaacttttttacctggtcatggtggaatacttgatagaattgatagttacatttttaccccttcagttatctattatataattataattttgaggttttttaattaa

SEQ ID NO: 58505 - protein, 285 aa, Prochlorococcus marinus subsp. pastoris str. CCMP1986
MRLRSGLLIGLFGLVVVLLGGWYFTIAIALLTYIALLEFFRMAEFTGIKPATKTTLFSCFIITIATYLEVIGFLDREIYNSILPICSVGICTWLLLQPKSGTISDIAASIFGLFYLGFLPSYWIKLRAIQSTINNSSNGILSFENISNSTGLYLTLISCLLIVASDIGSYFIGKSFGERALSPLSPSKTIEGLIGGIICSISVATFFAFLLSWQNPFLIGILYGILVSLMALVGDLIESMMKRDAKIKDSGTFLPGHGGILDRIDSYIFTPSVIYYIIIILRFFN

SEQ ID NO: 58506 - DNA, 915 bp, Prochlorococcus marinus str. MIT 9313
  CDS (1)..(915): transl_table=11
gtgatagcagaggcctttcgatggagattggttgcagccggatcttccagccagcggattatcagtggcctggctgctggagctttcggtttggtggtggttgctttagggggttggtggttcacggttggtttgggtgtaatcgtgcaccttgctttgcttgagtttttccgcatggcgaagttcaccggaatcaggccggcgacgaaaacgactcttgtggcctgtcagttgttgctgatcagtacacagtggggagtggttggcgggttgccatctgatcttgctgcagcagtgctgcctctttctggcgccgccatttgcggttggttgttgcttcagccgatcaccggatccattgccgacatcgccgcctcgatctttgggttgttttacttggggtttttacccagtcattggttgcgattgcgtaatttgagtgctatcgatcttgctcctgggctgggtcagcttcctggctggtgtgcaggctggttgacttctgggatggcgatcactttggtggcttgcctgatgatcgtcgctagtgatattggctcttatgaattgggacgtcgttttggacgtctacctttatcttctatttcgcctggcaagactgtggaaggtgctgtcggaggcctgttttgcgcaatgactataggggcagttgccggtgaacttttggcttggccattggggtttttgctgggcgtggtgcttggagttttggttgcattatttgcgctggttggagacctgatcgagtcgatgatgaaacgagatgcgggtcttaaggattctggtgatgcgctgcctggtcatggcggcatccttgatcgcattgatagctatctcttcactcctgcagtggtgtattacgcagtaacgctgatcctgcctgtcatgagttaa

SEQ ID NO: 58507 - protein, 304 aa, Prochlorococcus marinus str. MIT 9313
MIAEAFRWRLVAAGSSSQRIISGLAAGAFGLVVVALGGWWFTVGLGVIVHLALLEFFRMAKFTGIRPATKTTLVACQLLLISTQWGVVGGLPSDLAAAVLPLSGAAICGWLLLQPITGSIADIAASIFGLFYLGFLPSHWLRLRNLSAIDLAPGLGQLPGWCAGWLTSGMAITLVACLMIVASDIGSYELGRRFGRLPLSSISPGKTVEGAVGGLFCAMTIGAVAGELLAWPLGFLLGVVLGVLVALFALVGDLIESMMKRDAGLKDSGDALPGHGGILDRIDSYLFTPAVVYYAVTLILPVMS

SEQ ID NO: 58508 - DNA, 897 bp, Synechococcus sp. WH 8102
  CDS (1)..(897): transl_table=11
ttgtcttcctccaacccgtcattgcgagccgccaacagcctgcgcaagcgactgcgcagcggcatcgccatcggcggcttcggcgcggtggtggttctgctggggggctggtggctcaccctcggcgtcggcgtgatcgtgcatctgggtctgctggagttcttccgcatggctcagttcaaaggaatccgcccggccaccaaaacaacgctcgtggcctgtcagttgctgctgctcaccacccagtgggcagcggttcagagcggctggcccgaggcgctgtcgggggcggtgctgcccctggccggtgccgccatctgtgcctggttgctgctgcagccgctcaccggatcgattgctgacatcgccgcctcaatcttcggactgttttatttggggtttctgcccagtcactggctggccctgcgcaacctctccgatccggccctggctcctggaacagcctggctgtgcagcagtggtctggccatcaccctctcggcctgcctgatgatcgtggcgagcgacatcggttcatgggcattcggcaagcgctacggcaggacgcctttgtccccgatctcgccgtccaaaacagtggagggtgccctcgggggattcggatgcgccatggccgtcggcctgctctgcgcgcgggtgatgggatggccgctcggtggattgccaggggtggccgtcggcgcactggtggccctgattgccctggtgggagatctgactgaatcgatgatgaaacgcgatgccggactgaaggactccggtgacgtgctgccaggccatggaggaatccttgatcgcattgacagctacctgttcaccccggccgtgctgtacgcgctgctgaccctggcgaagccgctgatcagcaccggctag

SEQ ID NO: 58509 - protein, 298 aa, Synechococcus sp. WH 8102
MSSSNPSLRAANSLRKRLRSGIAIGGFGAVVVLLGGWWLTLGVGVIVHLGLLEFFRMAQFKGIRPATKTTLVACQLLLLTTQWAAVQSGWPEALSGAVLPLAGAAICAWLLLQPLTGSIADIAASIFGLFYLGFLPSHWLALRNLSDPALAPGTAWLCSSGLAITLSACLMIVASDIGSWAFGKRYGRTPLSPISPSKTVEGALGGFGCAMAVGLLCARVMGWPLGGLPGVAVGALVALIALVGDLTESMMKRDAGLKDSGDVLPGHGGILDRIDSYLFTPAVLYALLTLAKPLISTG

SEQ ID NO: 58510 - DNA, 804 bp, Gloeobacter violaceus PCC 7421
  CDS (1)..(804): transl_table=11
atgtcggcccgcatcctcagcgcgagtgttctcatccccgtggtcctgctggccatctacctcgggggctggtttttcaccctggcgctcgcggtactggtggtgctggggcagatcgagttttttgagattgtccgccgcaagggctaccggcccaccgagaacctctgcctgggtctgagcctgacgctgcttgccattcagcagctctatccgcaactggccaatggtgcctttgtgctggccggggggctggtgtgcgtgtcgctgctgtttcgccgccagcccccggccacgatctccgatatggccaccagtcttctggggcttttctacaccggctatttgcccagtttcttggtgcagcttcgagccctcgatggattgggctatctgctgctgcttacctttgcctgcatctgggcctcggatatcggcgcgtttttcttcggcaaggctttcggccgcacaccgctcacacccatcagccccaaaaagaccgtcgaaggagcaatcttcggcacgacggcgagcattctggtcggtctggccggggccgccctgctgggctggtcgctctggcccctcaccggcgtcgtctttgggttgctcgtgggcgtgagcgggctgttgggcgacctgaccgagtcgctgatgaagcgcgatgtcggcctcaaggacgcgggcaacttgatccccggccacggcggcattctcgaccgcgccgacagctacatcttcaccgccccggtcgctttttacttcatcgatttcatcgtcctgggccgcctgccgttgccttga

SEQ ID NO: 58511 - protein, 267 aa, Gloeobacter violaceus PCC 7421
MSARILSASVLIPVVLLAIYLGGWFFTLALAVLVVLGQIEFFEIVRRKGYRPTENLCLGLSLTLLAIQQLYPQLANGAFVLAGGLVCVSLLFRRQPPATISDMATSLLGLFYTGYLPSFLVQLRALDGLGYLLLLTFACIWASDIGAFFFGKAFGRTPLTPISPKKTVEGAIFGTTASILVGLAGAALLGWSLWPLTGVVFGLLVGVSGLLGDLTESLMKRDVGLKDAGNLIPGHGGILDRADSYIFTAPVAFYFIDFIVLGRLPLP

SEQ ID NO: 58512 - DNA, 1149 bp, Arabidopsis thaliana
  CDS (1)..(1149)
atggcgacttttgctgaacttgttttatcgacttctcgctgtacatgcccttgccgttcattcactagaaaacccctaattcgtccccctttatctggtctgcgtctccccggtgataccaaaccattgtttcgttccggacttggtcggatttctgttagccggcgtttcctcacggccgttgctcgagctgaatcagaccagcttggtgatgatgaccactcaaagaatgtggaagataagcagaagaaagcaagccagcttaagaaaagagtgatctttggtattggcattggtttacctgttggatgtgttgtgttagctggaggatgggttttcactgtagctttagcatcttctgtttttatcggttcccgcgaatatttcgagcttgttagaagtagaggcatagctaaaggaatgactcctcctccacgatatgtatctcgagtttgctcggttatatgtgcccttatgcccatacttacactgtactttggtaacattgatatattggtgacatctgcagcatttgttgttgcaatagcattgttagtacaaagaggatccccacgttttgctcagctgagtagtacaatgtttggtctgttttactgtggttatctcccttctttctgggttaagcttcgctgtggtttagctgctcctgcgcttaacactggtatcggaaggacatggccaattcttcttggtggtcaagctcattggacagttggacttgtggcaacattgatttctttcagcggtgtaattgcgacagacacatttgcttttctcggtggaaagacttttggtaggacacctcttactagtattagtcccaagaagacatgggaaggaactattgtaggacttgttggttgtatagccattaccatattactctctaaatatctcagttggccacaatctctgttcagctcagtagcttttgggtttcttaacttctttgggtcagtctttggtgatcttactgaatcaatgatcaagcgtgatgctggcgtcaaagactctggttcacttatcccaggacacggtggaatattagatagagttgatagttacattttcaccggcgcattagcttattcattcatcaaaacatccctaaaactttacggagtttga

SEQ ID NO: 58513 - protein, 382 aa, Arabidopsis thaliana
MATFAELVLSTSRCTCPCRSFTRKPLIRPPLSGLRLPGDTKPLFRSGLGRISVSRRFLTAVARAESDQLGDDDHSKNVEDKQKKASQLKKRVIFGIGIGLPVGCVVLAGGWVFTVALASSVFIGSREYFELVRSRGIAKGMTPPPRYVSRVCSVICALMPILTLYFGNIDILVTSAAFVVAIALLVQRGSPRFAQLSSTMFGLFYCGYLPSFWVKLRCGLAAPALNTGIGRTWPILLGGQAHWTVGLVATLISFSGVIATDTFAFLGGKTFGRTPLTSISPKKTWEGTIVGLVGCIAITILLSKYLSWPQSLFSSVAFGFLNFFGSVFGDLTESMIKRDAGVKDSGSLIPGHGGILDRVDSYIFTGALAYSFIKTSLKLYGV

SEQ ID NO: 58514 - DNA, 858 bp, Prochlorococcus marinus str. AS9601
  CDS (1)..(858): transl_table=11
atgagattaagaagcggtctacttataggaatttttggtttaattgttgttttgatggggggatggttttttacattggcaactgcgatgcttacatatctagcattattggaattttttagaatggcagaatttaaaggaataagaccagctacaaaaaccacattattttcatcctttataattatagtttctacttatcttgagactataggtttgattgaaggagaaatttcaaattcaattttgccaatctgttcagttgggatatgtacttggttacttttgcagccaaaacctgggacaatttcagatattgcagcctctatttttggattattctatttaggttttttacctagttactggattaagttaaggggattagattcagtgataatcagttcaaatcaagggtttatatcgtttgagaacttatcaaatactacaggtctgcatttaactttaacttcttgctttttaattgtagctagtgatattggttcttatttcattgggaagtcatttggtaaaaaatctctatctccaatatctcctagcaaaactatagaaggtttaattggaggaatatcctgttcaactttactagcaatatttttcgcatttttattgaattgggaaaatccattatttgttggaataatatatggaatttcaatttctcttatggcattggttggagatttaattgaatctatgatgaagagagatgcaaaaataaaagattccggaacttttttaccgggacatggagggattcttgacagaattgacagttacatctttactccatctgttttgtattatatttttataattctcaagtatttaaattaa

SEQ ID NO: 58515 - protein, 285 aa, Prochlorococcus marinus str. AS9601
MRLRSGLLIGIFGLIVVLMGGWFFTLATAMLTYLALLEFFRMAEFKGIRPATKTTLFSSFIIIVSTYLETIGLIEGEISNSILPICSVGICTWLLLQPKPGTISDIAASIFGLFYLGFLPSYWIKLRGLDSVIISSNQGFISFENLSNTTGLHLTLTSCFLIVASDIGSYFIGKSFGKKSLSPISPSKTIEGLIGGISCSTLLAIFFAFLLNWENPLFVGIIYGISISLMALVGDLIESMMKRDAKIKDSGTFLPGHGGILDRIDSYIFTPSVLYYIFIILKYLN

SEQ ID NO: 58516 - DNA, 915 bp, Prochlorococcus marinus str. MIT 9303
  CDS (1)..(915): transl_table=11
gtgagagcagaggcctttcgatcgagattggtagcagccggatcttccagccagcggattagcagtggtctggctgccggagcgttcggtttggtggtggttgctttagggggttggtggttcacggttggtttgggtgtgatcgtgcaccttgctttgcttgagtttttccgcatggcgaagttcaccggaattaggccggcgacgaaaacgactcttgtggcctgtcagttgttgctgatcagtacacagtggggagtggttggcggcttgccatctgatcttgctgcagcagtgctgcctctctctggagcagccatttgcggttggttgttgcttcagccgatcaccggatccattgccgatatcgccgcctcgatctttgggttgttttacttggggtttttacccagccattggttgcgattgcgcaatttgagtgctctcgatcttgcccctgggctgggtcagcttcctggctggtgtgcaggctggttgacttctgggatggcgatcactttggtggcttgcttgatgatcgtcgctagtgatattggctcttatgaattgggacgtcgttttggacgcctacctttatcttctatttcgcctggcaagactgtggaaggtgctgtcggaggcctgttttgcgcaatgactataggggcagtcgccggtgagcttttggcttggccattggggtttttgctgggcgtgctgcttggagttttggttgcattatttgcgctggttggagacctgatcgagtcgatgatgaaacgagatgcgggtcttaaggattctggtgatgcgctgcctggtcatggcggcatccttgatcgcattgatagctatctcttcactcctgcagtggtgtattacgcagtaacgctgatcctgcctgtcatgagttaa

SEQ ID NO: 58517 - protein, 304 aa, Prochlorococcus marinus str. MIT 9303
MRAEAFRSRLVAAGSSSQRISSGLAAGAFGLVVVALGGWWFTVGLGVIVHLALLEFFRMAKFTGIRPATKTTLVACQLLLISTQWGVVGGLPSDLAAAVLPLSGAAICGWLLLQPITGSIADIAASIFGLFYLGFLPSHWLRLRNLSALDLAPGLGQLPGWCAGWLTSGMAITLVACLMIVASDIGSYELGRRFGRLPLSSISPGKTVEGAVGGLFCAMTIGAVAGELLAWPLGFLLGVLLGVLVALFALVGDLIESMMKRDAGLKDSGDALPGHGGILDRIDSYLFTPAVVYYAVTLILPVMS

SEQ ID NO: 58518 - DNA, 939 bp, Candidatus Protochlamydia amoebophila UWE25
  CDS (1)..(939): transl_table=11
ttgcacctgtcctttggccagattttactcctaatcatcttctggaagccattgtcgattatcaaaaaagagaaagaagatggggaggcgtataaattggcaaatcagtttaaacaacgagttgtcacaagcagcgtgactattttcttagtcattatctcgatttatttttctcatgttccttactttaaacctatttttgtattacttaatgcagcaattatctcattggctcttctcgagtattatcaattggcacattataaaggatttcaacctttaaatttattaggtgtgggaacaacaacagcttatgtcatcagcagtttttacgctggacaagaacccaatttatctgatcttcctctttttgttttattaggctgtcttctactattttttttagcctattttaataaacagttagaacccttaggtaatattgctgtcaacctattcggaattggctatgtcgtcatccctttgacatgtgctttgcaaatcaattatttttcatctcctcatataactgatggacgtttgtggctcgcctatgcacttgctgttaccaaaatgacagatgttggtggatatataagcggaaaaattttcggaaaaatcaaattagcttctcatattagccccaaaaaaactatcgaaggttccattggaggtttaatattgtctcttttgactagcctagctttttattattttgtattcccttttaaacatccaatctccttttggcaaagtatatggctaggaatagtcatcagtgtactttctcaattcggagacttatctgaatccatcttaaagagagacgctggggtcaaagatagcagtcaactaccgggtttagggggcatccttgatatgacagattctcttgtttttaccttgcctttagtgtatctttggctaaaagtttcatga

SEQ ID NO: 58519 - protein, 312 aa, Candidatus Protochlamydia amoebophila UWE25
MHLSFGQILLLIIFWKPLSIIKKEKEDGEAYKLANQFKQRVVTSSVTIFLVIISIYFSHVPYFKPIFVLLNAAIISLALLEYYQLAHYKGFQPLNLLGVGTTTAYVISSFYAGQEPNLSDLPLFVLLGCLLLFFLAYFNKQLEPLGNIAVNLFGIGYVVIPLTCALQINYFSSPHITDGRLWLAYALAVTKMTDVGGYISGKIFGKIKLASHISPKKTIEGSIGGLILSLLTSLAFYYFVFPFKHPISFWQSIWLGIVISVLSQFGDLSESILKRDAGVKDSSQLPGLGGILDMTDSLVFTLPLVYLWLKVS

SEQ ID NO: 58520 - DNA, 807 bp, Desulfovibrio vulgaris subsp. vulgaris str. Hildenborough
  CDS (1)..(807): transl_table=11
atgaccctcgccacctcacacctgcagcgcctcgtaacgggcgcggccctcgccctgctgctcaccgccggactcgccctcgggggctgggttctcgtcctgcttgcgcttgtggcgtcatcgctcgccctgctcgaattctacaccatgttctggccatgcaatgacaaactgcacatgaaggccataggcctcgtgctgggcgcgggcatgctggtggcagggcacctcgacaagccatggctcatcgtgggctgccttgccggagcctttctcgctggcgcgttgcagttcctcggcgactggggacgtggcgacgatgaaagccgcttcgccgacggccagattctcgccgcaggcctgctgtatgtccccctcctgctgctgcccgtgctgcatctttcgttacgcgaccagttgctggtggcccttgccgccttcatctccgacaccggtgcctactacatcggaacctacctcggcagagcacgcatctggccccgcgtcagccccaagaagagctgggctggcagcataggcggccttgtgctgtgcatcgccatgtgcgtgggcctcggcctgtggtggggtgtgcgaccgtggtggcagttcgccatgctgggtgtcttgctgaacgcggcctcacagctgggcgacttcttcgaatcggcactcaagcgcaccctcggcgtcaaggactcgggcacgttgcttcccggtcatggtggtctgctcgaccgcatcgacagccttctcttcgtggtgcccgtctacgccgccgccgacagcgtgctggcgttcttctga

SEQ ID NO: 58521 - protein, 268 aa, Desulfovibrio vulgaris subsp. vulgaris str. Hildenborough
MTLATSHLQRLVTGAALALLLTAGLALGGWVLVLLALVASSLALLEFYTMFWPCNDKLHMKAIGLVLGAGMLVAGHLDKPWLIVGCLAGAFLAGALQFLGDWGRGDDESRFADGQILAAGLLYVPLLLLPVLHLSLRDQLLVALAAFISDTGAYYIGTYLGRARIWPRVSPKKSWAGSIGGLVLCIAMCVGLGLWWGVRPWWQFAMLGVLLNAASQLGDFFESALKRTLGVKDSGTLLPGHGGLLDRIDSLLFVVPVYAAADSVLAFF

SEQ ID NO: 58522 - DNA, 858 bp, Erwinia carotovora subsp. atroseptica SCRI1043
  CDS (1)..(858): transl_table=11
ttgctgaagtatcgcctgattactgcttttatcttgatcccgattgttattgcggcactattcttgctgcctcctttgggattcacgcttgttacgctggctgtttgtatgttggcggcatgggaatggggtcaattggcgggctttgcctcttatggtcaacgcctgtggctcgcaattctatgtggttttttgctggcgctgatgttgttatcactcccagcttaccattactccgtgcatattccgcaaatcagtattgcgctctggtcatcgctggtgtggtggggtgttgcgctgtttttggttctgttctacccagcttccgcctcattctggcgtcattcacgcacattgcggctcgtgttcggcatcatgacgatcgtgccttttttctggggcatggttgcacttcgtcattacaattacgcgattaatccattcgctggtgcctggtggctgctgtacgtcatgctgctggtctggggagcggacagcggtgcctacatgttcggcaaactgtttggtaagcgtaaacttgcgccaaaagtctcgccgggcaaaacctgggaaggctttctcggtggtttggcaacctcagcgctaatttctttgctgtttagcctctatgcgccattaacggtggcggcatcaacgttgctgatttgttctatcgctgctgcgctggcttcggtactgggtgatttgacagaaagcatgttcaaacgtgaggcaggcatcaaagacagtagccatttgattccggggcatggtggcgtgctcgatcgtatcgatagcctgacggctgcggttcctgtgttctcttgcctgatgctgctgctgtttaaagtggcttag

SEQ ID NO: 58523 - protein, 285 aa, Erwinia carotovora subsp. atroseptica SCRI1043
MLKYRLITAFILIPIVIAALFLLPPLGFTLVTLAVCMLAAWEWGQLAGFASYGQRLWLAILCGFLLALMLLSLPAYHYSVHIPQISIALWSSLVWWGVALFLVLFYPASASFWRHSRTLRLVFGIMTIVPFFWGMVALRHYNYAINPFAGAWWLLYVMLLVWGADSGAYMFGKLFGKRKLAPKVSPGKTWEGFLGGLATSALISLLFSLYAPLTVAASTLLICSIAAALASVLGDLTESMFKREAGIKDSSHLIPGHGGVLDRIDSLTAAVPVFSCLMLLLFKVA

SEQ ID NO: 58524 - DNA, 885 bp, Symbiobacterium thermophilum IAM 14863
  CDS (1)..(885): transl_table=11
gtgagcggcgcttcggcgccctgtgagcccgaaggggccggcagccgcttgagccacagcaaagcaggtgacgtcgtgctcgttcgcatactgacgggccttgtaggtataccgctgtttctgggcctcctcttcatcgggcagtggcccttcctcgtggtcgtggcggggatgggcctcattggcttttacgagtacgcgcgcatcctgcgggcgatgggcttccgtccctccctgcccctggggtgcgcggccaccgtcgcgatcgtgctcgccgcggggctgctgccgccgcacggcgtgcacgcacaggccgtcgccgccttggcgacgctggtcatcctggcctgggcaatcttccggccggagggtttttccgcgctggacggccttctgaccctggccggcgtggcctacgtcggcctgctgagctacctcgtcctgctgcgcaggctggggggcggctccggatgggatctgggcctcgtctgggccgggatggccttcctgtgcacctgggccgccgacaccctggcctacttcgtgggcgtcacctgggggcggcacaagctggccccgaagatctcgccccagaagtccgtggaggggctgctgggcggcgtcgccggcgccttactggccgggctgctctggggaccggcgattcccctcgcccggtggcagggggccctgctgggggcggcgatcgccctggtcgccgcgatgggagacttggtggagtcggccctgaaacgcaccgcgggcgtaaaggacgcgggccggttgctgccgggccacggcggcgtgctcgaccgcttcgacagcagcctgttcgtgttgccgttcgtgtattacgttgcgactctattattcggcgcgggataa

SEQ ID NO: 58525 - protein, 294 aa, Symbiobacterium thermophilum IAM 14863
MSGASAPCEPEGAGSRLSHSKAGDVVLVRILTGLVGIPLFLGLLFIGQWPFLVVVAGMGLIGFYEYARILRAMGFRPSLPLGCAATVAIVLAAGLLPPHGVHAQAVAALATLVILAWAIFRPEGFSALDGLLTLAGVAYVGLLSYLVLLRRLGGGSGWDLGLVWAGMAFLCTWAADTLAYFVGVTWGRHKLAPKISPQKSVEGLLGGVAGALLAGLLWGPAIPLARWQGALLGAAIALVAAMGDLVESALKRTAGVKDAGRLLPGHGGVLDRFDSSLFVLPFVYYVATLLFGAG

SEQ ID NO: 58526 - DNA, 867 bp, Mannheimia succiniciproducens MBEL55E
  CDS (1)..(867): transl_table=11
ttgcttaaagaacgtattttatcggcaattgcgttaattgccgtggtatttgccgctttatttttattttctcctttttactttgctctttgtttgggcgcggtggtcacgcttggtgtgtgggaatggacacagtttgccaaaattaaaaccgaagtttggcgatatgttatcagtgctattgcaggcacgtttttgttcctttggatttatagtcatcatagttatcttaatgccggcagagtgtttgacggtttagccgagccgttgttacttgccgccgttatttggtggattgccgcattctttttagtaataaattatcctaaatccgcttcaatctggagtaagtctttaattttgcaaattatttttgcattcttcacgttgttaccgttttttatcggtgtacttaaattacgtttagacggttatatcatagatgctcatcacggcgtggtattattgctttacgtatttattttggtctgggcggcggatagcggcgcttattttgtcggtcgaaaattcggaaaacataaattagcacctaaagtatcgcccggaaaaacctggcaaggcgtaatcggcggtttaattaccgcttgcgtgctggcttttatttttcaaactattgccggcgagtctttatttaatcgcggttcgactttctctttaactctgttatcggttgccacggtggcaatttccgtgctgggcgatttaacggaaagtatgtttaaacgagagagcggaatcaaagacagcagtcaactaattcccggccacggcggtatattggatcgtattgacagtcttaccgcagccgtaccgttttttgcttatttttatttctttgtgctgtaa

SEQ ID NO: 58527 - protein, 288 aa, Mannheimia succiniciproducens MBEL55E
MLKERILSAIALIAVVFAALFLFSPFYFALCLGAVVTLGVWEWTQFAKIKTEVWRYVISAIAGTFLFLWIYSHHSYLNAGRVFDGLAEPLLLAAVIWWIAAFFLVINYPKSASIWSKSLILQIIFAFFTLLPFFIGVLKLRLDGYIIDAHHGVVLLLYVFILVWAADSGAYFVGRKFGKHKLAPKVSPGKTWQGVIGGLITACVLAFIFQTIAGESLFNRGSTFSLTLLSVATVAISVLGDLTESMFKRESGIKDSSQLIPGHGGILDRIDSLTAAVPFFAYFYFFVL

SEQ ID NO: 58528 - DNA, 816 bp, Pseudomonas syringae pv. phaseolicola 1448A
  CDS (1)..(816): transl_table=11
atgctgaaacaacggatcatcacggcactcattctgttgccgatcgccttgtgtggttttttcctgctgaccggcatgtatttcgccctgttcatcggggttgttgtcgtgctgggtgcctgggaatgggcgcggctcgcaggttttgctgcgcagtcgatgcgcatcggttatgcggctgtggtcgcaattctgctattcctcatgtacctgctgccagggttggagccctgggtgctcgtcgctgcagtcatctggtggggcgtggcgacctttctggttcttacctatccggactccagtagccactgggcaagcgcggcctgcaagctggtgatcggtcttttgattttgctgcctgcctggcaggggttggtgctgatcaagcagtggccgctgggtaactggctgattctgtcagtgatggtgctggtctggtctgccgacattggcgcctatttctccggcaaggcgttcggcaagcgcaaactggcccccaaggtaagtccgggcaagagctgggaaggcgtatacggcggtcttgcggtcagtctgggcatcacggctgctgtgggcgtttctcgtgactggacggttgctcagttcatcgccgggcttcttggcgctgctgtgattgtgttcatctccgtaattggcgacttgactgaaagcatgttcaagcgccagtcaggggtcaaggacagcagcaacctgctgcctgggcacggcggtgtgcttgaccgtatcgacagccttactgcggccattccggtatttgccgttctgctatgggccgccgactggggtgtcatgtga

SEQ ID NO: 58529 - protein, 271 aa, Pseudomonas syringae pv. phaseolicola 1448A
MLKQRIITALILLPIALCGFFLLTGMYFALFIGVVVVLGAWEWARLAGFAAQSMRIGYAAVVAILLFLMYLLPGLEPWVLVAAVIWWGVATFLVLTYPDSSSHWASAACKLVIGLLILLPAWQGLVLIKQWPLGNWLILSVMVLVWSADIGAYFSGKAFGKRKLAPKVSPGKSWEGVYGGLAVSLGITAAVGVSRDWTVAQFIAGLLGAAVIVFISVIGDLTESMFKRQSGVKDSSNLLPGHGGVLDRIDSLTAAIPVFAVLLWAADWGVM

SEQ ID NO: 58530 - DNA, 999 bp, Anabaena variabilis ATCC 29413
  CDS (1)..(999): transl_table=11
atgagaatggagagtagggggagcaaaagagaaaacaaacccccagtacccaatccccagtacccaatccccattaccccttatccccagtacccaaccccgaatacttctatgccttggtctcggattattagtggaattgttgcgatcgcccttgctttagttgctgtcctgttggggggttggtatttcaccatcatgctggcgattgttgttttcttaggacaacaggaatattttgatttagttcgcactagaggtattttgccagctgcgaaaaccactttattccttagtcaagttttactagttacttgtactgtggacagcaatttagttgatgctgtcatgcctattgcaggtacatttatttgcttttatttactatttcaaccgaaaatggccacaatcgccgatgtttcggcatcgattatggggcttttttatgtcgggtacttaccgagttattgggtgcggttgcgttcaattggtaccacagccatcagtaatttacctttagggggctactggccaggaagtttgacagatattcttgaagaaagaaattttgcctctctaccccaaggtttgaaaatcacagtgctgacatttctgtgcatctgggcagcagacattggtgcatatactattggtaaattcttcggcaaaactcgtctgtctgatatcagcccgaaaaaaacagtggaaggtgctgtttttgggatcagtgctagtttagcagtagctctggctggcgcttactaccttcacttacccaaatttcttttgactggaacaattttaggcttactaattggcttggctagtcttttgggcgatcttactgagtcaatgctaaagcgtgatgctggtgtaaaggactctggacaattgatccccggtcatggtggcattttagatcgcacagatagttatatcttcactgcccctttggtttactatttcgtcacgctcattttgccattgcttagtcaatag

SEQ ID NO: 58531 - protein, 332 aa, Anabaena variabilis ATCC 29413
MRMESRGSKRENKPPVPNPQYPIPITPYPQYPTPNTSMPWSRIISGIVAIALALVAVLLGGWYFTIMLAIVVFLGQQEYFDLVRTRGILPAAKTTLFLSQVLLVTCTVDSNLVDAVMPIAGTFICFYLLFQPKMATIADVSASIMGLFYVGYLPSYWVRLRSIGTTAISNLPLGGYWPGSLTDILEERNFASLPQGLKITVLTFLCIWAADIGAYTIGKFFGKTRLSDISPKKTVEGAVFGISASLAVALAGAYYLHLPKFLLTGTILGLLIGLASLLGDLTESMLKRDAGVKDSGQLIPGHGGILDRTDSYIFTAPLVYYFVTLILPLLSQ

SEQ ID NO: 58532 - DNA, 867 bp, Synechococcus sp. CC9605
  CDS (1)..(867): transl_table=11
gtgatccgtgaggttgtcctcgagcagagccaagcgccagcggcccgagcagcgctgcgcaagcgattgatcagtggcctgggtgtgggcggctttggcctgctggtggtgagcctgggcgggtggtggttcaccgccgcgctggggggaatggtgcacctcggcctgctcgagttcttccggatggcgcaattcaagggaattcgccccgccacaaaaaccaccttggtggcttgccaactgctgctgttcaccacccagtgggcgattcagggcgggctgccggctgatgtggcccatgccgttctgccgctctccggagccgccatctgcggttggctgctgctgcaaccggtgacgggttccatcgccgacattgcggcatcgatcttcgggttgttctacctcggctttctgcccagccactggctgagtctgcgcggtttggacaacggcctggagatcaccctgtcggcctgcctgatgatcgtcgccaccgacatcggctcctgggccgtgggacggcgctacgggcgacggcccctctcaccgatctcccccgggaaaaccatcgaaggggcgatcggtggattcatgtcggccatgctggtcggcctggtctgcggcaagctgatggtctgggccctgcatggcctaccgggcctgctgctgggggcactgatcgctctgttcgccctggtgggagacctgaccgaatcgatgatgaaacgcgatgcaggcgtgaaggattccggtgatgttcttcccggccatggcgggatcctggaccggatcgacagttatctgttcaccccagcggtggtcttctacgcgattgctctttgccaaccactgttggcgtcgtaa

SEQ ID NO: 58533 - protein, 288 aa, Synechococcus sp. CC9605
MIREVVLEQSQAPAARAALRKRLISGLGVGGFGLLVVSLGGWWFTAALGGMVHLGLLEFFRMAQFKGIRPATKTTLVACQLLLFTTQWAIQGGLPADVAHAVLPLSGAAICGWLLLQPVTGSIADIAASIFGLFYLGFLPSHWLSLRGLDNGLEITLSACLMIVATDIGSWAVGRRYGRRPLSPISPGKTIEGAIGGFMSAMLVGLVCGKLMVWALHGLPGLLLGALIALFALVGDLTESMMKRDAGVKDSGDVLPGHGGILDRIDSYLFTPAVVFYAIALCQPLLAS

SEQ ID NO: 58534 - DNA, 858 bp, Prochlorococcus marinus str. MIT 9312
  CDS (1)..(858): transl_table=11
atgagattaagaagcggattacttataggaatttttggtttaattgttgttttgttggggggatggttttttacattagcaacagctttgcttacttatttagcattattggaattttttagaatggcagaatttaaaggaataaaaccagctacaaaaacaacattattttcatctttcgctattataatttcgacttatcttgagaccattggtttgcttgaaggagaaatatcaaattcaattttgccaatctgttcagttgggatatgcacttggttgcttttgcaaccaaaacctgggacaatttcagacattgccgcctctatttttgggttattctatttaggttttttacctagttactggattaagttaaggggattagattcagtgataataagttctaataatggttttatttcgtttgaaaacttatcagatactacaggtattcatttaactttaacttcttgttttttaattgtagctagtgatattggttcttatttcattgggaagttatttggtaaaacatctctttctccaatatctcccagcaaaactatagaaggtttaattggaggaatatcctgttcaattttacttgcaatatttttcgcatttctactgaattgggaaaaaccattattagttggtatcttgtatggaattttaatttctcttatggcattggttggagatttaattgagtcaatgatgaagagagatgcaaaaataaaagattccggaacttttttacccggacatggaggtattcttgacagaattgacagttacatctttactccatctgttttatattatatttttataattctcaaatatctaaattaa

SEQ ID NO: 58535 - protein, 285 aa, Prochlorococcus marinus str. MIT 9312
MRLRSGLLIGIFGLIVVLLGGWFFTLATALLTYLALLEFFRMAEFKGIKPATKTTLFSSFAIIISTYLETIGLLEGEISNSILPICSVGICTWLLLQPKPGTISDIAASIFGLFYLGFLPSYWIKLRGLDSVIISSNNGFISFENLSDTTGIHLTLTSCFLIVASDIGSYFIGKLFGKTSLSPISPSKTIEGLIGGISCSILLAIFFAFLLNWEKPLLVGILYGILISLMALVGDLIESMMKRDAKIKDSGTFLPGHGGILDRIDSYIFTPSVLYYIFIILKYLN

SEQ ID NO: 58536 - DNA, 867 bp, Synechococcus elongatus PCC 7942
  CDS (1)..(867): transl_table=11
atgccttggacccgcattctcagtggcacggtggcgatcgcgatcgctctgggattgctgacgttgggcggctggtatttcacctgtggccttggaattatggtctaccttggcctggaagaatatttccagttggtgcgcctcaagggaatgatgccggcggcacggacgaccttggtcgtcagtcaactgttgctgattgtcgcgaacctcaacccttccctcaccgatgcgatcctgccagtaacagccattctgatctgcgcttggctgcaatttaagcccaagccctccagcattgccgacattgccgcctcaattctgggcctgttttacaccggctatctgcccagctactgggtgcgcctgcgatcgctcggatcggctgccagtagtaatctccccctcggcggcttctggcccgatcgctggctaccgtttaaccaattaccgccaggtctagccctactgttgctggccttcctctgcatttgggccgctgacatcggcgcctacttcatggggcgttggtggggacgcaccaagctcacccaagtcagccccaagaagaccgtggaaggcgcgatttctggcctacttggcagcatgaccgtcgccactatcggggccttttccttagcttggccctatccattgctcaccggcttgggcttgggcctgatcatcggcggctgtagcttgctgggcgacctaaccgaatcgatgatgaaacgggatgctggcgtcaaagactccggtcagatcattcctggacacggtggcatccttgatcgcaccgacagctacatctttacggcaccgatgatgtactacttcgtgacgctgctgctaccgctgttgcgttag

SEQ ID NO: 58537 - protein, 288 aa, Synechococcus elongatus PCC 7942
MPWTRILSGTVAIAIALGLLTLGGWYFTCGLGIMVYLGLEEYFQLVRLKGMMPAARTTLVVSQLLLIVANLNPSLTDAILPVTAILICAWLQFKPKPSSIADIAASILGLFYTGYLPSYWVRLRSLGSAASSNLPLGGFWPDRWLPFNQLPPGLALLLLAFLCIWAADIGAYFMGRWWGRTKLTQVSPKKTVEGAISGLLGSMTVATIGAFSLAWPYPLLTGLGLGLIIGGCSLLGDLTESMMKRDAGVKDSGQIIPGHGGILDRTDSYIFTAPMMYYFVTLLLPLLR

SEQ ID NO: 58538 - DNA, 789 bp, Moorella thermoacetica ATCC 39073
  CDS (1)..(789): transl_table=11
atgcttgctgccaggctggtagtagccctggtgggtatcccgttactactaggagtaacatttctgggcggttggtggcttaacctcctggccgaattgataaccctggtgggattgatggagttttaccacctggctaagcggatgcaactaaaacccatggtaccggccggcctcctgggtggcctcttcctgatcccggtagcatatcttagtaaaggaatgccggcatggttcctggtagtcgtaacactgggcttgttgttcctttttctgttaatgtttccacgcctcggggtggccgacctggcggtgaccttcctgggcatctggtatgtaggaggcctggtggcttacctgcccttaatacgcctgttgcccggtggtgccggggcccttaccatggtcttcctgttaacctgggccaccgatagcggcgcctatttttgcgggctcctctttggccgccgtcatccctggccccgcttaagccccggtaagacctgggccggggcaatcggggggctgttcgggagcatactcatagccctggcaattggcccgttgctattgccgggcctgagctactggcttttgggggtgctggcaatcctggtggcggttactgcccaggcaggtgatttaatcgaatccggattaaaacgccaggcaggggtgaaggacagcggctggctcttacccggtcatggcggcattttagaccgctttgacagtttgcttctggttgcaccggtggtatactattatctggtctttttcttgtcttaa

SEQ ID NO: 58539 - protein, 262 aa, Moorella thermoacetica ATCC 39073
MLAARLVVALVGIPLLLGVTFLGGWWLNLLAELITLVGLMEFYHLAKRMQLKPMVPAGLLGGLFLIPVAYLSKGMPAWFLVVVTLGLLFLFLLMFPRLGVADLAVTFLGIWYVGGLVAYLPLIRLLPGGAGALTMVFLLTWATDSGAYFCGLLFGRRHPWPRLSPGKTWAGAIGGLFGSILIALAIGPLLLPGLSYWLLGVLAILVAVTAQAGDLIESGLKRQAGVKDSGWLLPGHGGILDRFDSLLLVAPVVYYYLVFFLS

SEQ ID NO: 58540 - DNA, 831 bp, Myxococcus xanthus DK 1622
  CDS (1)..(831): transl_table=11
gtgaacgacaagaaccgaaacctcgtcatccgcgtcgtctccgcggtgacactgctgccgctggtcctcctgctgctgttcctcggtggttactggagcgcggccctgctgggcgccgccgccgccgcgtgcgtgggtgagtactacctcatcgtccagaagcgcctgacggtggcctcgtgggttggaatggccttcgccgcggtgctgcctttcctgcccatgcgggacgcggcgcgcacgggcgagacggccttctggctcaccatcgtcttcgcgttcttcgcgtggatctaccacctcttcaagggaccgctggcggaggcgcccacccgcacggcgcacctggtcaacggcttcctctacggcgcggtgggcctcacggccgtgtccgcgctgcgcctgttgcccgaccacggcttggcctgggtcatctgcgcgctggtcatcacctgggccaatgacaccgccgcctacttcttcgggcggttcctggggaagcacaagctctacccggaggtgagccccaacaagacctgggagggcttcttcgggggcatgctgggctcggtgggcggtatgttcattgcccggcagttcttcttccccgtgttcacggtgtgggactgcgtgctgctgggcatcgccggcggcatcctggggccggtgggcgacctgtgtgagtccatgctgaagcgggcctacggggtgaaggactcgggcgtcctcatccccgggcacggtggcgtgttggatcgcatcgacgcgctcctgttcaacgcgcccctggtgttcgtctacgtgcagttcgtccggggtctgctgccctag

SEQ ID NO: 58541 - protein, 276 aa, Myxococcus xanthus DK 1622
MNDKNRNLVIRVVSAVTLLPLVLLLLFLGGYWSAALLGAAAAACVGEYYLIVQKRLTVASWVGMAFAAVLPFLPMRDAARTGETAFWLTIVFAFFAWIYHLFKGPLAEAPTRTAHLVNGFLYGAVGLTAVSALRLLPDHGLAWVICALVITWANDTAAYFFGRFLGKHKLYPEVSPNKTWEGFFGGMLGSVGGMFIARQFFFPVFTVWDCVLLGIAGGILGPVGDLCESMLKRAYGVKDSGVLIPGHGGVLDRIDALLFNAPLVFVYVQFVRGLLP

SEQ ID NO: 58542 - DNA, 858 bp, Mesorhizobium sp. BNC1
  CDS (1)..(858): transl_table=11
atgagcgaggctgcttcgccgcttggcagccccggaacgggcccgagcaacctgacgcttcgtattgtttctgccatcatactggcgctgctggcgctggggcttacctatctgggcgggtttgcattccggcttttcgcttccgcgctggccgtgcttgttttttatgagtggactgccatgaggccggccgagagccgtatccacacggctgtttcgtggggcgcgctcgcggttttcctgcttgctttgctggctgccgtttcagcaccggcggcacttgcaatgcttcttatctgttttctggtggcgctagtacatggcggcttttccggcgatgaccggtggagcgcatatggaattgcctatgccggaatacctgcgaccgcgctggcttatctgcgcggagacgatagcgcgggtttgatcgcgatcctcttcctttacgccgttgtctgggccacggatatcctcgcctatttcgttgggcgagctgttggaggaccgaagcttgcgccgtccatttctcccggaaagacctggagcggcgctgcgggcggcgcggtcggaggcattctggccggtgggctggtcgcttatctttccggcgcggcgctgcccttttgggccgtgctccttcttgcgctgctgctttcccttgtgtcgcagctgggtgatcttttcgaatcgatgatcaagcgtcgcagcggcgtgaaggattctggctccttcatccctggccatggcggcgtcatggatcgggttgatgggcttgtcgccgccgccctggtcctttatctgctgggcgtcatcttttcaggacacgcggcacccgccggtcttttctccccgcgatag

SEQ ID NO: 58543 - protein, 285 aa, Mesorhizobium sp. BNC1
MSEAASPLGSPGTGPSNLTLRIVSAIILALLALGLTYLGGFAFRLFASALAVLVFYEWTAMRPAESRIHTAVSWGALAVFLLALLAAVSAPAALAMLLICFLVALVHGGFSGDDRWSAYGIAYAGIPATALAYLRGDDSAGLIAILFLYAVVWATDILAYFVGRAVGGPKLAPSISPGKTWSGAAGGAVGGILAGGLVAYLSGAALPFWAVLLLALLLSLVSQLGDLFESMIKRRSGVKDSGSFIPGHGGVMDRVDGLVAAALVLYLLGVIFSGHAAPAGLFSPR

SEQ ID NO: 58544 - DNA, 849 bp, Cytophaga hutchinsonii ATCC 33406
  CDS (1)..(849): transl_table=11
atgagtaatttactacaacgtatcattacaggcgttcttggtgccgcatttatgctgacagctatctggtttagcttttacagttttgctgccatcttttttttagttactgtacttagcagctatgaataccaccaactgcttacaaaaacaggaataccaaacaatgcaggtgccggcatagcgggcagcattttagtatatgtgctttttacaatgcaggcattgcattttaatatgagcgctattctgattgcactaccttgtttattattcatggtttacatgctgattgaacttttctcccaaaaagatcaacccattacacgtgtagcttataccattgccggaattttatatatagcagtgccatttggattgcttacgcttattccgtggagctatccgtctggcggatgtatacgatgggagcatgatgcacgtgcctatcagtttgaaattatattcgcactgttgtttttaatctgggcaaatgatgtaggcgcttattttgttggaaaaacgattggaaaacataaattatttgaacgtatttcacctaaaaaaacatgggaaggttccatcggaggtttagcaacagctatgcttttctcctatttattgtattatttctacgggattttcagtattcctgtatggatgggattatgtgtaattgttgttatttcaggaagtctgggagatttagtagaatcgatgattaaaaggacgcttcaggtgaaagattcaggtactttattgcccgggcacggcggttttttagaccggtttgacgcgctgatttttgcaattccgtttgtttacacctacttaacacttacgcaatag

SEQ ID NO: 58545 - protein, 282 aa, Cytophaga hutchinsonii ATCC 33406
MSNLLQRIITGVLGAAFMLTAIWFSFYSFAAIFFLVTVLSSYEYHQLLTKTGIPNNAGAGIAGSILVYVLFTMQALHFNMSAILIALPCLLFMVYMLIELFSQKDQPITRVAYTIAGILYIAVPFGLLTLIPWSYPSGGCIRWEHDARAYQFEIIFALLFLIWANDVGAYFVGKTIGKHKLFERISPKKTWEGSIGGLATAMLFSYLLYYFYGIFSIPVWMGLCVIVVISGSLGDLVESMIKRTLQVKDSGTLLPGHGGFLDRFDALIFAIPFVYTYLTLTQ

SEQ ID NO: 58546 - DNA, 882 bp, Trichodesmium erythraeum IMS101
  CDS (1)..(882): transl_table=11
atgtcttggtctcgaatagttagtggacttgtagcaattgcggtagctctgggaatgattatctttgggggatggtggtttacagcaggcatgggagtcatagtttacctaggccaactcgaatattttcaactagctagtactaaaggtattgtaccagcagccaaaactactctagggctaagtcaagtcatgttagtagtagcagctctcaatcctaatttagtagatgccatatttacattagcaggaactataatctgtttttatctactgtttcagccaaaattagcaagtatagctgacatagcatcatcaattttaggtctattttatggtggatatctacctagctattggattagactcagagttggatttgaagctcaattacagatatcccaaataactttagaaaactacgagtatacttcatggatagaccctttgagttggccttcgagcttaacatttactctgcttggtttttgctgtatatgggctgctgatataggtgcttattttgtcgggaagttctttggtcgaattagactttcagaaataagcccgaaaaagactgtggagggtgcagtatttggagttttaggtagtgtaggagtagctacaataggttcttggtacttagattggcctggttccccttggacaggtgctgtcttagggttaatagtaggtattgctagcctacttggagacttaacggaatcaatgatgaaacgagatgcaggtgttaaagattctggacaactcatacctggacatggaggaattcttgaccgcactgacagttatgtttttactgcaccccttatatattattttttcaccttacttttaccagccctcaaaaattataattag

SEQ ID NO: 58547 - protein, 293 aa, Trichodesmium erythraeum IMS101
MSWSRIVSGLVAIAVALGMIIFGGWWFTAGMGVIVYLGQLEYFQLASTKGIVPAAKTTLGLSQVMLVVAALNPNLVDAIFTLAGTIICFYLLFQPKLASIADIASSILGLFYGGYLPSYWIRLRVGFEAQLQISQITLENYEYTSWIDPLSWPSSLTFTLLGFCCIWAADIGAYFVGKFFGRIRLSEISPKKTVEGAVFGVLGSVGVATIGSWYLDWPGSPWTGAVLGLIVGIASLLGDLTESMMKRDAGVKDSGQLIPGHGGILDRTDSYVFTAPLIYYFFTLLLPALKNYN

SEQ ID NO: 58548 - DNA, 921 bp, Synechococcus sp. CC9311
  CDS (1)..(921): transl_table=11
gtgatttcagacgtagcgagcagcagccaaggcaaaaccaagaagggttttgatcgcaagcgcttgctcagtggattgctggctggcgcttttggcttgctggtggtgggcctcggcgggtggtggttcacgctcgcgttgggggtgatcgtgcatctgggtttgttggaatttttccgaatggcccagttcaaaggcatgaggcctgccacaaaaacaacgctcgtggcatgccagctcttgctcttcagcacgcagtgggccaattcaggaggtcttccggctcttttacctgatgcagtgctgcctttatcgggtgcagcaatctgtggttggttgttattgcagcccgtaacaggatcgattgccgacattgccgcttcaattttcggtttgttttatctcggtttcttgccaagccattggttaagacttcgcaatctcactgattttgatgttgctcccattttgcaacgtttaagtcttgataattcctggctttcatcgggattattgatcacacttgctgcctgtttgatggtcgttgcgagtgatattggctcttacatgattggtcgtcgatttgggcgtcatcctttgtctcctatctctccgtcgaaaacgattgagggggcaatcggaggtgcgttgtgctctgttgtggtgggagctttgatggcaagtgttatggggtggactctggggtggttgagtggaggcttgcttggagcattggtggctctctttgcgctcgtcggagatctcactgagtcgatgatgaaacgagatgcaggtgttaaagattctggcgatgctctccctggtcatggggggatccttgaccggattgatagttatttattcactcctgcggtggtgtattacgccttggttttggtgatgcctttgatcgcaagttag

SEQ ID NO: 58549 - protein, 306 aa, Synechococcus sp. CC9311
MISDVASSSQGKTKKGFDRKRLLSGLLAGAFGLLVVGLGGWWFTLALGVIVHLGLLEFFRMAQFKGMRPATKTTLVACQLLLFSTQWANSGGLPALLPDAVLPLSGAAICGWLLLQPVTGSIADIAASIFGLFYLGFLPSHWLRLRNLTDFDVAPILQRLSLDNSWLSSGLLITLAACLMVVASDIGSYMIGRRFGRHPLSPISPSKTIEGAIGGALCSVVVGALMASVMGWTLGWLSGGLLGALVALFALVGDLTESMMKRDAGVKDSGDALPGHGGILDRIDSYLFTPAVVYYALVLVMPLIAS

SEQ ID NO: 58550 - DNA, 882 bp, Nostoc punctiforme PCC 73102
  CDS (1)..(882): transl_table=11
atgccttggtctcggattattagtggaattgttgcgatcgctcttgctctttctgttacccttttgggtggctggtactttaccatcatgtttgcggttgtcatctttttgggtcaacaggaatattttaatttggtgcgagccagaggcatcgctcccgccgctaaaaccactatggctgtcagcctatttttgctagtaatttgtactattgatggcagtttagctgacgctgtgatgcccttagctggcacacttatctgtttttacctgttatttcagcccaaatttgccacgatcgccgatgtttctgcttctataatggggctattttacgtaggttatttgccgagttactgggtacgattacgagcaattgatagtgccgtttttagcaatctacctttagggggttactggcctacaacctgggcagacttctgggaaaaggcaagttatgcttctttaccacaaggttttacagcaacaatgctgacttttttgtgtatttgggcagctgatattggtgcttacaccattggcaaattctttgggaaaacccgtctgtctgagattagccccaagaaaactgtagaaggtgctgtatttggcattacttcaagtgttgctgtagccatagcaggagcctattatctccacttgcccagatccttgttgactggtttagcattgggtttgttgattggcattgctagtcttttaggggatcttaccgagtctatgctcaagcgggatgctggagtcaaagattctggacagttaattcccggtcacggtggtattttagaccgtactgatagttatattttcacagcacctttggtttattattttgtgacactactgttgccgctactatag

SEQ ID NO: 58551 - protein, 293 aa, Nostoc punctiforme PCC 73102
MPWSRIISGIVAIALALSVTLLGGWYFTIMFAVVIFLGQQEYFNLVRARGIAPAAKTTMAVSLFLLVICTIDGSLADAVMPLAGTLICFYLLFQPKFATIADVSASIMGLFYVGYLPSYWVRLRAIDSAVFSNLPLGGYWPTTWADFWEKASYASLPQGFTATMLTFLCIWAADIGAYTIGKFFGKTRLSEISPKKTVEGAVFGITSSVAVAIAGAYYLHLPRSLLTGLALGLLIGIASLLGDLTESMLKRDAGVKDSGQLIPGHGGILDRTDSYIFTAPLVYYFVTLLLPLL

SEQ ID NO: 58552 - DNA, 867 bp, Haemophilus influenzae R2846
  CDS (1)..(867): transl_table=11
atgcttaaacaacgagttttatctgctattgtgttaattgctgcagttttatgtgcactatttttattcacacctttttattttgccctcgctttaggggcggtagcgattttaggcatttgggaatggactcaatttgctcgcctaaaacaacctttgatacgtttttttgtgactacctttttaggcgtatttatcttcttatggctctatactgagggcaactatttagatgcagggcgtgtgtttgaacaacatcttcagcttttattgataaatgctgttagctggtggggtttagctttgttacttgtgatcagttaccctaaatcagctaaattttggtctaaaaatccacttttacaacttttatttgccttttctacgttgattccatttatcgcaggtgtattacgtttacgtttagaacactatacccatgatccttatcacggcttatttttattactttacgtatttgtacttgtttgggcggctgattctggtgcttattttagcggacgcgcctttggcaaacgtaaacttgcccctaaagtatcgccaggtaaaagttgggaaggggttattggtggattaattacagcattagtgcttgcttttatctttattcatttctctaacaatactttagtaggcaatcgaaatattactggatttatcattctttctgtagcgacagttgcaatttcagtattgggcgatttaactgaaagtatgtttaaacgtgagtcaagagttaaagacagtagccaattgattcctggtcatggcggtgtattagatcgcattgatagcttgactgccgcggtaccttttttcagctacttctatttctttgtgttataa

SEQ ID NO: 58553 - protein, 288 aa, Haemophilus influenzae R2846
MLKQRVLSAIVLIAAVLCALFLFTPFYFALALGAVAILGIWEWTQFARLKQPLIRFFVTTFLGVFIFLWLYTEGNYLDAGRVFEQHLQLLLINAVSWWGLALLLVISYPKSAKFWSKNPLLQLLFAFSTLIPFIAGVLRLRLEHYTHDPYHGLFLLLYVFVLVWAADSGAYFSGRAFGKRKLAPKVSPGKSWEGVIGGLITALVLAFIFIHFSNNTLVGNRNITGFIILSVATVAISVLGDLTESMFKRESRVKDSSQLIPGHGGVLDRIDSLTAAVPFFSYFYFFVL

SEQ ID NO: 58554 - DNA, 888 bp, Crocosphaera watsonii WH 8501
  CDS (1)..(888): transl_table=11
atgccttggactcgaatcattacagctattgtagctattttcctcgccttgggaatgttaattatcgggggatggtactttacccttggactttgtgtcatagtctttttgggacaactggagtattttcaattagttcgcgccaaagggatcgcccccgcagcgaaaacaaccctggttgtgtctcaaatcttactaattagttcggcgatcgctccacccctaaccgatgcgttattcccgttaactggggctttaatctgtttttacctattatttcaaccaaaattagccagtattgctgatatttctacctcagtcttagggctattttatggaggatatttacccagttattgggtaagattacgagtagggtttgcccatgcagttcccacggtggatgtagcgagtattaacttaccgtttatggggtattggcctgagtcttggaccgaacccaaattatttccccctgctttaactgttacctgtttagcctttggttgtatttgggcggcggatattggggcttatatcatgggaaaatggttaggacgaacacgcttatctgatattagtcccaaaaaaacagtagaaggggcattatttggcctattaggaagtgttgttgtcggagaaattggggcttggtatttagaatggccttactggtatgtaacagggatggtcttaggggcattaattggtattgttagtttattaggtgatttaacagaatccatgatgaaacgagatgccggggttaaagattccggtcaattaattcctggccatggtggtattttagatcgaaccgatagttatgtttttactgcccctttagtctattatttcgtaacattattcttacctttattgcaatag

SEQ ID NO: 58555 - protein, 295 aa, Crocosphaera watsonii WH 8501
MPWTRIITAIVAIFLALGMLIIGGWYFTLGLCVIVFLGQLEYFQLVRAKGIAPAAKTTLVVSQILLISSAIAPPLTDALFPLTGALICFYLLFQPKLASIADISTSVLGLFYGGYLPSYWVRLRVGFAHAVPTVDVASINLPFMGYWPESWTEPKLFPPALTVTCLAFGCIWAADIGAYIMGKWLGRTRLSDISPKKTVEGALFGLLGSVVVGEIGAWYLEWPYWYVTGMVLGALIGIVSLLGDLTESMMKRDAGVKDSGQLIPGHGGILDRTDSYVFTAPLVYYFVTLFLPLLQ

SEQ ID NO: 58556 - DNA, 801 bp, Exiguobacterium sibiricum 255-15
  CDS (1)..(801): transl_table=11
atgaaaacacgaattattacaggaatctgggcaggtgccatctttttaggtttgctttatctaggaggactcccattccttgcttttatggcaatcttgacactcatcgggtataccgaaatggttaaaatgcggcaattgtcgttcaagtcgattccggtgctgttgtttggagcaggtacattacttccgttcatcagtttgtacgaacaggcaagcgaccagttgctgtcactgggactgacaccgattgcttggggaatgttgattgtcttgatcgggttattttggacagtattctcaaagaacatgttcacttttgacgatgtcgccttcctgttgctgactgctgtgtatgtcggtgtaggatttgcatcgtttacttacattcgtctgcttgagaacggattaatcttttctttactgattattctgctgatctggtttacggattcgggtgcttacttcgtcggaaaaagtctcgggaaaacaaaactgtggccggcaatcagccccaataagacggttgaaggggcacttggcggtgttgttcttgccattctgctcggagtagtctttgagctgattcatccgacagttggcatgggaacagttgtattattggcactgatcgttgccgtagtcggccaacttggggatttagttcagtccgcgtacaaacgtcattacggcgtaaaagattccggagcattattacccggacacggtgggattcttgaccggttcgacagtatgatcattgtgtttaccgttctgatcgtactcggtatattcggataa

SEQ ID NO: 58557 - protein, 266 aa, Exiguobacterium sibiricum 255-15
MKTRIITGIWAGAIFLGLLYLGGLPFLAFMAILTLIGYTEMVKMRQLSFKSIPVLLFGAGTLLPFISLYEQASDQLLSLGLTPIAWGMLIVLIGLFWTVFSKNMFTFDDVAFLLLTAVYVGVGFASFTYIRLLENGLIFSLLIILLIWFTDSGAYFVGKSLGKTKLWPAISPNKTVEGALGGVVLAILLGVVFELIHPTVGMGTVVLLALIVAVVGQLGDLVQSAYKRHYGVKDSGALLPGHGGILDRFDSMIIVFTVLIVLGIFG

SEQ ID NO: 58558 - DNA, 867 bp, Synechococcus sp. RS9917
  CDS (1)..(867): transl_table=11
atgcagcgactcagcagtggcctccttgctggagcgttcggactgctggtggttggcttgggcggatggtggttcaccctcgccgttggtgtgatcgtgcatctcggcctgctggaatttttccgcatggcccagttcaccgggatccggccggccacgaaaaccaccctggtggcctgtcagctgctgttgatcagcacccagtggggggtggcgggtgggttgccctcccatctggccgccgccgtgcttcccctctccggggccgcgatctgcggttggttgctgctgcaaccggtcaccggttcgatcgccgacatcgccgcctcgatcttcggcttgttctatctggggtttcttcccagccactggctgcgcttgcgcaatctcagcgccatcgatctcgctccgtctcttgtccgtttgcccccctggtgcagcggctggatcaccgccggcatggtgatcaccctgatggcctgcctgatgatcgtcgccagcgacatcggctcctacgcgatcggccgccgcttcggacgcctgccgctctcgccgatctccccgggcaagaccgtggagggcgccttcggtggcttgattgccgccgtgctcgtgggcatcggcttcgccgtgctgctgcagtggccgatggccccctggctcggtggcgtgctcggggcgctggtggcgctgttcgctctcgtgggcgatctcaccgaatcgatgatgaagcgggatgcgggactcaaggattccggtgatgccttgccggggcatggcggcatcctcgatcgaatcgacagctacctgttcacaccggcggtggtgttttacgccgtcaccctggtgctgcccctgatgccctga

SEQ ID NO: 58559 - protein, 288 aa, Synechococcus sp. RS9917
MQRLSSGLLAGAFGLLVVGLGGWWFTLAVGVIVHLGLLEFFRMAQFTGIRPATKTTLVACQLLLISTQWGVAGGLPSHLAAAVLPLSGAAICGWLLLQPVTGSIADIAASIFGLFYLGFLPSHWLRLRNLSAIDLAPSLVRLPPWCSGWITAGMVITLMACLMIVASDIGSYAIGRRFGRLPLSPISPGKTVEGAFGGLIAAVLVGIGFAVLLQWPMAPWLGGVLGALVALFALVGDLTESMMKRDAGLKDSGDALPGHGGILDRIDSYLFTPAVVFYAVTLVLPLMP

SEQ ID NO: 58560 - DNA, 849 bp, Photobacterium sp. SKA34
  CDS (1)..(849): transl_table=11
ttgctaaagcaacgaattattaccgcattaatcctcgcaccactggttatagcggggatctttttcttaccatttccagcctttgttgcagccattgcggcaataacattagtgggcttttgggaatggacacagtttgttaatacatcatctcgcattagtgcaatgattctacctgtgattgcattaggagctagcctagtgttattaccagtagatacagcgtctctttcggcgatgagtaatgggttacatggcgtgttattagtcggcggaatatggtggctaatggcatctatattagcgattacatatcctaaaactgataaattatgggcatctaattcttttgttaaacagatttttggcttgttaacactactcccgtttttttggagtattttaatgttacgtgctgtagattacagcatcgattcgtatcatggtgctaaacttgtactactggtttgtttcttagtttggtctgcagatactggcgcatatttttcaggtaagcgttttggtaagcataaaatggcgccagccgttagcccaaataaaacgattgaaggtttagtgggtggggtgattttagctgtaattattacttggctaggtgcaaaacttctttctatcccgtttatctcaatttcaagcttgttatcgatagctattattactgttgttatctctgtacttggtgatttagttgaaagcatgtttaaacgtgcttctggcgttaaagatagcggtaacatattgcccggacatggtggcattttagatcgtattgatagcctaaccgcagcaatacctgtttttgccttactttatctctggttaatgtaa

SEQ ID NO: 58561 - protein, 282 aa, Photobacterium sp. SKA34
MLKQRIITALILAPLVIAGIFFLPFPAFVAAIAAITLVGFWEWTQFVNTSSRISAMILPVIALGASLVLLPVDTASLSAMSNGLHGVLLVGGIWWLMASILAITYPKTDKLWASNSFVKQIFGLLTLLPFFWSILMLRAVDYSIDSYHGAKLVLLVCFLVWSADTGAYFSGKRFGKHKMAPAVSPNKTIEGLVGGVILAVIITWLGAKLLSIPFISISSLLSIAIITVVISVLGDLVESMFKRASGVKDSGNILPGHGGILDRIDSLTAAIPVFALLYLWLM

SEQ ID NO: 58562 - DNA, 831 bp, marine gamma proteobacterium HTCC2207
  CDS (1)..(831): transl_table=11
gtgtttaaacagcgcgttatcactgcgattgcgctagttctgggcctatttggactactgtttaacctaaatgcgctgaatttttcattggccgtcgcgcctgttgtgctgctagcgggttgggagtggtccaatctaatgggtcttcggaccaagcgtcacaggtttgcctttctcgcgctattagctctatcgctggcagtggcttgtttaagtctaaatctattcggcgctctcaatgtttctcttgggcagactctctgtcttgctgtatcggtgctctgggcggtgatttttctctgggtacaggggtatccgtctagcgctattctctggtcaccgcgacctattttgggattgctgggcctcgtgctgctgtcgatcacctgggttgccattgtgctaattatccatcagccccacggtccctggttgttgctgtttgcctttgtagtcgttgccttggcggatattggtggctatgtggccggcaatctatttggcaagcacaagttggcaccacgggtcagtccaggtaagacctgggagggtttctgtggcggcattttattacagtgcattttgatcgcttccatgacatcgtttatgcctgaaaaaatcaccactggtatgctgttggcactggttattccagtgtcgctctattccgttctcggcgatctctttgaaagcatggtcaagcgtcacagtggcgtgaaagacagcggcaatatcctgcctggacacggtggtgtgctcgaccgaatcgacggtctgattgccgcgctaccactgtttattttactgttcctcctgctgagcccgttttag

SEQ ID NO: 58563 - protein, 276 aa, marine gamma proteobacterium HTCC2207
MFKQRVITAIALVLGLFGLLFNLNALNFSLAVAPVVLLAGWEWSNLMGLRTKRHRFAFLALLALSLAVACLSLNLFGALNVSLGQTLCLAVSVLWAVIFLWVQGYPSSAILWSPRPILGLLGLVLLSITWVAIVLIIHQPHGPWLLLFAFVVVALADIGGYVAGNLFGKHKLAPRVSPGKTWEGFCGGILLQCILIASMTSFMPEKITTGMLLALVIPVSLYSVLGDLFESMVKRHSGVKDSGNILPGHGGVLDRIDGLIAALPLFILLFLLLSPF

SEQ ID NO: 58564 - DNA, 843 bp, delta proteobacterium MLMS-1
  CDS (1)..(843): transl_table=11
atgaccagggtactgaccggcctggtggtcggcgtcgcctggctgctgctgctgcttttggctccgccggttatcttctggctggtgatctgtctgctggccctgctggccctgcaggaatacgccgccatgctgctgcccggcggtggccggcgtttgcgtatcccgtttgtcctgctggccctgttgccggtgctggccgccgtcggcgccgagccgttgtggatcgccggcggcgccatggcagcctttgccggcctgctgctgctgagcctggcggcccatggccggctggccgccagccaggagagtgttcccggatcggcggcggcaggcggtcatgattttctaccccgggcggtattggggattttttatccggccctgttgctggcccacttcccactgctgctggcccagcccgccggccgctcctggctgctgctggccgccgtcatcgcggtggccgcggacaccggggcctattacgccggcaccaggctggggcgccacaaactttgcccttccctgagccccggcaaaaccgtggaaggcttgctcggcggggtgctggccgccatgctcggcagctttctggtggcctggtggtggctgccggagatcgagttgttgcattcgctgctctttgcctttatcctctcactgacaagcgtggctggagatctggtcgaatcgctgctcaaacgcggcgccggtgtcaaggattcgggcacccttttgccgggccatggcggagtgctggaccggatcgattccctgctgctggtggtacccctgctctactacctggtactactgaccgaacatatggcgggcaggtaa

SEQ ID NO: 58565 - protein, 280 aa, delta proteobacterium MLMS-1
MTRVLTGLVVGVAWLLLLLLAPPVIFWLVICLLALLALQEYAAMLLPGGGRRLRIPFVLLALLPVLAAVGAEPLWIAGGAMAAFAGLLLLSLAAHGRLAASQESVPGSAAAGGHDFLPRAVLGIFYPALLLAHFPLLLAQPAGRSWLLLAAVIAVAADTGAYYAGTRLGRHKLCPSLSPGKTVEGLLGGVLAAMLGSFLVAWWWLPEIELLHSLLFAFILSLTSVAGDLVESLLKRGAGVKDSGTLLPGHGGVLDRIDSLLLVVPLLYYLVLLTEHMAGR

SEQ ID NO: 58566 - DNA, 864 bp, Synechococcus sp. RS9916
  CDS (1)..(864): transl_table=11
atgcagagcgtctctcggcagcgcttggtcagtggtcttggtgccggcctgtttgggctcgtggtggtgggcctaggtggttggtggttcaccgtggctttgggcgtgattgtgcacctcggcctgttggagtttttccgcatggcgcagtgcaccggcattcgccccgccgccaaaaccaccttggtggtggttcaactgctgctcatcagcacccagtgggatctcaccggtggactgccgtcccatctggcctccgccgtgttgccactctccggtgcagccatctgtggctggcttttgctgcagcccgtcacaggctcgatcgctgatatcgcctcgtcgatttttggtctgttttatctcggttttttgcccagtcattggttgcgcctgcgccagttgagtgatccccaactgctcccttccggtccccagtggctctctgcggggttggtgatcaccttgatggcctgtttgatgatcgtggctagcgatatcggctcttatctggtggggcgtcgctttgggcggcttcccctatccccgatttcgccgggaaaaacgattgaaggggctctcggaggtctagtcgcgtccgtagctgttggcgtgacttttgccttctggatgcaatggccttgggctctcttgagcggcggggtcctcggcgcgttggtggccttgtttgccctagtgggagatctcaccgaatcgatgatgaaacgggatgccggtttgaaggattccggagatgcattgcccgggcatggcggaattttggatcgcatcgatagttatctgtttacgcctgctgttgtgtattacgccgtgacactgttgttgccccaactctcgggctag

SEQ ID NO: 58567 - protein, 287 aa, Synechococcus sp. RS9916
MQSVSRQRLVSGLGAGLFGLVVVGLGGWWFTVALGVIVHLGLLEFFRMAQCTGIRPAAKTTLVVVQLLLISTQWDLTGGLPSHLASAVLPLSGAAICGWLLLQPVTGSIADIASSIFGLFYLGFLPSHWLRLRQLSDPQLLPSGPQWLSAGLVITLMACLMIVASDIGSYLVGRRFGRLPLSPISPGKTIEGALGGLVASVAVGVTFAFWMQWPWALLSGGVLGALVALFALVGDLTESMMKRDAGLKDSGDALPGHGGILDRIDSYLFTPAVVYYAVTLLLPQLSG

SEQ ID NO: 58568 - DNA, 867 bp, Alteromonadales bacterium TW-7
  CDS (1)..(867): transl_table=11
ttgttaaaacaacgcattttaacctcgctagtgttagcacccgcagcgctcgccttggttttttatacaccattgacgttatttagttactttgccgccgccatcgttttaatgggcgcttgggagtggtcagcttttatggggctatgcgacaaaataaaaagaggcgcctttgttgtgcttgttgcagctttactcgctgtgcttaatttacactggccgatagagtcgctttggcaaaatggtcagctagtgggcgatgctaattatttatttactttggcgtttgcatggtggattgttgctagttacttagtatggcgttatccagccatggcaaaagcgtggaatgaagggctagtaatgcgtggcattgcagggcttctgactttagtgccgttatggcttgcgctcaatacgcttcgtagtgcgcaataccttgaatctactcactttggctctatgctgattttggttgtattaggtattgtatggagcgctgatattggtgcgtattttacaggtaaaagttttggtaaacacaagcttatgccaaaagtaagtccaaataaaacaattgaaggccttgccggtggtattgttgcatcagtattatttgttatggcgttttgtcactttaccgacgtggatttagccgtatggccgatttacgccattatgacggcatttatagcgctattttcagcaattggcgatttacttgaaagtatgtttaaacgcgaagcaggccttaaagacagtggcaaatgcttacctgggcatggcggtattttagatcgcattgacagcttaacagcagccgcacctatgtttgtaatgtgttatgcatggactttaagtttatga

SEQ ID NO: 58569 - protein, 288 aa, Alteromonadales bacterium TW-7
MLKQRILTSLVLAPAALALVFYTPLTLFSYFAAAIVLMGAWEWSAFMGLCDKIKRGAFVVLVAALLAVLNLHWPIESLWQNGQLVGDANYLFTLAFAWWIVASYLVWRYPAMAKAWNEGLVMRGIAGLLTLVPLWLALNTLRSAQYLESTHFGSMLILVVLGIVWSADIGAYFTGKSFGKHKLMPKVSPNKTIEGLAGGIVASVLFVMAFCHFTDVDLAVWPIYAIMTAFIALFSAIGDLLESMFKREAGLKDSGKCLPGHGGILDRIDSLTAAAPMFVMCYAWTLSL

SEQ ID NO: 58570 - DNA, 837 bp, marine gamma proteobacterium HTCC2080
  CDS (1)..(837): transl_table=11
atgctgcgccaaagggtagtgacaggcgttattcttgcattagccttcctctcggcagtattttttttgcgcttggaggcattggcagcaattctaggcgctgtttcagtggcaggggcttgggagtggagcggtctgtcgggtataagagcggcctttgcgcgcgcggcctacaccgtattttatgtcggcttgctggctacgatctggttagtgctgggtattggcgatgcccccgcttctgatgtgttccagccatggttgggtacagcctgctttttttggtctgtagttatgctggcagttgagagttatccgggttctgcgtggatttggcgcagtcgggctagccgcgctgtttttggtttgtttattttggcgaccacctggctgtctacagttttcctacttattctacctgacggcatggtactgcttgttttattggttttagcggttgctctagcagacatcggcgcttatttcgccggtcgccgctgggggcgccacaaattggccgttgaagtgagcccgggcaagacctgggaagggttctggggtggggttgcttcggtcttcgctttaactctagtcgtcgcttattttttacctaagcacatggctcatctttcattggttaccctggtggtaatgggtcttgcagtcgcaggtgcgtcggttttaggtgatctgactgtcagtatggttaagcgagaacgtggtgtgaaggattccggcacgctgctccccggacacggagggcttttagacaggatcgatggtttgtgctcagcggctcccgtttttgcactgggattacttcttgcagggtactga

SEQ ID NO: 58571 - protein, 278 aa, marine gamma proteobacterium HTCC2080
MLRQRVVTGVILALAFLSAVFFLRLEALAAILGAVSVAGAWEWSGLSGIRAAFARAAYTVFYVGLLATIWLVLGIGDAPASDVFQPWLGTACFFWSVVMLAVESYPGSAWIWRSRASRAVFGLFILATTWLSTVFLLILPDGMVLLVLLVLAVALADIGAYFAGRRWGRHKLAVEVSPGKTWEGFWGGVASVFALTLVVAYFLPKHMAHLSLVTLVVMGLAVAGASVLGDLTVSMVKRERGVKDSGTLLPGHGGLLDRIDGLCSAAPVFALGLLLAGY

SEQ ID NO: 58572 - DNA, 816 bp, Pseudomonas putida GB-1
  CDS (1)..(816): transl_table=11
atgcttaaacaacgcatcattactgcgctgatcctgctgccgatcgcgctgggcggtttcttcctgctcaacggtggcgatttcgccctgttcatcggcttcgtggtgaccctcggtgcctgggagtgggcgcgccttgccgggctgatggcccagccgctgcgtattgcctatgccgcggtggtcgccggggcgctgatgctgctgtacatccttccagagctggcgccctgggtgctgggcgccgcggtgatctggtgggggctggcaacctggctggtgctgacctatccgcgcagcagcgagctgtgggccagtgctgcctgccggctgctgatcggcctgctggtgctgctgcccgcctggcaggggctggtgctgctcaagcactggccgctgggcaacgggttgatcctgtcggtcatggtgctggtgtgggctgccgacattggcgcgtacttctctgggcgggcgttcggcaagcgcaagctggccccgcaagtcagcccgggcaagagctgggagggcgtgtacggtggtctggcggtcagcctgctgattaccctgggtgtcggcatcagccgcgactggagctttggtcaggtcctgctcggcctgctgggcgccgcgctgctggtcatggcctcggtagtcggtgacctgaccgaaagcatgttcaagcgccgctccggcatcaaggacagcagcaacctgctgcccggccacggtggcgtgcttgatcgcatcgacagcctgactgcggcaatcccgatttttgcggtgctgttgtgggctgccgaatggggtgtgatgtga

SEQ ID NO: 58573 - protein, 271 aa, Pseudomonas putida GB-1
MLKQRIITALILLPIALGGFFLLNGGDFALFIGFVVTLGAWEWARLAGLMAQPLRIAYAAVVAGALMLLYILPELAPWVLGAAVIWWGLATWLVLTYPRSSELWASAACRLLIGLLVLLPAWQGLVLLKHWPLGNGLILSVMVLVWAADIGAYFSGRAFGKRKLAPQVSPGKSWEGVYGGLAVSLLITLGVGISRDWSFGQVLLGLLGAALLVMASVVGDLTESMFKRRSGIKDSSNLLPGHGGVLDRIDSLTAAIPIFAVLLWAAEWGVM

SEQ ID NO: 58574 - DNA, 1176 bp, Arabidopsis thaliana
  CDS (1)..(1176)
atggcgacttttgctgaacttgttttatcgacttctcgctgtacatgcccttgccgttcattcactagaaaacccctaattcgtccccctttatctggtctgcgtctccccggtgataccaaaccattgtttcgttccggacttggtcggatttctgttagccggcgtttcctcacggccgttgctcgagctgaatcagaccagcttggtgatgatgaccactcaaagggaattgatagaatccataacttgcagaatgtggaagataagcagaagaaagcaagccagcttaagaaaagagtgatctttggtattggcattggtttacctgttggatgtgttgtgttagctggaggatgggttttcactgtagctttagcatcttctgtttttatcggttcccgcgaatatttcgagcttgttagaagtagaggcatagctaaaggaatgactcctcctccacgatatgtatctcgagtttgctcggttatatgtgcccttatgcccatacttacactgtactttggtaacattgatatattggtgacatctgcagcatttgttgttgcaatagcattgttagtacaaagaggatccccacgttttgctcagctgagtagtacaatgtttggtctgttttactgtggttatctcccttctttctgggttaagcttcgctgtggtttagctgctcctgcgcttaacactggtatcggaaggacatggccaattcttcttggtggtcaagctcattggacagttggacttgtggcaacattgatttctttcagcggtgtaattgcgacagacacatttgcttttctcggtggaaagacttttggtaggacacctcttactagtattagtcccaagaagacatgggaaggaactattgtaggacttgttggttgtatagccattaccatattactctctaaatatctcagttggccacaatctctgttcagctcagtagcttttgggtttcttaacttctttgggtcagtctttggtgatcttactgaatcaatgatcaagcgtgatgctggcgtcaaagactctggttcacttatcccaggacacggtggaatattagatagagttgatagttacattttcaccggcgcattagcttattcattcatcaaaacatccctaaaactttacggagtttga

SEQ ID NO: 58575 - protein, 391 aa, Arabidopsis thaliana
MATFAELVLSTSRCTCPCRSFTRKPLIRPPLSGLRLPGDTKPLFRSGLGRISVSRRFLTAVARAESDQLGDDDHSKGIDRIHNLQNVEDKQKKASQLKKRVIFGIGIGLPVGCVVLAGGWVFTVALASSVFIGSREYFELVRSRGIAKGMTPPPRYVSRVCSVICALMPILTLYFGNIDILVTSAAFVVAIALLVQRGSPRFAQLSSTMFGLFYCGYLPSFWVKLRCGLAAPALNTGIGRTWPILLGGQAHWTVGLVATLISFSGVIATDTFAFLGGKTFGRTPLTSISPKKTWEGTIVGLVGCIAITILLSKYLSWPQSLFSSVAFGFLNFFGSVFGDLTESMIKRDAGVKDSGSLIPGHGGILDRVDSYIFTGALAYSFIKTSLKLYGV

SEQ ID NO: 58576 - DNA, 810 bp, Bacillus subtilis
  CDS (1)..(810): transl_table=11
atggtggacatgaaacaaagaattttgacaggtgttctggcagcaattgtatttttatttttggttattgtcgggaaattgccgttcaccatattaatttatgctatgggcagtgtggcgctttttgaacttttacggatgaaaaagctgaagctggtttcactgccgggtttgatcggtcttttattattgtggatgttcttattaccaagccagtattcgttttttgaagcggacgggatttccaaaatggaaatcgctttatttgcggtactgctattgctgacttacacagtgttggtcaagaacacctttacttttgatgaagtcgggtttattacgcttgcagcaatttacatcggaatgtgttttcattattttatcgaaatcagaaatcttgaccaatacggattaacatacattttttatgcgtgtgttgtcatttggtccaccgattccggtgcctattttgtcggtaaatcgcttgggaagcggaaactgtggcctgaaatcagtccgaataaaacagtggaagggtttgcaggcggaattgtcatcgcacttgtattggcgacgatttttcagcttgttgcacaacttccgatcccgtatatctatctgctgttgatcacgctgtttttgtctgtttttggacaactgggagatttagtggaatccgccttgaaaagacattacgatgtaaaggattctgggaatattcttcccgggcatggcggtatattagaccgttttgacagtttcttgtttgtcatgcctttcttgtactttctgcttgcccttttttcataa

SEQ ID NO: 58577 - protein, 269 aa, Bacillus subtilis
MVDMKQRILTGVLAAIVFLFLVIVGKLPFTILIYAMGSVALFELLRMKKLKLVSLPGLIGLLLLWMFLLPSQYSFFEADGISKMEIALFAVLLLLTYTVLVKNTFTFDEVGFITLAAIYIGMCFHYFIEIRNLDQYGLTYIFYACVVIWSTDSGAYFVGKSLGKRKLWPEISPNKTVEGFAGGIVIALVLATIFQLVAQLPIPYIYLLLITLFLSVFGQLGDLVESALKRHYDVKDSGNILPGHGGILDRFDSFLFVMPFLYFLLALFS

SEQ ID NO: 58578 - DNA, 897 bp, Escherichia coli
  CDS (1)..(897): transl_table=11
atgctggaaaaatctctggcaacacttttcgcgttgttaattttagcaacgctgataaaccgttttctgctatggcggttaccggagagaaaagggggtgaggttacattacgtattcgtacctggtggggcatcgtcatttgtttttcaatggtgatttcaggtccacgctggatgacgttgacgttttttgcgctgataagttttctggcattgaaagaatattgtacgcttatatctgtacattttccgcgttggttatattggggtattcctcttaactatttgcttatcggttttaattgctttgagctgtttctgttatttatacctttggctgggtttctgatattagccaccgggcaagttttagtgggtgacccctctggttttctgcataccgtgagcgccattttttggggctggataatgaccgttttcgccttgagtcatgccgcctggttattaatgttgccaaccacaaatatccagggcggggcgttactggtgttatttcttttggcattaaccgagtcaaacgatattgcacagtatttatggggaaaatcctgcggcagaagaaaagtggtccctaaagtcagcccgggaaaaacattggaaggtctgatgggcggcgtcatcaccatcatgattgcgtcactgattatcggaccgttactgacaccgctaaatacattacaggcattattagcgggtttgttaattggtattagtggtttttgcggcgatgtcgtgatgtcagccatcaaacgagatattggtgttaaagatagcggaaaactattgccaggacatggcggactccttgacaggattgactcattaattttcaccgctccggtatttttttattttatacgctactgctgttactga

SEQ ID NO: 58579 - protein, 298 aa, Escherichia coli
MLEKSLATLFALLILATLINRFLLWRLPERKGGEVTLRIRTWWGIVICFSMVISGPRWMTLTFFALISFLALKEYCTLISVHFPRWLYWGIPLNYLLIGFNCFELFLLFIPLAGFLILATGQVLVGDPSGFLHTVSAIFWGWIMTVFALSHAAWLLMLPTTNIQGGALLVLFLLALTESNDIAQYLWGKSCGRRKVVPKVSPGKTLEGLMGGVITIMIASLIIGPLLTPLNTLQALLAGLLIGISGFCGDVVMSAIKRDIGVKDSGKLLPGHGGLLDRIDSLIFTAPVFFYFIRYCCY

SEQ ID NO: 58580 - DNA, 1191 bp, Glycine max
  CDS (1)..(1191)
atggctcaccctcgactcactaactcgctctgttcttctccccttcgcaatctcaatcccaatcccaaactcattcctctctgcacttgctcatgccgtcccttctcttcgcaatccctaattctccattctcaccctcttttcctcgccaaacccaaacctctcctccggttcgcccgccgaaccggaccgcccctcgtcctcgccgccgtcggccaggccgaacccgaacttcctcaaaccagtgcccccacggtcattcccgaagacgaggaggatttgccctcaaaatctcaacagcagcttaggaaccgggtggtttttggacttggcattgggattagtgtaggaggcattgttttggctggtggatgggtcttcgcggttgccctagctgctgctgtctttactggtgctcgagaatattttgaattggttcggagtcatggaattactgaaggaatgacaccacctccacgttatgtgtcacgagtctgctctgtcatttgtgccttgatgccattgtttgtcatgtatcgtggtcatattgatgtttctgtgacttctgctgcttttgttttggccacagcattactcttacaaagaggaagtcctcgttttgcacagctaagtagtgccatatttgggttattttattgtggatatcttccctctttttggcttaaacttcgatgtggtttagcagctccagccttgaacacaagaataggagcaacatggcctatacttcttggtggccaagctcattggacagttggtcttgtggcaactttgattaccataagcagcgttattgcagcggatacatttgcatttcttggtggcaaggcatttggtagaacaccacttaccagtataagtccaaagaagacatgggagggtactattataggcttttgtgggtgtatagttacttctgctgttctgtcaaaaattttcagctggccaatacctttatcaagtgcaataggtcttggtgttctaagtttctttgggtctgtttttggtgatctcactgaatcaatgattaaacgagatgcaggagttaaagactctggcacactaatacctggtcatggtggagtactagacagagcggacagttatgtgttcacgggtgctctagcatacaactttatcaaaaccgttttaccactgtatggagtatga

SEQ ID NO: 58581 - protein, 396 aa, Glycine max
MAHPRLTNSLCSSPLRNLNPNPKLIPLCTCSCRPFSSQSLILHSHPLFLAKPKPLLRFARRTGPPLVLAAVGQAEPELPQTSAPTVIPEDEEDLPSKSQQQLRNRVVFGLGIGISVGGIVLAGGWVFAVALAAAVFTGAREYFELVRSHGITEGMTPPPRYVSRVCSVICALMPLFVMYRGHIDVSVTSAAFVLATALLLQRGSPRFAQLSSAIFGLFYCGYLPSFWLKLRCGLAAPALNTRIGATWPILLGGQAHWTVGLVATLITISSVIAADTFAFLGGKAFGRTPLTSISPKKTWEGTIIGFCGCIVTSAVLSKIFSWPIPLSSAIGLGVLSFFGSVFGDLTESMIKRDAGVKDSGTLIPGHGGVLDRADSYVFTGALAYNFIKTVLPLYGV

SEQ ID NO: 58582 - DNA, 1221 bp, Zea mays
  CDS (1)..(1221)
atgcattggatcattaaaacaatcgataccaacaggtatagtacacatcgaacgctccgcctacaatcctgtactgcacgcgctccccatccgcacaacttcccgcctcccatggcggcgccggcgccgggggccacccgcctccaccccccgttcctcctgcttccttccccgccgcgaccccatcctccactccggctccgcttcctcctgccgtccccgccgcctctccgcctccgccgccgcttcccgctgctcgctgccgccgccgtctccgccggcggcggcggtggaggggaggaagccgccggcaggaaggccgataaggccaggcagctgcagaagcgggtcctcgtgggcgtcgccatcggggtgggcgcaggcggcatcgtggtcgccggcggctgggtgttcgcagccgccgtcgcagctgctgtccttgccggctcccgggagtacttcgagctcgtccgcagcactgccagcggaggcgggaccccgccgccgcgatacgtgtcccgcgcgtgctccgccatctgcgctctcatgcccatccttacgctgtactatggacgcatggatgttactgtggcattttctgcattcgttattgccatagcattgcttttacaaagaggaaatcctcgttttgctcagctaactagttcagtttttgggttgttttactgtggctatctaccttctttctgggttaagctccggtcaggattagctgcccctgccttaaatacaagtatagcataccgttggccaattcttctcggtggacaagctcactggacagttggacttgtagcaaccttgatggctattagtagcatcattgctgctgatacatctgctttcctttgtggaagggcatttggtcgtacccctttgactaacataagccctaagaaaaccttggagggtgctttagctggcctagctggctgtgtgctgaccactgtgctgctgtcaactgccttacgctggccaagatcactgttgagtgccacagcttatggaatcctgatctttctgggttcattgtttggggatcttgtcgagtctctgatcaagcgtgacgctggtgtcaaggactctggatcactcattcctggtcacggtgggattctcgaccgagttgacagctacgtgttcacaggggcactctgttactcttttgtcagagtagctctaccctcgtatggggtctga

SEQ ID NO: 58583 - protein, 406 aa, Zea mays
MHWIIKTIDTNRYSTHRTLRLQSCTARAPHPHNFPPPMAAPAPGATRLHPPFLLLPSPPRPHPPLRLRFLLPSPPPLRLRRRFPLLAAAAVSAGGGGGGEEAAGRKADKARQLQKRVLVGVAIGVGAGGIVVAGGWVFAAAVAAAVLAGSREYFELVRSTASGGGTPPPRYVSRACSAICALMPILTLYYGRMDVTVAFSAFVIAIALLLQRGNPRFAQLTSSVFGLFYCGYLPSFWVKLRSGLAAPALNTSIAYRWPILLGGQAHWTVGLVATLMAISSIIAADTSAFLCGRAFGRTPLTNISPKKTLEGALAGLAGCVLTTVLLSTALRWPRSLLSATAYGILIFLGSLFGDLVESLIKRDAGVKDSGSLIPGHGGILDRVDSYVFTGALCYSFVRVALPSYGV

SEQ ID NO: 58584 - DNA, 23 bp, Artificial sequence
  primer
atgcccacccagcgaattattag

SEQ ID NO: 58585 - DNA, 20 bp, Artificial sequence
  primer
ttacaaattattcaacacag

SEQ ID NO: 58586 - protein, 303 aa, Artificial sequence
  consensus sequence
  Variant (2)..(19): Xaa in position 2 to 19 is any amino acid
  Variant (20)..(23): Xaa in position 20 to 23 is any or no amino acid
  Variant (25)..(36): Xaa in position 25 to 36 is any amino acid
  Variant (37)..(42): Xaa in position 37 to 42 is any or no amino acid
  Variant (44)..(105): Xaa in position 44 to 105 is any amino acid
  Variant (106)..(127): Xaa in position 106 to 127 is any or no amino acid
  Variant (129)..(147): Xaa in position 129 to 147 is any amino acid
  Variant (148)..(178): Xaa in position 148 to 178 is any or no amino acid
  Variant (180)..(192): Xaa in position 180 to 192 is any amino acid
  Variant (193)..(193): Xaa in position 193 is any or no amino acid
  Variant (195)..(195): Xaa in position 195 is any amino acid
  Variant (196)..(197): Xaa in position 196 to 197 is any or no amino acid
  Variant (199)..(200): Xaa in position 199 to 200 is any amino acid
  Variant (202)..(204): Xaa in position 202 to 204 is any amino acid
  Variant (206)..(212): Xaa in position 206 to 212 is any amino acid
  Variant (213)..(217): Xaa in position 213 to 217 is any or no amino acid
  Variant (220)..(220): Xaa in position 220 is any amino acid
  Variant (223)..(223): Xaa in position 223 is any amino acid
  Variant (226)..(228): Xaa in position 226 to 228 is any amino acid
  Variant (230)..(264): Xaa in position 230 to 264 is any amino acid
  Variant (265)..(270): Xaa in position 265 to 270 is any or no amino acid
  Variant (274)..(274): Xaa in position 274 is any amino acid
  Variant (277)..(278): Xaa in position 277 to 278 is any amino acid
  Variant (281)..(282): Xaa in position 281 to 282 is any amino acid
  Variant (284)..(284): Xaa in position 284 is any amino acid
  Variant (289)..(291): Xaa in position 289 to 291 is any amino acid
  Variant (297)..(297): Xaa in position 297 is any amino acid
  Variant (301)..(301): Xaa in position 301 is any amino acid
RXXXXXXXXXXXXXXXXXXXXXXFXXXXXXXXXXXXXXXXXXEXXXXXXXXXXXXXXXXXXXXXXXXXXXXXXXXXXXXXXXXXXXXXXXXXXXXXXXXXXXXXXXXXXXXXXXXXXXXXXXXXXXXGXXXXXXXXXXXXXXXXXXXXXXXXXXXXXXXXXXXXXXXXXXXXXXXXXXGXXXXXXXXXXXXXXDXXXYXXGXXXGXXXXXXXXXXXXSPXKTXEGXXXGXXXXXXXXXXXXXXXXXXXXXXXXXXXXXXXXXXXXXXXXXGDLXESXXKRXXGXKDSGXXXPGHGGXLDRXDS

SEQ ID NO: 58587 - protein, 21 aa, Artificial sequence
  protein pattern
  Variant (3)..(3): Xaa in position 3 is Leu or Met
  Variant (4)..(4): Xaa in position 4 is Phe, Ile, Leu or Met
  Variant (7)..(11): Xaa in position 7 to 11 is any or no amino acid
  Variant (13)..(13): Xaa in position 13 is Ala or Ser
  Variant (14)..(14): Xaa in position 14 is Gly or Ser
  Variant (15)..(16): Xaa in position 15 to 16 is any amino acid
  Variant (17)..(17): Xaa in position 17 is Ile or Leu
  Variant (21)..(21): Xaa in position 21 is Ala or Gly
ESXXKRXXXXXDXXXXXPGHX

SEQ ID NO: 58588 - protein, 13 aa, Artificial sequence
  protein pattern
  Variant (2)..(4): Xaa in position 2 to 4 is any amino acid
  Variant (5)..(5): Xaa in position 5 is any or no amino acid
  Variant (8)..(8): Xaa in position 8 is any amino acid
  Variant (10)..(10): Xaa in position 10 is Ser or Thr
  Variant (11)..(11): Xaa in position 11 is any amino acid
LXXXXSPXKXXEG

SEQ ID NO: 58589 - protein, 15 aa, Artificial sequence
  protein pattern
  Variant (2)..(2): Xaa in position 2 is Ile, Leu or Val
  Variant (6)..(6): Xaa in position 6 is any amino acid
  Variant (9)..(11): Xaa in position 9 to 11 is any amino acid
  Variant (12)..(12): Xaa in position 12 is Ala, Thr or Val
  Variant (13)..(13): Xaa in position 13 is any amino acid
  Variant (14)..(14): Xaa in position 14 is Ala, Pro or Ser
  Variant (15)..(15): Xaa in position 15 is Phe, Ile, Leu, Met or Val
GXLDRXDSXXXXXXX

SEQ ID NO: 58590 - DNA, 1278 bp, Synechocystis sp.
  CDS (1)..(1278): transl_table=11
atggagaaggttgaccaagcaaaattgttcctgggtttagactttggtacgtccggggcgagggcggcggtaattgatcaaaataaagagttaatttggcaggaaaaagtccagttttcccaggttcccggcccccaattggttaccatctggcgggaaagtttgtttcatcttttagatcaaattcccgatgaactaagcagtcaaatccaggcgatcgccattgatggcacttcctccacggttttactgttggatagccaaggcaatgggttaatggagcctctgttgtataacgatgaccggggcaaagaagttaagcatttattatcagcaatagctccagcagatcatttagtgcaaagtgctacttctagcctagccaaactgctttggtactcccaacaaccggagtttgaacgagctaattacttttgtcatcaagcggattggttagcaagtttgctccatggtggcagacccgttagtgattatcacaatgccctcaagctgggctacaatccccacaatttaacctatcctgattggttaaaaaatgcttcttggtttgcccttttacctccagtaattgcccccggtaaagcaatttcccgcttatctcccagcattgccaacgcagaaaaattccctaaaaattatttggtttgtgccggcaccacggacagcattgctgcttttttagccagtggcgcaacgcaaccaggggaagcggtcacttctttgggttccactctggtgctgaagttactaagtgaaaagccagtgacggatctagctagcggtatttatagccatcgtctaggcgatttatggttaacggggggagcttccaatgcggggggagcagtgttacaacattatttttcgtcaacgcagttaacagcattaagtgccaaaattaatccccatcaacctagtgacttagattactatccccttttgcaaccgggggaaagatttcccattaatgaccctaatttattaccccgcttggaacccagaccagagaatgatgcaatttttttacaaggtttattggaaggtttagctcgcattgaagcccagggttatgaaaagttgcaaaagttgggggcaacaaccttaacaaaggtgtttactgctgggggtggggcacagaatttaacttggcaaactattcggcaaaatttgctccaggttccggtacaaaaatccgttcagtcagaagcggcctatggttctgcttgtttagctagaagtagtaaatcttgggaataa

SEQ ID NO: 58591 - protein, 425 aa, Synechocystis sp.
MEKVDQAKLFLGLDFGTSGARAAVIDQNKELIWQEKVQFSQVPGPQLVTIWRESLFHLLDQIPDELSSQIQAIAIDGTSSTVLLLDSQGNGLMEPLLYNDDRGKEVKHLLSAIAPADHLVQSATSSLAKLLWYSQQPEFERANYFCHQADWLASLLHGGRPVSDYHNALKLGYNPHNLTYPDWLKNASWFALLPPVIAPGKAISRLSPSIANAEKFPKNYLVCAGTTDSIAAFLASGATQPGEAVTSLGSTLVLKLLSEKPVTDLASGIYSHRLGDLWLTGGASNAGGAVLQHYFSSTQLTALSAKINPHQPSDLDYYPLLQPGERFPINDPNLLPRLEPRPENDAIFLQGLLEGLARIEAQGYEKLQKLGATTLTKVFTAGGGAQNLTWQTIRQNLLQVPVQKSVQSEAAYGSACLARSSKSWE

SEQ ID NO: 58592 - DNA, 1290 bp, Oryza sativa
  CDS (1)..(1290)
atggctgtgattgtcgtacaacgtcagtacgtccaggggtgggaagggtgcagcgagccacccatatgcagcgagtctgcggagcgtaacggatcatccaggttcacaacgaaaggtacatcaagagtaagggttatgatgcttaggcaaaaaaatccgggaggccagaagaagagctttgatggaacaggcgagcctctatatcttgggatagactttggaacttcaggtgccagatatgctcttgtcgataagcaaggggccatacattctgaaggcaaaagaacttaccctcctgtttctgttcctcagatccttacacattccacatcgcttcaatgcaaaattcagtcagacaaaaggaacaatggagggattcttgctggcccatatctctacaacgagagcttcgcagacgcgctgccagcagtcgaatcgattgccccggcaaatcatacggtgcgttctggttcgtccaccctgtgcaagcttgtgtcatggtggaattcgagctcagcaggcttgagcagtagagattcagcgatactgatgcaccagtcagactggttgctctggcttttgcatggagaatatggtgtttctgattataacaacactctgaaggtgggctacgatccagagattgactcgtacccaagttggttgatgtcacagccatatgcttacatgttgccgtctgttagagcacccggagctccaattggctcaatcaaggaggatgtgacgtcgttgggttcaactctggcgatcaagctgctgagcaacgcccgcgtggacgacgcgcggttcggcgtgtacagccatcggctggacgacatgtggctggtcgggggcgcgtccaacaccggcggcgccgtcctcaggcagctcttcaccgacgatcagctcgtcgctctcagccacgagatcgacccgtcggttccttcccttctcgattactaccctctgcctaagagaggagaaaggttccctgtctccgaccccaacatgatgccaaggctgcagcctaggccggagagcgacacggcgtacttgcatggcatactggagtcgatcgcgcggattgaggcaaaggggtacaatctgttgaaggagctcggcgcgagcatggtggaggaggttttgacggcgggtggaggagctcggaacgataagtggacggcgataaggggaagggtgcttggcgttccggtgagaaaggcggagcagacggaggcggcctacggggctgcactgctagcactcaagggtgctaatactacgcactag

SEQ ID NO: 58593 - protein, 429 aa, Oryza sativa
MAVIVVQRQYVQGWEGCSEPPICSESAERNGSSRFTTKGTSRVRVMMLRQKNPGGQKKSFDGTGEPLYLGIDFGTSGARYALVDKQGAIHSEGKRTYPPVSVPQILTHSTSLQCKIQSDKRNNGGILAGPYLYNESFADALPAVESIAPANHTVRSGSSTLCKLVSWWNSSSAGLSSRDSAILMHQSDWLLWLLHGEYGVSDYNNTLKVGYDPEIDSYPSWLMSQPYAYMLPSVRAPGAPIGSIKEDVTSLGSTLAIKLLSNARVDDARFGVYSHRLDDMWLVGGASNTGGAVLRQLFTDDQLVALSHEIDPSVPSLLDYYPLPKRGERFPVSDPNMMPRLQPRPESDTAYLHGILESIARIEAKGYNLLKELGASMVEEVLTAGGGARNDKWTAIRGRVLGVPVRKAEQTEAAYGAALLALKGANTTH

SEQ ID NO: 58594 - DNA, 1275 bp, Mesorhizobium loti MAFF303099
  CDS (1)..(1275): transl_table=11
atgatgccccttgtcattggcatcgacatcggcacgtcaggcgcgcgcgctgtcgccatgcgcccggatttttccattgccggccagtccgccgttcggctcgacaaattcggtcaaaatccccgcgagccctcggcatggtggcaagcggtccaggcggctctgatggaacttctttcgggcatcgaccgcactgctgtccgcgccatcgccgtcgacggcacgtcgggcacgctgctgccggtcgacgccgccgggcggccgctggccgaaccgctgatgtacaacgacaaggtcgacgacgccgacatcctggccgccatcgcccgcgaggcgccggacgcgagcgccgcgcacggcgcgacttcaggcctggccaaggcgttgcggttccagcatctgcccggcatcgcggccgtgctgcaccaggccgactggatcgccgcaaacctctccggccgctttgacgtgagcgacgagaacaatgcgctgaagacaggttatgatgtcgaggcgcgccgctggccggactggatcgcggccaccggcatgcgcatggacttgctgcctgatgtcgtcgagccgggcgacgtcaccggcacgctcaccgcggccgccgcggatctgttcggcctgctacgcgatgtggccgtggtcgccggcaccacggatggctgcgcctcgttcctggcgacgggcgccactgccaccggcgacggcgtaacggcgctgggatcctcactcaccatcaagatcctgtccgaccggccgatctcggcgccgcgcttcggcatctacagccatcgcctcggcgacacctggctggccggcggcgcgtcgaattccggtggcaaggtgctggcccggcattttccgctggcgcggatcgtcgaactcagctcggcaatcgaccccgcgacgcaaaccggcctcgactactatccactgagtacgccgggtgaacgatttccgatcgccgatcccaccttgccgccgcgtctttcgccacgaccagctgatgatgccgactatctcaaggcgatgttcgagggcatggctgcgatcgaggcgctcggctaccgcaggctgaccgaactcggcgcgccggcgctgacctctgtcaggagcgtcggcggcggcgcggcaaacgcggcttggacggcgatccggcaacgcaagctcggcgtcgatttcctgcccacgctttccgacgaggcggccgccggaacggcgcggctggcgctcaagggcgcaaacaaggcgggactggtatga

SEQ ID NO: 58595 - protein, 424 aa, Mesorhizobium loti MAFF303099
MMPLVIGIDIGTSGARAVAMRPDFSIAGQSAVRLDKFGQNPREPSAWWQAVQAALMELLSGIDRTAVRAIAVDGTSGTLLPVDAAGRPLAEPLMYNDKVDDADILAAIAREAPDASAAHGATSGLAKALRFQHLPGIAAVLHQADWIAANLSGRFDVSDENNALKTGYDVEARRWPDWIAATGMRMDLLPDVVEPGDVTGTLTAAAADLFGLLRDVAVVAGTTDGCASFLATGATATGDGVTALGSSLTIKILSDRPISAPRFGIYSHRLGDTWLAGGASNSGGKVLARHFPLARIVELSSAIDPATQTGLDYYPLSTPGERFPIADPTLPPRLSPRPADDADYLKAMFEGMAAIEALGYRRLTELGAPALTSVRSVGGGAANAAWTAIRQRKLGVDFLPTLSDEAAAGTARLALKGANKAGLV

SEQ ID NO: 58596 - DNA, 1437 bp, Arabidopsis thaliana
  CDS (1)..(1437)
atgctgattcttcgtcaatttcagatatcttcatttgagctcttccaatctccaaaacaaacagggttttactctagttcaaggagtgttcctctacccagaactagattttactccgatttcagagttatgagtggcaataaaggaacgaactatgaaaaactttatctgggtatggattttggtacttctggaggtcgatttacagttattgatgagcaaggagagattaaagcacaaggcaaaagagaatatcctcctttcatgaaagaagaaagcatgggttgggcaagctcatggaaagcaactcttttttcgttgctagaggacattcccgtcacagttcgctccctcgtctcatccatttcgcttgatggaacttctgcaactactctcatcttaaacagtgagagtggagaagttctgtgtcaaccttatctctacaaccagagctgccctgatgctctgccagaggtcaagtctatagcgccagcaaaccatacagtctgctctggtacttctaccttgtgcaaacttgtctcatggtggaacactgaggtgccaaacagagaatcagcggtattgctgcatcaggcagactggttgttgtggttacttcacggtagactcggagtgtcagattacaacaatgccttgaaggtgggctatgatcctgagagtgaatcatatccatcatggttgctaggtcagccttattctcagttattacctaaggtgcaagctcctggaacatcaataggcaatctgaaagaaagctttacaaggcaatttggatttccagatgattgcattgtctgcaccggtactactgatagcatagctgcatttcttgcagcacgcgcgactgaacctgggaaagcagtaacttcattgggttcgaccttagccatcaaacttctcagcaccaaaagagttgatgatgcgaggtatggagtctacagccaccgcctggatgacaaatggttggtcggaggagcttccaacactggtggagccattctcagacagctctttagtgacgaacagttagagagactgagccaagaaatcaatcctatggtcggatctcctctagattactatcctttgcaaagcagcggtgaaagatttcccattgctgatcctaacttggctcccagattacttccacgcccagaaagcgacgttgaattcttgcatggtatattggaatcaatcgcacgtattgaggggaaaggctacaagttgctgaaagagttgggagcaacggaggccgaggaagtgttgacagcaggaggtggagccaagaatgacaagtggataaagataaggcagcgagttttgggtttgcctgtgaaaaaagccgtccacactgaagcttcctatggagcttctcttcttgcgctaaagggcgcaaaacagaacagtggtttgtga

SEQ ID NO: 58597 - protein, 478 aa, Arabidopsis thaliana
MLILRQFQISSFELFQSPKQTGFYSSSRSVPLPRTRFYSDFRVMSGNKGTNYEKLYLGMDFGTSGGRFTVIDEQGEIKAQGKREYPPFMKEESMGWASSWKATLFSLLEDIPVTVRSLVSSISLDGTSATTLILNSESGEVLCQPYLYNQSCPDALPEVKSIAPANHTVCSGTSTLCKLVSWWNTEVPNRESAVLLHQADWLLWLLHGRLGVSDYNNALKVGYDPESESYPSWLLGQPYSQLLPKVQAPGTSIGNLKESFTRQFGFPDDCIVCTGTTDSIAAFLAARATEPGKAVTSLGSTLAIKLLSTKRVDDARYGVYSHRLDDKWLVGGASNTGGAILRQLFSDEQLERLSQEINPMVGSPLDYYPLQSSGERFPIADPNLAPRLLPRPESDVEFLHGILESIARIEGKGYKLLKELGATEAEEVLTAGGGAKNDKWIKIRQRVLGLPVKKAVHTEASYGASLLALKGAKQNSGL

SEQ ID NO: 58598 - DNA, 1284 bp, Sinorhizobium meliloti 1021
  CDS (1)..(1284): transl_table=11
atgagcgggcagggcaagctcgttctcggaatcgaccttggcacgtccggtgcgcgtgccgtggcgatgacagctgcaggcgagatcgtcgcatcgggcgcagccaggcttaccgccttttccgatgaccatcgcgatccgctcggctggtggaaggcggttcaggccgcgcttgcgcaggcactcgaagcgatcgacggctcgcatatatgtgcggtcggcatcgacggcacgtcgggcaccatgctcccggtcgctgcggacggcgcgccgctcgcgacgccgctcatgtataacgacccggtcggcgacaccgccattctggagcgcatcgccgtccatgcgcccaaggagagcgccgcgcatggcgcgacctcggggctcgccaagctgctgaccttccagtcgctcccggaggtcttccgtgtcattcatcaggccgactggattgccggccatttcaccgggctttatgacatcagcgacgaaaacaacgcgctgaagaccggctacgatcccgttgcccgcaactggccggaatggcttgcgcggaccggcgcgcgtatcgatcttctacccgatgttttgccggcgggggcgccggtcgcgacgatctcgcctgccgcggcggaagccttcggcctgccgagcgaaaccgttatcgtcgcgggtacgacggatggctgcgcttctttccttgcgaccggggctgaccggccgggtgacgccgtaagtgcgctgggcacgacgctgactgtgaagatgctctccgacaagccgctctttgccccggaattcgggctctacagccaccggatcggcgacatgtggcttgccggcggcgcctccaacacaggcggcgcggttctcgccgcgcatttcagcaacgatcggatcgccgagctttcggagcaaatcgatccggcgagcgacacgggcctcgacttctatccgctgctgaaacccggcgagcggttcccggtggccgatcccgccttcatgccgcgcatggaaccgcgcccgacggaggacgccgaattcctgaaggcgatcttcgagggcatcgcgggcgtcgagcgtcttgcttatgagcggctcgtatccctcggcagcccggccctgggctcgatccgcaccgtcggcggcggcgcgaagaacggggtgtggaccgaaatccgaaaacggaggctcgtcgttcccttcctgccggtgctatcggaggaggctgctgccggcgccgctcgcctggcgctttccggagcgaaagaggcgggcgtgctatga

SEQ ID NO: 58599 - protein, 427 aa, Sinorhizobium meliloti 1021
MSGQGKLVLGIDLGTSGARAVAMTAAGEIVASGAARLTAFSDDHRDPLGWWKAVQAALAQALEAIDGSHICAVGIDGTSGTMLPVAADGAPLATPLMYNDPVGDTAILERIAVHAPKESAAHGATSGLAKLLTFQSLPEVFRVIHQADWIAGHFTGLYDISDENNALKTGYDPVARNWPEWLARTGARIDLLPDVLPAGAPVATISPAAAEAFGLPSETVIVAGTTDGCASFLATGADRPGDAVSALGTTLTVKMLSDKPLFAPEFGLYSHRIGDMWLAGGASNTGGAVLAAHFSNDRIAELSEQIDPASDTGLDFYPLLKPGERFPVADPAFMPRMEPRPTEDAEFLKAIFEGIAGVERLAYERLVSLGSPALGSIRTVGGGAKNGVWTEIRKRRLVVPFLPVLSEEAAAGAARLALSGAKEAGVL

SEQ ID NO: 58600 - DNA, 1251 bp, Nostoc sp. PCC 7120
  CDS (1)..(1251): transl_table=11
atggatttttatttggggatagactttggtacgtctggtgctagggctgtggtaattgatgaatcagcccatatccaggtgcaggtgcgttatccttggctagaggtagattccttagtatctagctggcaaaaggctttgttgacgctgctaggacaaattcctgaacagttgcggcgagaaatcagagcgatcgctatcaacggaacttcctctacagtcttattatgcgatgtaaatggcaaccctgtagatactcctttactttacaacgatgggcggggatcactggtgttggaagagttgagagatatcgcaccagcaaatcatactgttttaagtgctacttccagcttggctaaattgcgctggatgatgcagttaccctcttttggtgaagcgcgatattttctgcaccaagccgactggttagggtttctcctgcatggacaattgggaatcagcgactaccataatgctttaaagctggggtatgacgtggaaaagttgaagtacccagaatggttagaaagtttgcaaacaccaattcagctacccaaagttttaccgcctgggactcccattggtgaagtgcgtcccgaaatttcccaacagtttttattccctgatgattgcgtggtatgtgcggggacaacagatagcattgcggcatttttggcgagtggtgcaaaatcaccaggggaagcggtgacttccctgggttcaacattagtactcaaacttttaagtcatacccgcgtagaagatgcacgatatggaatttatagccatcgccttggagatttgtggctaactggtggcgcgtcgaatacggggggtgcagttttacgcgaattttttactgatgctgagttagaaaacttgagtcgtgaaattaatgccacaaaagccagccaattagattattatcccttgttgaaagtaggggaacgtttccccatcaatgattccaatttacccccacgcctcacaccacgcccagacaatccagccgaatttttacatggcttattagaaagtatcgcccgcatagaagcccaaggatatgaactattacaaaaattgggtgcagatagcttaaatcaagtttatacagccggtggcggcgcaaaaaaccccacctgggctgcaattcggcaaagaaatttaaaagtccccgtcatttcctcacttaatacagaagccgcctatggaacagcattgctggcgatgcagagaataagagaataa

SEQ ID NO: 58601 - protein, 416 aa, Nostoc sp. PCC 7120
MDFYLGIDFGTSGARAVVIDESAHIQVQVRYPWLEVDSLVSSWQKALLTLLGQIPEQLRREIRAIAINGTSSTVLLCDVNGNPVDTPLLYNDGRGSLVLEELRDIAPANHTVLSATSSLAKLRWMMQLPSFGEARYFLHQADWLGFLLHGQLGISDYHNALKLGYDVEKLKYPEWLESLQTPIQLPKVLPPGTPIGEVRPEISQQFLFPDDCVVCAGTTDSIAAFLASGAKSPGEAVTSLGSTLVLKLLSHTRVEDARYGIYSHRLGDLWLTGGASNTGGAVLREFFTDAELENLSREINATKASQLDYYPLLKVGERFPINDSNLPPRLTPRPDNPAEFLHGLLESIARIEAQGYELLQKLGADSLNQVYTAGGGAKNPTWAAIRQRNLKVPVISSLNTEAAYGTALLAMQRIRE

SEQ ID NO: 58602 - DNA, 1287 bp, Thermosynechococcus elongatus BP-1
  CDS (1)..(1287): transl_table=11
gtgatggggcaagcagtcaccgccctaggcattgattttggaacctcgggggcgcgggcgatcgccatcgatcctgagggcaatgttctggccactgcccgtcggccgctgcaccagccggatcgaccccaagaatgggcagccacattgcgggcgttgattttagaaatgccaagcgctatccgtcggcaaattcggcggattgcaattgatgggacctcgagcaccgttttcctctgtgatgctcaggggcagccctcctcacccgtccttttgtacaacgacgatcgcgcccaagatcatcttcaacggttgcggcagattgtagccgcagatcaccttgtccttagtgccaccagtagtctggtcaagttgttgtggctccagacccactatgccactgccaatgtcgttttcctacaccaagctgactggctagccttcttacttcacggtcaactggggatttccgactggcacaatgccctgaagttgggctatgacccagcaaaggaagcctaccccgactggttcagccaccccatacttgcacccttgcagcccctgctgccccaggtcgttcccccggggacggttgtgggagaggtgacagccactgatttaggcttgtctccagagtgtcaggtgtgtgcggggacgaccgatagcattgccgccttcttggctagtggtgcctctgaggtgggtgaagcggtgacctccttgggctcaacccttgtgctgaagcttttgagtacctctagggtagaggatttgacagcaggcatctatagtcatcgcttgggcgatcgctggctagtggggggcgcgtccaactgcggtgcggcaattttagcccagttttttaccccagaggaactcgaacgcctcagtgtccaaatagatgtcagtcaacccacgggtttagactactatcccctcctcaagcggggtgagcgctttcccatcaatgatcctcacctagagccgcgcctagaaccccggcccaacgaccctcgcctctttttgcagggactccttgaaagtctcagtcgcattgaagcccaaggctatgcccaattgcagcgtttgggggcctcaccgctgaaacaggtctggacagcgggcgggggtgcccgtaatccagcatggttagcgctgcgccagcaatacctaggggttccggtggccatttcaccccacactgaggccgcctatggaacagcgcgtctggcccaactcaacgggggtacaactgctcctgaatttccaacttcagccgattga

SEQ ID NO: 58603 - protein, 428 aa, Thermosynechococcus elongatus BP-1
MMGQAVTALGIDFGTSGARAIAIDPEGNVLATARRPLHQPDRPQEWAATLRALILEMPSAIRRQIRRIAIDGTSSTVFLCDAQGQPSSPVLLYNDDRAQDHLQRLRQIVAADHLVLSATSSLVKLLWLQTHYATANVVFLHQADWLAFLLHGQLGISDWHNALKLGYDPAKEAYPDWFSHPILAPLQPLLPQVVPPGTVVGEVTATDLGLSPECQVCAGTTDSIAAFLASGASEVGEAVTSLGSTLVLKLLSTSRVEDLTAGIYSHRLGDRWLVGGASNCGAAILAQFFTPEELERLSVQIDVSQPTGLDYYPLLKRGERFPINDPHLEPRLEPRPNDPRLFLQGLLESLSRIEAQGYAQLQRLGASPLKQVWTAGGGARNPAWLALRQQYLGVPVAISPHTEAAYGTARLAQLNGGTTAPEFPTSAD

SEQ ID NO: 58604 - DNA, 1230 bp, Prochlorococcus marinus subsp. pastoris str. CCMP1986
  CDS (1)..(1230): transl_table=11
atgccagatgatttttttggaggcttagattttgggactagtggcgcaagaatatccataattaattttaaaaaggaattaaaatatacgaattcagtttcatatcaatatggctttaaaaatcccaactcttggattaattcttgtgaaaaacttctagataatttacctctagatattaaaaaaaatattgttaatttagcaatctccggtacttctggaactttaacggcttgtactttaagaggggatccgataggggaagctataccttacgaccaagcatgcaatgaaaacaaaatacttattgaatccataacggttggagaagatcatttacaaaccccatacagtagtttggctaaagcattaaaactaatagataaatttggggaaaatattattttaagacatcaatctgacttgataacaggctggtttttgaaagattggacctatggagaagaaggcaataatattaaacttggttggagtctaataaaagaatcttggccaaaaagctatctcaaaacttcatggcaaaaatgcttacctttaataattaaaagtggaaaaatcttgggtcaaatcgatactgacttagcggaaagattcaaattaaataagaaaatattattagtctcgggtacaactgattccaatgcagcttttttagctgcaggattgggagatgaagaaggtctaacagttttaggaaccacaatcgtagttaaaaaaattaataagaccccgatcaaagaaaagggaattacaacccatcgagtaagtaataaatggatatgtggaggggcatcaaacgctggctgtggaattttatctcaatttttttctgatttagaaataaaagaacttagcagacaaataaatccctcaaaaaacacttccctaaatcttttgccacttaatagtaggggtgagagatttcctgttaataatccttttttggagccaattcttagccctaggccagtaagcgactcactttttttacatgcattgttcgaggggttagcaagaattgaattaaaaggttgggaaaaactatatgagctgacaggttcacttccaaaaagaattgttactactggtgggggctcaaaaaatcctcaatggagagcaataagagaacggattattaatatcccaataatttcatgtaaaaaaacgacttcatttgggactgctttattagcaattaatgcaaaataa

SEQ ID NO: 58605 - protein, 409 aa, Prochlorococcus marinus subsp. pastoris str. CCMP1986
MPDDFFGGLDFGTSGARISIINFKKELKYTNSVSYQYGFKNPNSWINSCEKLLDNLPLDIKKNIVNLAISGTSGTLTACTLRGDPIGEAIPYDQACNENKILIESITVGEDHLQTPYSSLAKALKLIDKFGENIILRHQSDLITGWFLKDWTYGEEGNNIKLGWSLIKESWPKSYLKTSWQKCLPLIIKSGKILGQIDTDLAERFKLNKKILLVSGTTDSNAAFLAAGLGDEEGLTVLGTTIVVKKINKTPIKEKGITTHRVSNKWICGGASNAGCGILSQFFSDLEIKELSRQINPSKNTSLNLLPLNSRGERFPVNNPFLEPILSPRPVSDSLFLHALFEGLARIELKGWEKLYELTGSLPKRIVTTGGGSKNPQWRAIRERIINIPIISCKKTTSFGTALLAINAK

SEQ ID NO: 58606 - DNA, 1284 bp, Prochlorococcus marinus str. MIT 9313
  CDS (1)..(1284): transl_table=11
atgcctaactcgtccctggcgctcggcatcgaccttggcaccagcggcgtacggcttgccgtgctcaacgagcacggcaagctgatccacacaagcaaaacggactatccaaaagggcttgagagtcctgaagactggaaaacctgctgcacagagctgattcgtgctttacctagcagcctgcgacaaaacctgggtgcagtcgctatcgatggcacatcaggaacactgctggcctgcgaccgctctggcaaaccactcgacacagcgctgccatatcacctgagctgcccggaacaaaggccatcactcatctcccttgtatcccatgaagaaccagcctcaagtgtgagcagcagcctggcaagagctctacgactcatcagcacacatggcccctctgttctgcttcgccatcaagcggactggatcagcggctggttgctagacaattggtgctggggagaagaaggcaacaacctgcgcttgggctggaatttgattgatcaggcctggcctaccagctttgccgagacagcctggcgggcagcacttcctgagatcgtaagcagcggcaaagttctgggtacggtggcacctgagcagtcccaaagccttggcctaccgaaacaactcctcgtagtagcaggtaccaccgacgccaatgctgctgttttaactgccaatgcaggtcccgacgacggcattaccgtgctgggcagcactcttgtgctgaaacgttttacggaaggtccaatccgtggtgctggcatcaccaaccatcgcgttggcggacgatggctctgcggcggagcctccaatgccgggggcagcgtccttcgacaactgttcagtgatactcagctcaaagagttaagccgccagatcaatccagagttcaacagtggtctaatgctgcgccctcttcccggccccggcgaacgcttcccaattgacgaccccacactcgaaccacagctaactccacgacctgtgagcgattccctgtacctccatggcctgctagaaggcctcgcacacatcgaattgcaaggctggcaacgtctcaaagaacttggcgcaccccctcccaagcaagtgatcagcctgggagggggtgcccgcaatccccaatggcgtcgattaagagaacggatccttggcatacccgtcaagacttgcaccaatccaccagctgccggagtcgcccgtctggccttgcaagcgatctctcctcaacacaacttggttagtaccaagcaagaagcggatcaccagctctga

SEQ ID NO: 58607 - protein, 427 aa, Prochlorococcus marinus str. MIT 9313
MPNSSLALGIDLGTSGVRLAVLNEHGKLIHTSKTDYPKGLESPEDWKTCCTELIRALPSSLRQNLGAVAIDGTSGTLLACDRSGKPLDTALPYHLSCPEQRPSLISLVSHEEPASSVSSSLARALRLISTHGPSVLLRHQADWISGWLLDNWCWGEEGNNLRLGWNLIDQAWPTSFAETAWRAALPEIVSSGKVLGTVAPEQSQSLGLPKQLLVVAGTTDANAAVLTANAGPDDGITVLGSTLVLKRFTEGPIRGAGITNHRVGGRWLCGGASNAGGSVLRQLFSDTQLKELSRQINPEFNSGLMLRPLPGPGERFPIDDPTLEPQLTPRPVSDSLYLHGLLEGLAHIELQGWQRLKELGAPPPKQVISLGGGARNPQWRRLRERILGIPVKTCTNPPAAGVARLALQAISPQHNLVSTKQEADHQL

SEQ ID NO: 58608 - DNA, 1266 bp, Synechococcus sp. WH 8102
  CDS (1)..(1266): transl_table=11
gtgaacgttgaaacatcgctggcgctcggcatcgacctgggcaccagcggtgttcgcattgcggtgctgaatcagcagggcacgctgattcattcgtcgtccgctgagtacgccacgggattaacagcccccttggactgggctgaggcgtgccgcgacttgatcacccatttgcccgctcagatcagaggtcaactggccgctgttgcggtcgatggcacctcgggcacgcttctggcttgtcgggaggatggcacccccatggggcctgcactgagctacgccaccgcgttccccgagcagaacagtgcactcaaacggctggtgccagatggctgcgcggcatccagcagcggcggcagcttggcgcgagccctgcagttgctgaagcaccatggccacattgatcgcctgcgacatcaagccgactggatcagcggttggttcctgcagaactggcaatggggcgaagagggcaacaacctcaagcttggatgggaccttgagcaagccacctggcagggctgcatcgctgatcagtcctggagttcggccttgcctgaggtgaagccaagcggttccgtgctgggacgcatcgcaatcgatcaggccaggaatcttggcgtgccagaggatctgctcgtggtggccggtacaaccgattccaacgcggcggtgttggccgcgaaccccggcgacaacgacgggatcaccgtgctgggcaccactctggtgatgaagcgattcacgccagtaccgatccaaggagccggcatcacgcggcatcggatcgggcagcgatggttgtgtggcggggcttccaacgctggggccggcgtgctgcggcgttatttcaccgatgctgagctggcggaactcagccgccagatcgacccagaccaagacagcggcctgagttaccagccccttccggcccgtggcgagcgatttcccgtggacgatcccaacctcgagccggtgctggagccacggccggtgagtgatgccctgtttctgcatgggctgctggaaggtctggcggagattgaggccaagggttgggagcgactgacggaactcggggcggatccaccgcaacgggtgatcagcctcggcggtggtgcccgaaacccccagtggcgcaagatccggcagcggcggcttggccttcccgtggtgagttgcaaccaaccaccggccgcaggtgttgccctgctggccctgagtcggcagcggcagaccgagtacaagatgaacaagtcataa

SEQ ID NO: 58609 - protein, 421 aa, Synechococcus sp. WH 8102
MNVETSLALGIDLGTSGVRIAVLNQQGTLIHSSSAEYATGLTAPLDWAEACRDLITHLPAQIRGQLAAVAVDGTSGTLLACREDGTPMGPALSYATAFPEQNSALKRLVPDGCAASSSGGSLARALQLLKHHGHIDRLRHQADWISGWFLQNWQWGEEGNNLKLGWDLEQATWQGCIADQSWSSALPEVKPSGSVLGRIAIDQARNLGVPEDLLVVAGTTDSNAAVLAANPGDNDGITVLGTTLVMKRFTPVPIQGAGITRHRIGQRWLCGGASNAGAGVLRRYFTDAELAELSRQIDPDQDSGLSYQPLPARGERFPVDDPNLEPVLEPRPVSDALFLHGLLEGLAEIEAKGWERLTELGADPPQRVISLGGGARNPQWRKIRQRRLGLPVVSCNQPPAAGVALLALSRQRQTEYKMNKS

SEQ ID NO: 58610 - DNA, 1389 bp, Gloeobacter violaceus PCC 7421
  CDS (1)..(1389): transl_table=11
atggtagttctcgggtcatcggcacacttccatgctaccgcacctgggttgttcgtcgggatcgacctgggtacctcgggtttgaggctggttgccgtcgacggaagtggcctggctgtcgccacggcttcgcaaacctggccggtggccgcgagtgaacaagatcccgcccaatggctcgcctcgctcgaaaagttgtggaagccgttgatcagggaattacccgggccggtactggccgtcagcgccacgagcacctccggaacggtcctgcccacggactgcaaaggccgccccatcgcctccgcctggctctacagcgaccggcggggctcagagctgggggcgcgcttcggcatcccggccggttggggcctcagccgctggctgtggtggcaattgcaggggagcacagattgccggcttacccatccaagcgattacttgctgacggctctcggggccaaagtgggttggacggaccacacctgcgcgcttaaaagcggctacgatcccgcggcaggaaagtggagcctggcactggcggccggtgttccggccgcacagttgcccgcggtcgtgcggcccggcacggtggtgggcaccctcgcccccgaatggggtctggggagcggcgtgaagctggtggccggttgcaccgacggcgtggcgggacagatcgcaagcggcgccctcgccgtcgggcaggtctgcctcagcctcgggagcacgctcattttcaagggagtcagcgaagcgaagattgccagtgcggacggtgctgtctacagtcacctccatcccgatgggcgcttgtggctgcccggggccgcctccgcctgcggtggggcgattctggaaaagttctatccccgggagcaatgggaagagttgaacgggtgtgcggaagctttgaaccgccccaccggccagaccgcttatcctctggccacaccgggcgagcgttttccgcgctcgggtgccgattttgccgggggattaccggatgttccaaccgaagatccgcacttttacgccggactgctcgaaggagtggcttttgtcgagcgcctggggcttgagcgtctgatggctctgggtatgccggtccagggggctttactgtgcgtggggggcggtacccacagcgaagtctggctacgcattcgcgccgccgtcctgggccgggagctgcaactgcctgcccaggtgcagcccgctctcggagcggcaatcctggctgccgccggtgtctggggggtgggtgtcgcccaggctgcggcccgaatggtgcgcctggatcggcagatcctgccggacgcagccctggctgctgcctacgaagctgtctatcgccggtttctggagcgctggggcggggccggctaa

SEQ ID NO: 58611 - protein, 462 aa, Gloeobacter violaceus PCC 7421
MVVLGSSAHFHATAPGLFVGIDLGTSGLRLVAVDGSGLAVATASQTWPVAASEQDPAQWLASLEKLWKPLIRELPGPVLAVSATSTSGTVLPTDCKGRPIASAWLYSDRRGSELGARFGIPAGWGLSRWLWWQLQGSTDCRLTHPSDYLLTALGAKVGWTDHTCALKSGYDPAAGKWSLALAAGVPAAQLPAVVRPGTVVGTLAPEWGLGSGVKLVAGCTDGVAGQIASGALAVGQVCLSLGSTLIFKGVSEAKIASADGAVYSHLHPDGRLWLPGAASACGGAILEKFYPREQWEELNGCAEALNRPTGQTAYPLATPGERFPRSGADFAGGLPDVPTEDPHFYAGLLEGVAFVERLGLERLMALGMPVQGALLCVGGGTHSEVWLRIRAAVLGRELQLPAQVQPALGAAILAAAGVWGVGVAQAAARMVRLDRQILPDAALAAAYEAVYRRFLERWGGAG

SEQ ID NO: 58612 - DNA, 1158 bp, Arabidopsis thaliana
  CDS (1)..(1158)
atgggttgggcaagctcatggaaagcaactcttttttcgttgctagaggacattcccgtcacagttcgctccctcgtctcatccatttcgcttgatggaacttctgcaactactctcatcttaaacagtgagagtggagaagttctgtgtcaaccttatctctacaaccagagctgccctgatgctctgccagaggtcaagtctatagcgccagcaaaccatacagtctgctctggtacttctaccttgtgcaaacttgtctcatggtggaacactgaggtgccaaacagagaatcagcggtattgctgcatcaggcagactggttgttgtggttacttcacggtagactcggagtgtcagattacaacaatgccttgaaggtgggctatgatcctgagagtgaatcatatccatcatggttgctaggtcagccttattctcagttattacctaaggtgcaagctcctggaacatcaataggcaatctgaaagaaagctttacaaggcaatttggatttccagatgattgcattgtctgcaccggtactactgatagcatagctgcatttcttgcagcacgcgcgactgaacctgggaaagcagtaacttcattgggttcgaccttagccatcaaacttctcagcaccaaaagagttgatgatgcgaggtatggagtctacagccaccgcctggatgacaaatggttggtcggaggagcttccaacactggtggagccattctcagacagctctttagtgacgaacagttagagagactgagccaagaaatcaatcctatggtcggatctcctctagattactatcctttgcaaagcagcggtgaaagatttcccattgctgatcctaacttggctcccagattacttccacgcccagaaagcgacgttgaattcttgcatggtatattggaatcaatcgcacgtattgaggggaaaggctacaagttgctgaaagagttgggagcaacggaggccgaggaagtgttgacagcaggaggtggagccaagaatgacaagtggataaagataaggcagcgagttttgggtttgcctgtgaaaaaagccgtccacactgaagcttcctatggagcttctcttcttgcgctaaagggcgcaaaacagaacagtggtttgtga

SEQ ID NO: 58613 - protein, 385 aa, Arabidopsis thaliana
MGWASSWKATLFSLLEDIPVTVRSLVSSISLDGTSATTLILNSESGEVLCQPYLYNQSCPDALPEVKSIAPANHTVCSGTSTLCKLVSWWNTEVPNRESAVLLHQADWLLWLLHGRLGVSDYNNALKVGYDPESESYPSWLLGQPYSQLLPKVQAPGTSIGNLKESFTRQFGFPDDCIVCTGTTDSIAAFLAARATEPGKAVTSLGSTLAIKLLSTKRVDDARYGVYSHRLDDKWLVGGASNTGGAILRQLFSDEQLERLSQEINPMVGSPLDYYPLQSSGERFPIADPNLAPRLLPRPESDVEFLHGILESIARIEGKGYKLLKELGATEAEEVLTAGGGAKNDKWIKIRQRVLGLPVKKAVHTEASYGASLLALKGAKQNSGL

SEQ ID NO: 58614 - DNA, 1230 bp, Prochlorococcus marinus str. AS9601
  CDS (1)..(1230): transl_table=11
atgcctgataatttttatggagggttagattttggaaccagtggtgcaagaatatcaataattaatcttcataaaaaattaatatattccaattcagtcccttattcatgcagctttaaaagtccaaattcttggatcaagtcttgtgaaaaactcttagggtgtttacctattgagttaaaaagtaaccttcaaaaattggctatatctggcacatcaggaactttaacagcatcaaatttacgaggagagccaataggagaagcaatatcttatgaccaagcatgtaatgaacataaggtccttcttgattcattaacttctgaagaggatcatctgcgaactccatacagtagtcttgctaaagcattaaaactaatagataaatatgggacaaatatacttttaagacatcaatctgattggatcactggttggtttttaaaagattggacttatggagaagaaggtaataatctaaaacttggttgggatctgaaaaaagaatcatggccaaaaagctatctcaatacttcatggagaaaatgcctgcctcaaataataaaaagtgggaaaattattggacaagtgaattttgatttagcagagagatttaacttgaataagaaattaatattaatctcaggcactactgactctaatgcaagtgtaatagctgcaggtttagacaaagaaaatggtctcacagttttaggaacaactattgtagttaagaaaattattgataatcctataaaaaaacaaggaattacaaaccatagagtaaacggcaattggatatgtggaggagcatcaaacgcaggctgtggtatattgtctcagtttttctctgatttagaaataaaagagctcagtagacaaataaatccatcaaaaaacacctctttaaatcttttacctcttaatagtaaaggagaaagatttcctgttaatgattctaatttaaagccgatacttgatccaaggccagtaagcgactctctttatttacatgcattattcgagggtctagcaaagatcgaattgaaaggttgggaaaagctaggcgaactaacaggttcactaccaaaaaaaattattactattggtggaggttcaaaaaaccctcagtggagaaaaataagagaaaatattgtcaatataccaatagtttcatgtaaaaaaactacttcatttggtacagccttgttagcgatgaactcaaaataa

SEQ ID NO: 58615 - protein, 409 aa, Prochlorococcus marinus str. AS9601
MPDNFYGGLDFGTSGARISIINLHKKLIYSNSVPYSCSFKSPNSWIKSCEKLLGCLPIELKSNLQKLAISGTSGTLTASNLRGEPIGEAISYDQACNEHKVLLDSLTSEEDHLRTPYSSLAKALKLIDKYGTNILLRHQSDWITGWFLKDWTYGEEGNNLKLGWDLKKESWPKSYLNTSWRKCLPQIIKSGKIIGQVNFDLAERFNLNKKLILISGTTDSNASVIAAGLDKENGLTVLGTTIVVKKIIDNPIKKQGITNHRVNGNWICGGASNAGCGILSQFFSDLEIKELSRQINPSKNTSLNLLPLNSKGERFPVNDSNLKPILDPRPVSDSLYLHALFEGLAKIELKGWEKLGELTGSLPKKIITIGGGSKNPQWRKIRENIVNIPIVSCKKTTSFGTALLAMNSK

SEQ ID NO: 58616 - DNA, 1236 bp, Prochlorococcus marinus str. NATL1A
  CDS (1)..(1236): transl_table=11
atgttaaacaattcttttgtacttggtatagatcttggtacatcaggcgtaaggattgcaatcattaatactaaaaaaaaaatactattcacatcatcaacaaaatactctaaaggtctggaaatatctggagactggataaatagcctcaaaaatctaatacaagaaattccaaaagatcttaaagaaaagttggtttcttgttcagtagcaggaacctctggaacacttttagcatgcaatagagatggagttcctctagggaaagccctaccttatttcttacccttttcggaatattcatgcgagatagaaaatctatttactaaagaatgtgcaggatcaagtgtaagtggaagtgttggaagagcgctaaaacttctagccttatatggtaatgaaataatcttaaggcaccaagcagattggattagtggatggcttatcaataattgggagtatggggaagaaggtaacaatattaggatgggttgggaaatatcaaatagttcatggccagaaaaatttcaaaatttaaaatggttaaaatgtcttccgaaaataattccttcaggtcaaataatgggaaatatatgtactaaaaaagcaaatgaattaagtttaccaaaaaatcttaaagtcatagcaggaactacagattctaatgctggggttttagctactttccctaataaaaatgatgggataacaatccttggtagcacaatagtaattaaaaaatttgtaaataaccccttggaggggaaaggtatttcaaatcataaattgttagggaattggctatctggtggagcatctaatacaggggcttcgatactactagacttctttaatcttgaatatattgcagaattaagcaaacaaataaatcctaataaatcatcaggattaaaccttcttccattgtcaagtcaaggagaaagatttccaatagatgaccccaatttacaacctaaacttgagccaagaccagtcagtgattctctttatcttcatgcattatttgaagggttagcgaaaatagaagcaagaggctggcaaaaacttaatgaattaggagctgatttacctcggcaaataattactattggaggaggtgcaaaaaatattacttggaaaaaaataagagaaagagaaattggcataccaataaaaatatgcaacaccccccccgctgctggagtagcaagtattgctttgcagggattattatga

SEQ ID NO: 58617 - protein, 411 aa, Prochlorococcus marinus str. NATL1A
MLNNSFVLGIDLGTSGVRIAIINTKKKILFTSSTKYSKGLEISGDWINSLKNLIQEIPKDLKEKLVSCSVAGTSGTLLACNRDGVPLGKALPYFLPFSEYSCEIENLFTKECAGSSVSGSVGRALKLLALYGNEIILRHQADWISGWLINNWEYGEEGNNIRMGWEISNSSWPEKFQNLKWLKCLPKIIPSGQIMGNICTKKANELSLPKNLKVIAGTTDSNAGVLATFPNKNDGITILGSTIVIKKFVNNPLEGKGISNHKLLGNWLSGGASNTGASILLDFFNLEYIAELSKQINPNKSSGLNLLPLSSQGERFPIDDPNLQPKLEPRPVSDSLYLHALFEGLAKIEARGWQKLNELGADLPRQIITIGGGAKNITWKKIREREIGIPIKICNTPPAAGVASIALQGLL

SEQ ID NO: 58618 - DNA, 1284 bp, Prochlorococcus marinus str. MIT 9303
  CDS (1)..(1284): transl_table=11
atgcctaactcgtccctggcgctcggcatcgaccttggcaccagcggcgtacggcttgccgtgctcaacgagcacggcaagctgatccacacaagcacagcggactatccaaaagggcttgagatccctgaagactggaaaacctgctgcacagagctgattcgggctttgcccaccaaccttcggctggccctgagggcattagccgtggatggcacatcaggaactctgctggcctgcgaccacactggcacagcccttagcagagcccttccatacaatctgagctgcccagagcaaaggcaaacactcatctcccttgtctcccatggagaaccagcctcaagtgtgagcagcagcttggcaagggctctacgactaatcagcacccatggccaaagcgttctgctacgccatcaagcggactggatcagcggctggttgctaggcaattggtgctggggagaagaaggcaacaacctgcgcttaggctgggatttagtcaatcagacctggcctgccagcattgccgaaacagcctggcgggcagcacttcctgagatcgtaagcagcggcaaagttctgggtaaggtggcacctgagcagtcccaaagccttggcctaccgaaacaactcctcgtagtagcagggaccaccgacgccaatgctgctgttttaactgccaatgcaggtcccgacgacggcatcaccgtgctgggcagcacccttgtgctgaaacgttttacggaaggtccaatccgtggtgctggcatcaccaaccatcgcgttggcggacgatggctctgcggcggagcctccaatgccggtggcagcgtccttcgacaactgttcagtgataccgagctcaaagagttaagccgccagatcaatccagagttcaacagtggtctaatgctgcgccctcttcccggccccggcgaacgcttcccaattgacgatcccacactcgaaccacagctaacgccacgacctgtgagcgattccctctacctccatggcctgctggaaggcctcgcacacatcgaattgcaaggctggcaacgtctcaaagagcttggcgctccccctcccaagcaagtgatcagcctgggagggggagcacgcaatccccaatggcgtcgattaagagaacggatccttggcatacccgtcaagacttgcaccaacccaccagctgccggagtagcccgtctggccttgcaagcgatctctcctcaacacaacttggttagtaccaagcaagaatcggatcaacagctctga

SEQ ID NO: 58619 - protein, 427 aa, Prochlorococcus marinus str. MIT 9303
MPNSSLALGIDLGTSGVRLAVLNEHGKLIHTSTADYPKGLEIPEDWKTCCTELIRALPTNLRLALRALAVDGTSGTLLACDHTGTALSRALPYNLSCPEQRQTLISLVSHGEPASSVSSSLARALRLISTHGQSVLLRHQADWISGWLLGNWCWGEEGNNLRLGWDLVNQTWPASIAETAWRAALPEIVSSGKVLGKVAPEQSQSLGLPKQLLVVAGTTDANAAVLTANAGPDDGITVLGSTLVLKRFTEGPIRGAGITNHRVGGRWLCGGASNAGGSVLRQLFSDTELKELSRQINPEFNSGLMLRPLPGPGERFPIDDPTLEPQLTPRPVSDSLYLHGLLEGLAHIELQGWQRLKELGAPPPKQVISLGGGARNPQWRRLRERILGIPVKTCTNPPAAGVARLALQAISPQHNLVSTKQESDQQL

SEQ ID NO: 58620 - DNA, 1230 bp, Prochlorococcus marinus str. MIT 9301
  CDS (1)..(1230): transl_table=11
atgcctgataatttttatggagggttagattttggaacgagtggtgcaagaatatcaataattaatcgtcataagaaattagtatattcaaattcagttccttattcatacagctttgaaaatccagattcttggataaattcttgtgaaaatctcttaattagtttacctattgagataaaaattaaccttaataaattggctatttccggcacctcaggaactttaattgcatccaatttgcgaggagatccgataggagaagcaataccttactaccaagcatgtattgaacataagatcattcttgaatccttaacttctggagaagatcacctgcgaactccatacagtagtcttgctaaagcattaaaactattagataaatatgggacaaatatacttttacgacatcaatctgattggatcactggttggttattaaaagattggactcatggagaagaaggtaataatctaaaacttggttgggatctaaaaaaagaatcgtggccaaagagctatctcaatacttcatggcaaaaatgtctacctcaaataataaaaagtggaaaaattattggacaagtaaactctgatttagcagagagatttaatttaaataaaaaattaatattaacttcaggcaccactgactctaatgcagctttaatagccgcagggttaggtaaagaagatggcctcacagttttaggaacaacaattgtgataaaaaaaattattgataaccctataaaaaaacagggcattacaatccatagagttaacgatgattggatatgtggaggagcatcaaatgctggatgcggtgtcttgtctaagttcttttctgatttagaaataaaggaacttagtcgacaaattaatccatcgaaaaatacttctttaaatcttttacctcttaatagtaaaggagatagatttcctgttaataatgctaatttagagccgatacttgatccaaggccagtaagcgactcactttatttacatgcattattcgaggggctagccaagatcgaactgaaaggatgggaaaaactaggcgaactaacaggttcacttccaaaaaaaattattactattggaggaggttcaaaaaacccacaatggaggaaaataagagaaaaaattataaatataccaatagtttcatgtaataaaactacttcatttggaactgccttattagcgatcaatgcaaaataa

SEQ ID NO: 58621 - protein, 409 aa, Prochlorococcus marinus str. MIT 9301
MPDNFYGGLDFGTSGARISIINRHKKLVYSNSVPYSYSFENPDSWINSCENLLISLPIEIKINLNKLAISGTSGTLIASNLRGDPIGEAIPYYQACIEHKIILESLTSGEDHLRTPYSSLAKALKLLDKYGTNILLRHQSDWITGWLLKDWTHGEEGNNLKLGWDLKKESWPKSYLNTSWQKCLPQIIKSGKIIGQVNSDLAERFNLNKKLILTSGTTDSNAALIAAGLGKEDGLTVLGTTIVIKKIIDNPIKKQGITIHRVNDDWICGGASNAGCGVLSKFFSDLEIKELSRQINPSKNTSLNLLPLNSKGDRFPVNNANLEPILDPRPVSDSLYLHALFEGLAKIELKGWEKLGELTGSLPKKIITIGGGSKNPQWRKIREKIINIPIVSCNKTTSFGTALLAINAK

SEQ ID NO: 58622 - DNA, 1281 bp, Synechococcus elongatus PCC 6301
  CDS (1)..(1281): transl_table=11
gtggtcgttgcacttggcctcgacttcggcacctctggagcccgagcgatcgcctgtgattttgacagcgatcgctcggtttctgtatcggtcacttttcccaagaccagtcagaactggccgcaagtttggcgtgaagcgctctggcagctcctcacacaaattcctgctgactggcgatcgcggatcgagcgaattgcgattgatggtacgtccggcaccgtcttgctctgtgatcgcgagggtcagccccagactgagccgctgctctacaaccaagcttgtcccattggtcttgcggatttagcagattgggttccggccgatcatgcagcgctgagttcgacttcttcgctggcaaaactctggttttggcaacagcagtttggtgcgttgcctccagactggcaaattctggctcaggcggattggctgtcgctccaactgcatggatgcagtcagcaaagcgactatcacaatgccctcaagctggggtattcgcccgatcgcgagcgcttcagtaaaaatttgctggattcagagctaggcgcgctcttaccagttgtccatgaaccaggagttgcgatcggtccgattctgcccgcgatcgctcaagagtttggcctgtcgcctgactgtcagatttgtgccggtacaacggatagcattgctgcttttctcgcgagtggtgcccaccaacccggtgtagctgtgacttccctcggttccacaattgttctgaaactgctgagtcaggtcgcagtcagcgatcgcctgaccggcgtttacagtcataaactcggcggctattggctcacgggcggtgcttccaactgcggtggcgcgaccctgcggcagttttttccggatacagaactcgaaagtctcagttgccaaatcgatcccaccaaaaaaagcggacttgattactatccgctgcctagtcgaggtgaacggttcccgatcgctgatcctgatcggctgcctcagcttgaacctcggcctgagaatccagtccagtttttgcaagggctgctggaaggactggcgcaagtggaaaccttgggctatcagcgtttgcaagacctcggcgcaacgcccctaaaacggatttggacagcgggtggtggggctaaaaatgccgtttggcaacaactccgtcaacaagcgatcggtgttccaattgcgatcgcccccaatacagaagcagcttttgggacagctcgactcgccgcctttggcttggctgcatttcactcggcggggttaaagagaacctga

SEQ ID NO: 58623 - protein, 426 aa, Synechococcus elongatus PCC 6301
MVVALGLDFGTSGARAIACDFDSDRSVSVSVTFPKTSQNWPQVWREALWQLLTQIPADWRSRIERIAIDGTSGTVLLCDREGQPQTEPLLYNQACPIGLADLADWVPADHAALSSTSSLAKLWFWQQQFGALPPDWQILAQADWLSLQLHGCSQQSDYHNALKLGYSPDRERFSKNLLDSELGALLPVVHEPGVAIGPILPAIAQEFGLSPDCQICAGTTDSIAAFLASGAHQPGVAVTSLGSTIVLKLLSQVAVSDRLTGVYSHKLGGYWLTGGASNCGGATLRQFFPDTELESLSCQIDPTKKSGLDYYPLPSRGERFPIADPDRLPQLEPRPENPVQFLQGLLEGLAQVETLGYQRLQDLGATPLKRIWTAGGGAKNAVWQQLRQQAIGVPIAIAPNTEAAFGTARLAAFGLAAFHSAGLKRT

SEQ ID NO: 58624 - DNA, 1236 bp, Prochlorococcus marinus str. NATL2A
  CDS (1)..(1236): transl_table=11
atgttaaacaattctcttgtacttggtatagatcttggtacatcaggcgtaaggattgcaatcattaatgttaaaaaaaaaatactattcacatcatcaacaaaatactctaaaggtctagaaatatctggagactggataaatagcctcaaaactctaatacaacaaattccaagagatctcaaagaaaagttggtttcttgttcagtagctggaacctctggaacacttctagcgtgcaatagagatggagttcctctagggaaagccctaccttatttcttaccattttcggaatattcatacgagataagaaatctatttactaaagaatgtgcaggatcaagcgtaagtggaagtgttggaagagcactaaaacttctagccttatatggtaatgaaataatcttaaggcaccaagcagattggattagtggatggcttataaataattgggagtatggggaagaaggtaacaatattaggatgggttgggaaatatcaaatagttcatggccagaaaattttcaaaatttaaaatggttaaaatgtcttccgaaaataattccttcaggtcaaataatgggaaatgtatgtactaaaaaagcagatgaattaagtttaccaaaaaatcttaaagtcatagcaggaactacagattctaatgctggggttttagctactttccctaataaaaatgatgggataacaatccttggtagcacaatagtaattaaaaaatttgtaaataaccccttggagggaaaaggtatttcaaatcataaattgttagggaattggctatctggtggagcatctaatacaggggcttcgatactactagacttctttaatcttgaatatattgcagaattaagcaaacaaataaatcctaataaatcatcaggattaaaccttcttccattgtcaagtcaaggagaaagatttccaatagatgacccaaatttacaacctaaacttgatccaagaccagtcagtgattctctttatcttcatgcattatttgaagggttagcgaaaatagaagcaagaggctggcaaaaacttaatgaattaggagctgatttacctcggcaaataattactattggaggaggtgcaaaaaatattacttggaaaaaaataagagaaagagaaattggcataccaataaaaatatgcaacaccccccccgctgctggagtagcaagtattgctttgcagggattattatga

SEQ ID NO: 58625 - protein, 411 aa, Prochlorococcus marinus str. NATL2A
MLNNSLVLGIDLGTSGVRIAIINVKKKILFTSSTKYSKGLEISGDWINSLKTLIQQIPRDLKEKLVSCSVAGTSGTLLACNRDGVPLGKALPYFLPFSEYSYEIRNLFTKECAGSSVSGSVGRALKLLALYGNEIILRHQADWISGWLINNWEYGEEGNNIRMGWEISNSSWPENFQNLKWLKCLPKIIPSGQIMGNVCTKKADELSLPKNLKVIAGTTDSNAGVLATFPNKNDGITILGSTIVIKKFVNNPLEGKGISNHKLLGNWLSGGASNTGASILLDFFNLEYIAELSKQINPNKSSGLNLLPLSSQGERFPIDDPNLQPKLDPRPVSDSLYLHALFEGLAKIEARGWQKLNELGADLPRQIITIGGGAKNITWKKIREREIGIPIKICNTPPAAGVASIALQGLL

SEQ ID NO: 58626 - DNA, 1269 bp, Thiobacillus denitrificans ATCC 25259
  CDS (1)..(1269): transl_table=11
ttgtatttcctcggaatcgacttcggcaccacgggcgcccgcgcctgtgtcatcgacgcccagggcgcggtcgtcgtcgaggataaacgcgacttcggaaccctcgaggattacgagcgtgccggggtctggcgcgaggcgctgtgggatctcgtcgccgcgcttcccgccgtcgtccgttcggcgctgagcgacatcgcactcgacggcacctcgggcacggtgctcgcctgcgacgaggagctgagcccgcggcacccgccgctgctctacgacgacggccgggccgtcgaggaagcggcgctgatcgcgaagaccgcgacctccgaccacgcggccgccgccccgacctcgggactcgccaagatcctctggttgaaaaagcgcctcgggctcaccggcgcgcgcctctacctcaatcaggccgactggctcgccggcatgttgagcggccgcgtcggcatgaccgactatcacaatgcgctgaagatgggcttcgatctcgaagacctgcgctggcccgcctgggtcgactacctcgccgacgtcgactacctcccggtggcgctcgcccccgggacccggctcgcgaccgtgtcgagaccgcgcgcccgctacctgggggtgaacccgggctgcatggtccacgccggcacgaccgactcgatcgccgccttcctcgcctcgggcatgcagcgaagcggcgacgccgtgacctcgctcggcagcacgctggtattgaagctgctgtccgacgtccgcgtcgagtccggcgcgcacggcatctattcgcactggttcggcgggcgctggctcgccggcggcgcgagcaacgccggcggcgcggtgctgcggcagttcttcgacgaccgccagctggccgcgctcagcgccgggatcgacgcgagcctcgcgagcccgctcgcttacatgcccttgccgcggcccggcgaacgcttcccggtcaacgacccggcgctcgcgccgcggctcgcgccgcgcccgcgcgacgaccgcgaattcctgcacggtctgctcgaaagcctcgcgcggatcgaggcgcgcggctacggcctgttggccgaactcggcgcgaccccgcccgcgcgcgtccgcactgcgggcggcggcgcccgcaacgctgcctggaccggaatacgcgcccgcctcctgaacgtgccggtcgcgcccgcgacccacaccgacgcggcttatggtgctgcgcgcctcgcgctggaggggacgcgctgcttctcacctgcgccctga

SEQ ID NO: 58627 - protein, 422 aa, Thiobacillus denitrificans ATCC 25259
MYFLGIDFGTTGARACVIDAQGAVVVEDKRDFGTLEDYERAGVWREALWDLVAALPAVVRSALSDIALDGTSGTVLACDEELSPRHPPLLYDDGRAVEEAALIAKTATSDHAAAAPTSGLAKILWLKKRLGLTGARLYLNQADWLAGMLSGRVGMTDYHNALKMGFDLEDLRWPAWVDYLADVDYLPVALAPGTRLATVSRPRARYLGVNPGCMVHAGTTDSIAAFLASGMQRSGDAVTSLGSTLVLKLLSDVRVESGAHGIYSHWFGGRWLAGGASNAGGAVLRQFFDDRQLAALSAGIDASLASPLAYMPLPRPGERFPVNDPALAPRLAPRPRDDREFLHGLLESLARIEARGYGLLAELGATPPARVRTAGGGARNAAWTGIRARLLNVPVAPATHTDAAYGAARLALEGTRCFSPAP

SEQ ID NO: 58628 - DNA, 1242 bp, Anabaena variabilis ATCC 29413
  CDS (1)..(1242): transl_table=11
atggatttttatttggggatagactttggtacgtccggtgctagggctgtggtaattgatgaatcagcccatatccaggtgcaggtgcgttatccttggctagaggttgattccctagtctctagttggcaaaaggcgttgttgacgctgctgggacaaattcccgaacagttgcggcgagaaataaaagcgatcgcaattaacggtacttcctctacagttttattatgcgatgcaaatggcaaccctgtagatactcctttactctacaacgatgggcggggatcaatagtactaaatgagttgagagatatcgcaccagcaaatcatactgttttaagtgctacctccagcttggctaaattgcgctggatgatgcagttaccctcttttggcgaagcacgatattttctgcaccaagccgactggttagggtttctcctacatggaaagttgggaatcagcgactaccacaatgctttaaagctgggttatgacgtggaaaagttgcaataccccgaatggttagaaagtctgcaactaccgattcatttacccaaagttttaccccctgggactcccattggtgaagtaagtcccgaaatttcccaacagtttttattacctccagactgcttggtatgtgcggggacaacagatagtattgcagcatttctggcgagtggggcaaaatccccaggggaagcggtgacttcccttggttcgacattagtactcaaacttttgagtcacacccctgtagaagatgtacgatatggaatttatagccatcgccttggtgatttgtggctaaccggtggcgcatcaaatacggggggtgcagtattacgggaatttttcactgatgctgagttagaaaacttgagtcgtgaaattgatgccacaaaagccagcgaattagattattatcccttgttgaaagtaggggaacgctttcctatcaatgatcccaatttacccccacgcctcacaccacgcccagagaatccagcagaatttttacatggcttattagaaagtatcgcccgtatagaaacccaaggatatgaactattacaaaaattgggtgcagatagcttaaatcaagtttatacagccggtggcggcgcaaaaaaccccacatggaatgcaattcggcaaagaaacttaaaagttcccgtcatttcttcacttaatacagaagccgcctatggttcagcattgctggcgatgggaagataa

SEQ ID NO: 58629 - protein, 413 aa, Anabaena variabilis ATCC 29413
MDFYLGIDFGTSGARAVVIDESAHIQVQVRYPWLEVDSLVSSWQKALLTLLGQIPEQLRREIKAIAINGTSSTVLLCDANGNPVDTPLLYNDGRGSIVLNELRDIAPANHTVLSATSSLAKLRWMMQLPSFGEARYFLHQADWLGFLLHGKLGISDYHNALKLGYDVEKLQYPEWLESLQLPIHLPKVLPPGTPIGEVSPEISQQFLLPPDCLVCAGTTDSIAAFLASGAKSPGEAVTSLGSTLVLKLLSHTPVEDVRYGIYSHRLGDLWLTGGASNTGGAVLREFFTDAELENLSREIDATKASELDYYPLLKVGERFPINDPNLPPRLTPRPENPAEFLHGLLESIARIETQGYELLQKLGADSLNQVYTAGGGAKNPTWNAIRQRNLKVPVISSLNTEAAYGSALLAMGR

SEQ ID NO: 58630 - DNA, 1239 bp, Synechococcus sp. CC9605
  CDS (1)..(1239): transl_table=11
atgacggattcaccgctggtgctcggaatcgacctgggcaccagcggcatccgcacagccgttgttgccgctaacggtgcggttctcgacagcagatcccaggcctacggcggagatttcgccaacccccacagctggcgcgaaggctgtggagatctgatcagggcaatcccagcccagctgaggtgccagctgaaagcactcgccgtggatggcacctccggcacgctgctggcctgtgatcgcgatggttccccacatgggaaagcactggcctactcccagagctgccctgagctgcagtcagctctgcaacctttggtggatcccagcagtccagccgccagctgcagcggcagcctggcccgggccttgcggctcctcaactgccatggcgaggcgatcctgctgcggcatcaggccgactggatcagcggatggctgctgaacgattggcgctggggggaagaaggcaacaacctgcgtctgggttgggatctgatcaccagcagctggccagcccgttttgccgaacagccctggcggaaagcactgcctgaaatccgtcccagcggaagcattctcgggacgatcgcaccggagcaggctaaggccttgggattggccgacgatctgatcatcgttgccggaactacggattccaatgccgctgtgctcgccgccgatcccggtcccggagatgggatcaccgtgctgggaaccaccctggtgatgaagtgcttcaccgagacgcccctccacgccccgggcgtcaccagccatcgcgtggggggacgctggctctgtggaggcgcctccaatgcaggggccggtgtgctgcggcgtttctacagcgacgaccaactcaacgaactaagccgccagatcaacccagacaccgacagtggactccgcctgcggccgcttcccgccccgggggaacgcttcccagtcgatgatcaagagctgttgcccgtgcttgaaccacggccggtgagcgatgccctctacctgcatggactgcttgaaggtctcgccgagatcgaggcacagggttggcaccgcctgaacgagctgggtgctgccacacccaggcggatcatcagcattggcggtggagcgcgaaatccccaatggcgacggctgcgggaacgccgcctcggctgcggtgtaacgagttgccaaacaccccccgctgcaggggtggcgcgactggcccaacaggccctggtcgggtga

SEQ ID NO: 58631 - protein, 412 aa, Synechococcus sp. CC9605
MTDSPLVLGIDLGTSGIRTAVVAANGAVLDSRSQAYGGDFANPHSWREGCGDLIRAIPAQLRCQLKALAVDGTSGTLLACDRDGSPHGKALAYSQSCPELQSALQPLVDPSSPAASCSGSLARALRLLNCHGEAILLRHQADWISGWLLNDWRWGEEGNNLRLGWDLITSSWPARFAEQPWRKALPEIRPSGSILGTIAPEQAKALGLADDLIIVAGTTDSNAAVLAADPGPGDGITVLGTTLVMKCFTETPLHAPGVTSHRVGGRWLCGGASNAGAGVLRRFYSDDQLNELSRQINPDTDSGLRLRPLPAPGERFPVDDQELLPVLEPRPVSDALYLHGLLEGLAEIEAQGWHRLNELGAATPRRIISIGGGARNPQWRRLRERRLGCGVTSCQTPPAAGVARLAQQALVG

SEQ ID NO: 58632 - DNA, 1281 bp, Synechococcus elongatus PCC 7942
  CDS (1)..(1281): transl_table=11
gtggtcgttgcacttggcctcgacttcggcacctctggagcccgagcgatcgcctgtgattttgacagcgatcgctcggtttctgtatcggtcacttttcccaagaccagtcagaactggccgcaagtttggcgtgaagcgctctggcagctcctcacacaaattcctgctgactggcgatcgcggatcgagcgaattgcgattgatggtacgtccggcaccgtcttgctctgtgatcgcgagggtcagccccagactgagccgctgctctacaaccaagcttgtcccattgatcttgcggatttagcagattgggttccggccgatcatgcagcgctgagttcgacttcttcgctggcaaaactctggttttggcaacagcagtttggtgcgttgcctccagactggcaaattctggctcaggcggattggctgtcgctccaactgcatggatgcagtcagcaaagcgactatcacaatgccctcaagctggggtattcgcccgatcgcgagcgcttcagtaaaaatttgctggattcagagctaggcgcgctcttaccagttgtccatgaaccaggagttgcgatcggtccgattctgcccgcgatcgctcaagagtttggcctgtcgcctgactgtcagatttgtgccggtacaacggatagcattgctgcttttctcgcgagtggtgcccaccaacccggtgaagctgtgacttccctcggttccacaattgttctgaaactgctgagtcaggtcgcagtcagcgatcgcctgaccggcgtttacagtcataaactcggcggctattggctcacgggcggtgcttccaactgcggtggcgcgaccctgcggcagttttttccggatacagaactcgaaagtctcagttgccaaatcgatcccaccaaaaaaagcggacttgattactatccgctgcctagtcgaggtgaacggttcccgatcgctgatcctgatcggctgcctcagcttgaacctcggcctgagaatccagtccagtttttgcaagggctgctggaaggactgacgcaagtggaaaccttgggctatcagcgtttgcaagacctcggcgcaacgcccctaaaacggatttggacagcgggtggtggggctaaaaatgccgtttggcaacaactccgtcaacaagcgatcggtgttccaattgcgatcgcccccaatacagaagcagcttttgggacagctcgactcgccgcctttggcttggctgcatttcactcggcggggttaaagagaacctga

SEQ ID NO: 58633 - protein, 426 aa, Synechococcus elongatus PCC 7942
MVVALGLDFGTSGARAIACDFDSDRSVSVSVTFPKTSQNWPQVWREALWQLLTQIPADWRSRIERIAIDGTSGTVLLCDREGQPQTEPLLYNQACPIDLADLADWVPADHAALSSTSSLAKLWFWQQQFGALPPDWQILAQADWLSLQLHGCSQQSDYHNALKLGYSPDRERFSKNLLDSELGALLPVVHEPGVAIGPILPAIAQEFGLSPDCQICAGTTDSIAAFLASGAHQPGEAVTSLGSTIVLKLLSQVAVSDRLTGVYSHKLGGYWLTGGASNCGGATLRQFFPDTELESLSCQIDPTKKSGLDYYPLPSRGERFPIADPDRLPQLEPRPENPVQFLQGLLEGLTQVETLGYQRLQDLGATPLKRIWTAGGGAKNAVWQQLRQQAIGVPIAIAPNTEAAFGTARLAAFGLAAFHSAGLKRT

SEQ ID NO: 58634 - DNA, 1302 bp, Trichodesmium erythraeum IMS101
  CDS (1)..(1302): transl_table=11
atgaacttatacctaggaattgattttggcacttccggagcgcgtgctgttgttattgactctaattttcgggttaaagcacaaacaaaatatatttgggaaactgaggaaaataaattacctcatgtttggcaaaaagctctgtttaatcttatttctaatattcctcaggaaatacgaagaaaaattcgagcgatcgctattgatggtacttcggcaactgtattattgtgcaatagtgatggtaaacctgtgactgaaacgctactttataatgatagtagaggggtgacaatgatgaataaattgaaaagtattgccccttctaatcattctgttattagcgtcacctctagtttcgcaaaattgttatggttgactgaaaatacttctaccttaaatcaaaatcaaacatattattttttgcatcaagctgactggctagggtttttgcttcatggaaaactaggagtaagtgactataacaatgttttgaaactaggttatgatgtaaacgacttatgttatccagactggttaaataattttgttaattctgaggttgggaaaaatattcagttaccagaagtagttaaaccaggtgcgaccgtcgacagtgtcacaacagaaatagttaataattttggcttgtctcctgaatgtgttgtttgtggcggtacaacagatagcattgcagcttttatcgccagtggtgctaatagtcctggagaagccgtaacttctttaggttcaactttggtattgaaactattgagtcatactagagttgataatagtaaatatggcatttatagtcatcgcttcggaaatttgtggttagtaggaggtgcttctaatactggaggtgctgttttgcgacatttttttactgaagctgagttggaaagtttgagtaggcaaatagaccctaatattgaaagtagattagattattatcctttgctagaaaagggcgatcgctttcctattaatgatccggaattactcccaaaactagcccctagaccagaaaattccatattatttcttcatggtttacttgaaggtattgctaaaattgaattacgaggatatgaattgttgcaagcattaagcgcagatacacttaccaaggtttataccgccggaggtggtgccaagaattctacttttaccacaattcggggacgttatttaggagtacctacaattaaagctgtttatacagatgcagcttatggtagtgctattttggcaactcatcagtttatttctgatcaaactaacttaactggactttaa

SEQ ID NO: 58635 - protein, 433 aa, Trichodesmium erythraeum IMS101
MNLYLGIDFGTSGARAVVIDSNFRVKAQTKYIWETEENKLPHVWQKALFNLISNIPQEIRRKIRAIAIDGTSATVLLCNSDGKPVTETLLYNDSRGVTMMNKLKSIAPSNHSVISVTSSFAKLLWLTENTSTLNQNQTYYFLHQADWLGFLLHGKLGVSDYNNVLKLGYDVNDLCYPDWLNNFVNSEVGKNIQLPEVVKPGATVDSVTTEIVNNFGLSPECVVCGGTTDSIAAFIASGANSPGEAVTSLGSTLVLKLLSHTRVDNSKYGIYSHRFGNLWLVGGASNTGGAVLRHFFTEAELESLSRQIDPNIESRLDYYPLLEKGDRFPINDPELLPKLAPRPENSILFLHGLLEGIAKIELRGYELLQALSADTLTKVYTAGGGAKNSTFTTIRGRYLGVPTIKAVYTDAAYGSAILATHQFISDQTNLTGL

SEQ ID NO: 58636 - DNA, 1278 bp, Synechococcus sp. CC9311
  CDS (1)..(1278): transl_table=11
atgagccaagatccgctggtgctcggcattgacctaggcaccagcggtgtccgaattgctgtcatcgacagcaactttgctctgctccagaccgaaagttcgccgtaccagatcggtctgatcaaccccttcgactggcgagagcgatgttgcacattgatcgggcgcctcaagcccgattatcgacatcgccttaaagccatcgccgtggatggcacctcaggaacattgctggcatgcgatcaacagggcctgccccttgcggatgctttgccctattcattctcatgctcaacattcgctgatcagctcgaaaaattgagtccacagggtggaccagcttcaagcaccagtgggagccttgcacgggcgctgcacctattcgaccaacacaaaaccaaagcccctctcctgcttcgccatcaagccgactggataagcgggtggcttcttgacaattggagctatggggaggaaggcaacaaccttcgactgggatggaacctgagcaaaagagcttggccagacagcttcatcagccaaccctggtgggatgcacttccagagattcgcgccagtggctcagtacttggccccctttcgtcccaacgcgccaaggatctagacctgccagaggatctactggttgtcgctggaacaacagattcgaatgcggccgttctcacagctgatgctgaagacgacgagggcatcacagtgctgggaagcaccttggtgcttaaacggttcaccgatcagcccctcgctccttgggcagggacctccaaccatcgcgtggggggccgttggttatgcggaggagcctccaatgcgggtgctgcggtgctgaaacaactctttcctgatatcgacctcgctgaacttagccgtcagatcgatcctgatcaaaacagcggcttacagctgcgcccacttcccagatgcggagagcgatttcccgttgatgacccccagctcaaacccatactcacaccccgtcctgtcagcgattccctctatctgcatggccttttagagggattaacgcaaattgaacacgcgggatggcaacgccttacaagccttggagccgatccgccaagaaagatcgtgacccttggaggtggagcgcgcaatcctcaatggcgtcgcctgcgcgagcgccaactcggtgttccgatccgcagttgcaacacacctccagccgccggagtcgcgcgtctggctctgcaggctgtgaaagcaccagacaagactcatcatctaagggagaattag

SEQ ID NO: 58637 - protein, 425 aa, Synechococcus sp. CC9311
MSQDPLVLGIDLGTSGVRIAVIDSNFALLQTESSPYQIGLINPFDWRERCCTLIGRLKPDYRHRLKAIAVDGTSGTLLACDQQGLPLADALPYSFSCSTFADQLEKLSPQGGPASSTSGSLARALHLFDQHKTKAPLLLRHQADWISGWLLDNWSYGEEGNNLRLGWNLSKRAWPDSFISQPWWDALPEIRASGSVLGPLSSQRAKDLDLPEDLLVVAGTTDSNAAVLTADAEDDEGITVLGSTLVLKRFTDQPLAPWAGTSNHRVGGRWLCGGASNAGAAVLKQLFPDIDLAELSRQIDPDQNSGLQLRPLPRCGERFPVDDPQLKPILTPRPVSDSLYLHGLLEGLTQIEHAGWQRLTSLGADPPRKIVTLGGGARNPQWRRLRERQLGVPIRSCNTPPAAGVARLALQAVKAPDKTHHLREN

SEQ ID NO: 58638 - DNA, 1284 bp, Nostoc punctiforme PCC 73102
  CDS (1)..(1284): transl_table=11
atgaatttgtatttgggtatcgacttcggtacatctggcgcacgcggcgtggtaattgacgaggaagcctattgtattcaggctgaggtgagatatcccttccaagactcaacagccaccattacgccaaaaatttggcaggaggctttgtttgtactgctggaacaaatacctgaccaattgcggcgaaaaattaaagcgatcgcaattaatggtacttcttccaccgtcttactagttgatgctgctggtaatccaacagacgcgccactgatgtataacgatgcgcggggatcattgctgctagagcatttgaggagtatagcaccccctaatcataccgtgttaagtgccacctccagcctagccaaacttttgtggatgaggcaattaccctcttttagtgaagcgagatattttctgcatcaggcagattggctggggtttctcctacatggacagttaggaattagcgattatcataatgctttaaagctgggttatgacgtggaagagttgaaatacccagaatggctagaaaaactgcaaataccgattcagctaccccacgttttaactcctgggactcccattgccgaattgcgtcctgaaattatggataagtttggttttagccgtgattgtcttgtatgtgcaggtacaactgatagtattgcggcttttttagccagtggtgcaaaattacctggtgaagccgtgacttcccttggttcaacattggtactaaagttattaagtcgtacccgtgtagaagatgccagatatggaatttacagccataggctaggtgatttgtggctgactggtggtgcttctaatactggaggtgcagtacttaagcaatttttcaccaacgctgagttagaaagccttagtcgggagattgatgcttcaattgccagggagttagattattatccgttgttgaaggcaggcgatcgttttccaattaacgatcctaatttagccccacgtttggaaccacgcccagataatccagtggaattcttgcatgggttgttagaaggtattacacgcatagaagcacgagggtatgaattattacagcaaatgggagcagacaagttaagtcgtgtttatactgctggcggtggcgcggctaatgatacttggactgcgattagggcgcgttatttacagattcctgtagtagcttcagtgtatacagaagctgcttacggaacggcgctgttgggtatggaaggggtgaaaaacagtaattgtgtaactatcttttcgtag

SEQ ID NO: 58639 - protein, 427 aa, Nostoc punctiforme PCC 73102
MNLYLGIDFGTSGARGVVIDEEAYCIQAEVRYPFQDSTATITPKIWQEALFVLLEQIPDQLRRKIKAIAINGTSSTVLLVDAAGNPTDAPLMYNDARGSLLLEHLRSIAPPNHTVLSATSSLAKLLWMRQLPSFSEARYFLHQADWLGFLLHGQLGISDYHNALKLGYDVEELKYPEWLEKLQIPIQLPHVLTPGTPIAELRPEIMDKFGFSRDCLVCAGTTDSIAAFLASGAKLPGEAVTSLGSTLVLKLLSRTRVEDARYGIYSHRLGDLWLTGGASNTGGAVLKQFFTNAELESLSREIDASIARELDYYPLLKAGDRFPINDPNLAPRLEPRPDNPVEFLHGLLEGITRIEARGYELLQQMGADKLSRVYTAGGGAANDTWTAIRARYLQIPVVASVYTEAAYGTALLGMEGVKNSNCVTIFS

SEQ ID NO: 58640 - DNA, 1254 bp, Crocosphaera watsonii WH 8501
  CDS (1)..(1254): transl_table=11
atgttatttttagggattgattttggaacatcaggggggagaggtattgttattaatgataaggaagaaattattactcaagttaatttttctttccatcaacaaaatactaacaatttagcccaaacctggaaacatactctctatatacttttagaaaatatttccacagagattagaaataaaattgaagcgattgctattaatgggacttcttctactgtcttattttgtaatagcaaaggtgaaccaattgacgaacctattttatataatgattcacgggatgtaagtatcttagagaagtttcagaacattattcctcaaaatcatcttgttaacagttctacatctagtttagttaagcttttgtcgtgggagcaaataaataaaagagagaataattcttactttttacatcaagcagactggttaggatttttattacacggaaagttaggcattagtgattatcataatgcgttaaaacttggttatgatgtggaaactttatgttatcctcactggttaaaagcgttacctattaattcagttttaccggaaatattaccaccaggaacccctataaaaacagttagtaatgagatctctgagaggtttaaatttcctagaaattgtcttgtttgtacaggaacaactgatagtattgctgcttttttagctagtggtgtcacccaaccaggagaaggggtaacttctttaggttcaaccttagttttaaaactattgagtaagactcgtgttgaagatatttcatcgggaatttatagccatcgtttagggaatttatggttaacgggaggtgcatcaaatacaggaggtgcagtgttaaaaaaaatttttagcgacgaagaattagaacaattcagtcaaaaaataaatcttgataaacccaccgaattagattattatcccttactaaaatctggagaaagattccccattaataatcctaaattactccctaaacttgagccaatacctgataataaaatagaatttttacaaggtttactggaaagtatggcaaaaattgaagcattaggatacaaaaaattacaaaaattaggagcaacccctgttagtcgagtttatactgctggaggtggagcaaaaaacaaaaattgggctaaaataagacagtattatttacaagtccctgtcaaaatttctgattctaccgaagcagcttatgggactgctttattagctaaacgcagtcaaaataaatag

SEQ ID NO: 58641 - protein, 417 aa, Crocosphaera watsonii WH 8501
MLFLGIDFGTSGGRGIVINDKEEIITQVNFSFHQQNTNNLAQTWKHTLYILLENISTEIRNKIEAIAINGTSSTVLFCNSKGEPIDEPILYNDSRDVSILEKFQNIIPQNHLVNSSTSSLVKLLSWEQINKRENNSYFLHQADWLGFLLHGKLGISDYHNALKLGYDVETLCYPHWLKALPINSVLPEILPPGTPIKTVSNEISERFKFPRNCLVCTGTTDSIAAFLASGVTQPGEGVTSLGSTLVLKLLSKTRVEDISSGIYSHRLGNLWLTGGASNTGGAVLKKIFSDEELEQFSQKINLDKPTELDYYPLLKSGERFPINNPKLLPKLEPIPDNKIEFLQGLLESMAKIEALGYKKLQKLGATPVSRVYTAGGGAKNKNWAKIRQYYLQVPVKISDSTEAAYGTALLAKRSQNK

SEQ ID NO: 58642 - DNA, 1245 bp, Prochlorococcus marinus str. MIT 9211
  CDS (1)..(1245): transl_table=11
atgggaagtcttcccttagcgctaggaatagaccttggtactagtggtgttcgcattgcaatagtcaatagaaataaagacctaatttatacttcatcagtaaattatgaaaataacctagaagattatcatgattggattaattcttgtgaaaaactaattagagaaataccaaaatcattcaaatctaatctagttgcctgctctgtagatggaacttcaggaacgataatagcatgtgattttcaaggggatcctattagcaaagcagttccttatcatagtaattgtatagatgaaacaaagggaatattaaaactaagcactataaaaaatagctctctagaaagatatagtagcattagaaaagcattatatttaactaataagtatggatgcgatatattactaaggcatcaggccgactggattactggttggttgttaaataattgggatttaggggaagaaggaaataacattaaacttggctggaatctcctaagtaaaacatggcttaaagatgttcaaaatttagagtggcgtaattgtctcccaaaaataatttctagcgggaatttatttggtacagtttcatcatctatttctaaaagattagatcttcctaggaatcttaaagtatttgcaggaacaacagattcaaatgcagctgttcttgctgtaaatccatcatcaactgatggcgtaacagttttaggaagtacattagtaattaaaagatttgtaaatgggcctattagaagtcatggtattactaaccatttggttgggggtcaatggctttcagggggtgcatctaatacaggtgcagctgttttaagaagattcttttctgatgaagatctgatagagctgagtagacagataaatccagaaatagatagtggtttaaagctaatgcctcttatgataaaaggagagcgattcccagttaacgaccctgacctagaaccaattcttgggcctaggccaacgagtgactctctatatctccatggactcctcgaaagcattgcccgtatagaagcccaaggatggaataagtttgaaaaactcggtattaaagcgcctcaaagaataattactattggtggcggagcacgcaatcctcaatggcgtcgtataagggaaagaataattggaatccccatactttcttccaaaaagcagcctgcagaaggggtagctctattagcgatgcaatcaattcataaatccttatga

SEQ ID NO: 58643 - protein, 414 aa, Prochlorococcus marinus str. MIT 9211
MGSLPLALGIDLGTSGVRIAIVNRNKDLIYTSSVNYENNLEDYHDWINSCEKLIREIPKSFKSNLVACSVDGTSGTIIACDFQGDPISKAVPYHSNCIDETKGILKLSTIKNSSLERYSSIRKALYLTNKYGCDILLRHQADWITGWLLNNWDLGEEGNNIKLGWNLLSKTWLKDVQNLEWRNCLPKIISSGNLFGTVSSSISKRLDLPRNLKVFAGTTDSNAAVLAVNPSSTDGVTVLGSTLVIKRFVNGPIRSHGITNHLVGGQWLSGGASNTGAAVLRRFFSDEDLIELSRQINPEIDSGLKLMPLMIKGERFPVNDPDLEPILGPRPTSDSLYLHGLLESIARIEAQGWNKFEKLGIKAPQRIITIGGGARNPQWRRIRERIIGIPILSSKKQPAEGVALLAMQSIHKSL

SEQ ID NO: 58644 - DNA, 1275 bp, Synechococcus sp. RS9917
  CDS (1)..(1275): transl_table=11
gtgccacccgacaccaccgtgctcggcatcgatctgggcaccagtggtgttcgggtggccgttctcagtgtggagggtgagctcgtccacagcgaagccaccccctatccaggcgatttcaccaatcccctcgcctggcgtcaggcctgctctgacctgatccaggccatcccacagcatcggcgcgccggcctggccgcgatcgccgtcgatggcacatcgggaacgctgctcgcctgccgccgggatggcacccccttagggcctgcgctctcttatcagcagagctgcccggagcaggtggagacgctccgccgcctgatcgcaccggagcatcctgccggaagcgccagtggcagcctggcccgggccctgcggctgctggacagccaccacgactctcacctgctgctgcgccatcaggccgattggatcaccggatggctgctccaacactggcgcttcggcgaagaaggcaacaacctgcgcttgggttgggatctgcagcgcagcagctggcctgcgaccttccacgaccaggcctgggctgaggccctgcctgagattgaggccagtgggagcattcttggccccatcgcaccgccaatcgcccgtgccctgggctgtcctgagtcggtgcaggtggtggccggcaccaccgacgccaatgcagcggtgttgaccgccaacccagccgtcgatgagggcatcaccgttctcggcagcaccatcgtgctcaagcggttcgtggacgcccccctcaacgccccgggagtgaccaatcatcgggtcggcgggcgctggctctgcggaggagcgtccaatgccggcggcgccgtgctgcgatcactgttcggcgccatcgacctcgccgccctgagccgacagatcgatcccaaccagggcagtgggctggagtttcgtccactgccgggccggggggaacgctttccggtggatgatccgactctggagccggtgctcacgccgcgaccggtgagtgacgccctctatttgcacgggttgctcgaggggttgacgcggattgaagcccagggctggcaacggcttggtcaactgggtgcccccgagccccgtcggctgatcacgcttgggggtggggctcgcaacccccagtggcgccggatccgtgaacggatgctgggccgcccgatcctcacctgtcatgcccctccggcagcgggggtggcccgactcgccctacaggctctgaagccaggagcaaaccgaggtggatccggggcagaattctga

SEQ ID NO: 58645 - protein, 424 aa, Synechococcus sp. RS9917
MPPDTTVLGIDLGTSGVRVAVLSVEGELVHSEATPYPGDFTNPLAWRQACSDLIQAIPQHRRAGLAAIAVDGTSGTLLACRRDGTPLGPALSYQQSCPEQVETLRRLIAPEHPAGSASGSLARALRLLDSHHDSHLLLRHQADWITGWLLQHWRFGEEGNNLRLGWDLQRSSWPATFHDQAWAEALPEIEASGSILGPIAPPIARALGCPESVQVVAGTTDANAAVLTANPAVDEGITVLGSTIVLKRFVDAPLNAPGVTNHRVGGRWLCGGASNAGGAVLRSLFGAIDLAALSRQIDPNQGSGLEFRPLPGRGERFPVDDPTLEPVLTPRPVSDALYLHGLLEGLTRIEAQGWQRLGQLGAPEPRRLITLGGGARNPQWRRIRERMLGRPILTCHAPPAAGVARLALQALKPGANRGGSGAEF

SEQ ID NO: 58646 - DNA, 1335 bp, Synechococcus sp. WH 5701
  CDS (1)..(1335): transl_table=11
gtgcccagtcgccgtggcggcgccgagatctgccccctggcaatgggagtcgatctgggcagcagcggcatccgccttgcggtgatcgatgcacaagggcaggtgctagccgagcgggccacggcctacctcggcagcttcgacgatccagccggctggcagcagggtctgatcgcactggtgcagggtcttcccgctcagctcaggcatcagttgggcgccatcagcctcgatggcacctccggcaccctgctggcctgccgctcagacgggacacccctggggcccgccctggcctacagcctggcctgccccgagcaggcagaggccctctcggcactggtgcctgccggttgcgccgccgccagtgtcagcggcagcctggccagggccctgcgcttgctgggcccgctcgcgcgggagagggtaggggcctggtcagccactgatctgctcctgcgccatcaggccgactggctgatgggctggctgctgggtgactggcgctggggagaggaaggcaacaacctgcgcctgggctgggatctcagacaacaacactggagcggagagctgaagcggcaagcgtgggcggcagcgttgcccgaggtggtctccagcggcacagcactggggccgctggctccaggctctgccgctgcgctggggctgccaggctcctgcctggtggtggccggcagcaccgatgccaacgccgccgtactggctgccgatccagcccccggagacggagtcacggtgctgggcaccaccctggtgctcaagcagttcgtgacggagccgatggcagccccagggctgagctgccatcggctgggagggcgctggctggtgggcggagcctccaacgccggtgggggagtgctgcgtcagttcttcaacgatgccgaactggaacgactcagccgtcagatcgatccctccagacccagtgggctgtactaccggccgctgccatcgaggggggagcgcttccccgtcgacgacccggatctgctgccgatcctggagccacggccggtgagcgatgtgctcttccttcaggggctgctggaagggctggcccggatcgaagcccagggatgggcacgcctgcgccagctgggtgcaccgccgctgcggcgggtgatcagcctggggggcggggcccgcaatccccagtggcggcagttacgacaactggcgatcggcctgccggtgctcagccgtccaggcctggcaccggccttgggcatggcaaggctggccctcagcgccctgacgacggctgcaccgaagatggaggagcctgcaccaccacctgagatcccatga

SEQ ID NO: 58647 - protein, 444 aa, Synechococcus sp. WH 5701
MPSRRGGAEICPLAMGVDLGSSGIRLAVIDAQGQVLAERATAYLGSFDDPAGWQQGLIALVQGLPAQLRHQLGAISLDGTSGTLLACRSDGTPLGPALAYSLACPEQAEALSALVPAGCAAASVSGSLARALRLLGPLARERVGAWSATDLLLRHQADWLMGWLLGDWRWGEEGNNLRLGWDLRQQHWSGELKRQAWAAALPEVVSSGTALGPLAPGSAAALGLPGSCLVVAGSTDANAAVLAADPAPGDGVTVLGTTLVLKQFVTEPMAAPGLSCHRLGGRWLVGGASNAGGGVLRQFFNDAELERLSRQIDPSRPSGLYYRPLPSRGERFPVDDPDLLPILEPRPVSDVLFLQGLLEGLARIEAQGWARLRQLGAPPLRRVISLGGGARNPQWRQLRQLAIGLPVLSRPGLAPALGMARLALSALTTAAPKMEEPAPPPEIP

SEQ ID NO: 58648 - DNA, 1269 bp, Synechococcus sp. WH 7805
  CDS (1)..(1269): transl_table=11
atggcgaacacgccgcttgccctcggcatcgacctgggaacaagtggcgtgaggatcgccgtgatcgattccagccggtcgctgctgttcagcgccgccaccctctaccgccagggtctgcaggcaccgtctgactggattcaggctgtgacagagctcattccatccatccccacgccgctccgcaggcaactgggggctgtcgccgtggatggaacctccggcacgctgctcgcctgcacccatcagggggacccccttggcgacgcactgccgtaccaccaggcctgtccagaacagatcgagaaagtgcgtgatctgatcgccgaggacggtcctgcctgcagcgcaagtagcagcctggcccgtgccctgaggttgctgcaacaccatcggcaaccggtcttgctgagacaccaggctgattgggtgcatgggtggcttctccaggattggcgctggggagaagaaggcaacaacatcaggctgggctggcttttgcaacgccagtgctggccggaaagctttcacgcagaaccgtggatggcgtcgttgcccgacatccgtcccagcggatcgcctctgggaacgatttcaaaagagcgctccaaagacctcgacttacccgatgacctgctcgtggtcgcgggcaccacggatgccaacgccgcggtgctgacggcagatgcagcagacgatgaaggcatcaccgtgctgggaagcaccttggtgatcaagcgattcatggatgagccactcaggcctggggccggcacctccacgcaccgagtgggtggccgctggcttggaggtggagcgtcgaacagtggaggcgccgtgctccttcaggtgtttccaggcatcgacctaacagagctgagccgtcagatcgatcccgaagcatccagcgggcttgatctacgaccgctggcttgcaaaggagaacgcttcccggtggatgatccagcccaggagcccgtgctcacgcctcgccccgtgagtgatgcgctctatctccatggactgctcgaaggtctcagcagaattgaacgagatggttggcagcgcttgcagcaactcggggctccagcccccaaaaggctcgtgacgctgggagggggtgccagaaatccgcaatggcgtcgccttcgcgaacgaatgctgggactgccgatccgcagctgcaccacccccccggctgcaggagtggcccgtctggcgctcaccgctctgcaacaaaaggccgctgcggcgagccattccgagtga

SEQ ID NO: 58649 - protein, 422 aa, Synechococcus sp. WH 7805
MANTPLALGIDLGTSGVRIAVIDSSRSLLFSAATLYRQGLQAPSDWIQAVTELIPSIPTPLRRQLGAVAVDGTSGTLLACTHQGDPLGDALPYHQACPEQIEKVRDLIAEDGPACSASSSLARALRLLQHHRQPVLLRHQADWVHGWLLQDWRWGEEGNNIRLGWLLQRQCWPESFHAEPWMASLPDIRPSGSPLGTISKERSKDLDLPDDLLVVAGTTDANAAVLTADAADDEGITVLGSTLVIKRFMDEPLRPGAGTSTHRVGGRWLGGGASNSGGAVLLQVFPGIDLTELSRQIDPEASSGLDLRPLACKGERFPVDDPAQEPVLTPRPVSDALYLHGLLEGLSRIERDGWQRLQQLGAPAPKRLVTLGGGARNPQWRRLRERMLGLPIRSCTTPPAAGVARLALTALQQKAAAASHSE

SEQ ID NO: 58650 - DNA, 1233 bp, Synechococcus sp. RS9916
  CDS (1)..(1233): transl_table=11
atgacaccactggcgctcggcattgatctgggcaccagcggcgtcaggattgctctgattaatggcgaaggtttgctgctgcacactgcagcaacggcttacacccacaatctttgccaccctcaggactgggcccaagccaccagggtcttaatcgaatcgattgcggctgatctacgccttcgcatccaatcagttgccgttgacggcacctcaggaacacttctggcctgcacgcaacagggggatcccctgggtcaagcattggcttacagcgaagcttgcccagagcacatggaacagctgcaggacctggcgaccgatggtggaccagcagccagcagcagcggaagcctggcccgtgcgcttcgcttgatccaacagcacggcgacactgtgctgttgcgacatcaggctgactgggtcacaggctggttgctgcaggactggcgttggggagaagaaggaaacaacctgcggctgggatggcatctgcaagaccagcgctggccccaaggaatgctgggaacaagctggcaccacgctttaccgcaggtgcgcgccagtgggaacattctcggaaccatcaatcccgaagtggccgcaagccttggcctcagcaaccgagtcagcattgttgctggcacaacggacagcaatgccgctgttttggccgccgatccaggagacgacgacgggatcacggtgcttgggaccacgttggtgatgaaacggttcaccgaccagccactggagggagtaggcatcaccagccatcgcgttggagggcgctggttgtgtggaggggcctccaatagcggtggaggggtgctgcaacaacaatttcccgggatcgacttggccgaactgagtcggcagattgatccagaatgcagcagtggcctgaattaccggcccttgcccaccatcggggaacgctttccacaggatgacccgttttgcgaaccggtgctcaccccaagaccggtgagcgatgtccgccatctacatggcctgctggaagggatggcacggattgaatcggaaggttgggcgaaactgacagcactgggagcactaccaccccaacgggtgatcagcatcggtggaggcgcccgcaatcctcagtggcgacggattcgggagcgcgttctgggctgtccggtcgtcagcagccaggccccccccgcacaaggggttgcacggttagcgcgattggccttcacatcctga

SEQ ID NO: 58651 - protein, 410 aa, Synechococcus sp. RS9916
MTPLALGIDLGTSGVRIALINGEGLLLHTAATAYTHNLCHPQDWAQATRVLIESIAADLRLRIQSVAVDGTSGTLLACTQQGDPLGQALAYSEACPEHMEQLQDLATDGGPAASSSGSLARALRLIQQHGDTVLLRHQADWVTGWLLQDWRWGEEGNNLRLGWHLQDQRWPQGMLGTSWHHALPQVRASGNILGTINPEVAASLGLSNRVSIVAGTTDSNAAVLAADPGDDDGITVLGTTLVMKRFTDQPLEGVGITSHRVGGRWLCGGASNSGGGVLQQQFPGIDLAELSRQIDPECSSGLNYRPLPTIGERFPQDDPFCEPVLTPRPVSDVRHLHGLLEGMARIESEGWAKLTALGALPPQRVISIGGGARNPQWRRIRERVLGCPVVSSQAPPAQGVARLARLAFTS

SEQ ID NO: 58652 - DNA, 1302 bp, Medicago truncatula
  CDS (1)..(1302)
atggacacgtggctccatagattaggagagtgtttgttggagggtgttcaaaatgttcctgaaaatgggacctttttttccctccctgtccgcaactttaccaccattgttcctgaagttcccttatcctttgggaagataagaaaatggttctttttaggtaacaaaccaaggacagtatcaatgtctctcaaaaacgaaaatcgtaataaaaagcagctagaagtgagtacgggagcagctgaaaggctgtatctcgggttagactttggtacttctggtgcaagaaagaatggagagtcacatgattgggtacgctcatggaaggagacacttttttcgttgcttgaagatatcccacttaaccttcgcaaagacattgtgtcgatttctattgatggcacatctgcaactactatcattgttgacagtgacacaggagaaccgttgtggagacctttactttacaatgagagctgtcctgatgcactacctgctgtaaaatccattgcacctccaaaccatacagttgggtatgatcctgaagtggactcatatccatcatggctagtttctcaaccatattctcatcttttaccgtccattcttgcacctggaactccaattgcttgtttaaaggaggaacttagcaataaatttggttttcaaaaggagtgtgttgtatgcaccggaaccactgacagtatagctgcgtttcttgcagctcgtgctactcaacccggaaaagctgttacatcattgggttcaacacttgctattaaactattaagcaacacaagaattgaggattctcggtttggggtgtatagtcatcgccttgatgataaatggcttgttggtggtgcttcaaacactggcggagttgttcttagacagcttttcaccgatgatcaactagagaaactgagtgaacaaatcaatccctcacaaatatcttccttggactactatcctctgccaaaagctggtgaaagatttccagttgcagatccagatttggttccaaggctacttccacgtccagaaaatgatgttgaatacttgcatggaattttggaatccattgcacgtatagaggcaaagggatatggcttgctaaaggatctaggtgcaaccgcagtggatcaagttttcacagccggtggaggagcgaaaaatgagaagtggacaaagatacgggaaagggtgcttggtttacatgtgagtcgtgcaaaccaaacggaagctgcatatggaactgcattgctggcaataaagggtgatcaacaaaatattttgtga

SEQ ID NO: 58653 - protein, 433 aa, Medicago truncatula
MDTWLHRLGECLLEGVQNVPENGTFFSLPVRNFTTIVPEVPLSFGKIRKWFFLGNKPRTVSMSLKNENRNKKQLEVSTGAAERLYLGLDFGTSGARKNGESHDWVRSWKETLFSLLEDIPLNLRKDIVSISIDGTSATTIIVDSDTGEPLWRPLLYNESCPDALPAVKSIAPPNHTVGYDPEVDSYPSWLVSQPYSHLLPSILAPGTPIACLKEELSNKFGFQKECVVCTGTTDSIAAFLAARATQPGKAVTSLGSTLAIKLLSNTRIEDSRFGVYSHRLDDKWLVGGASNTGGVVLRQLFTDDQLEKLSEQINPSQISSLDYYPLPKAGERFPVADPDLVPRLLPRPENDVEYLHGILESIARIEAKGYGLLKDLGATAVDQVFTAGGGAKNEKWTKIRERVLGLHVSRANQTEAAYGTALLAIKGDQQNIL

SEQ ID NO: 58654 - DNA, 1281 bp, Oryza sativa
  CDS (1)..(1281)
atggctgtgattgtcgtacaacgtcagtacgtccaggggtgggaagggtgcagcgagccacccatatgcagcgagtctgcggagcgtaactcatccaggttcacaacgaaaggtacatcaagagtaagggttatgatgcttaggcaaaaaaatccgggaggccagaagaagagctttgatggaacaggcgagcctctatatcttgggatagactttggaacttcaggtgccagatatgctcttgtcgataagcaaggggccatacattctgaaggcaaaagaacttaccctcctgtttctgttcctcagatccttacacattccacatcgcttcaatgcaaaattcagtcagacaaaaacaatggagggattcttgctggcccatatctctacaacgagagcttcgcagacgcgctgccagcagtcgaatcgattgccccggcaaatcatacggtgcgttctggttcgtccaccctgtgcaagcttgtgtcatggtggaattcgagctcagcaggcttgagcagtagagattcagcgatactgatgcaccagtcagactggttgctctggcttttgcatggagaatatggtgtttctgattataacaacactctgaaggtgggctacgatccagagattgactcgtacccaagttggttgatgtcacagccatatgcttacatgttgccgtctgttagagcacccggagctccaattggctcaatcaaggaggatgtgacgtcgttgggttcaactctggcgatcaagctgctgagcaacgcccgcgtggacgacgcgcggttcggcgtgtacagccatcggctggacgacatgtggctggtcgggggcgcgtccaacaccggcggcgccgtcctcaggcagctcttcaccgacgatcagctcgtcgctctcagccacgagatcgacccgtcggttccttcccttctcgattactaccctctgcctaagagaggagaaaggttccctgtctccgaccccaacatgatgccactgcagcctaggccggagagcgacacggcgtacttgcatggcatactggagtcgatcgcgcggattgaggcaaaggggtacaatctgttgaaggagctcggcgcgagcatggtggaggaggttttgacggcgggtggaggagctcggaacgataagtggacggcgataaggggaagggtgcttggcgttccggtgagaaaggcggagcagacggaggcggcctacggggctgcactgctagcactcaagggtgctaatactacgcactag

SEQ ID NO: 58655 - protein, 426 aa, Oryza sativa
MAVIVVQRQYVQGWEGCSEPPICSESAERNSSRFTTKGTSRVRVMMLRQKNPGGQKKSFDGTGEPLYLGIDFGTSGARYALVDKQGAIHSEGKRTYPPVSVPQILTHSTSLQCKIQSDKNNGGILAGPYLYNESFADALPAVESIAPANHTVRSGSSTLCKLVSWWNSSSAGLSSRDSAILMHQSDWLLWLLHGEYGVSDYNNTLKVGYDPEIDSYPSWLMSQPYAYMLPSVRAPGAPIGSIKEDVTSLGSTLAIKLLSNARVDDARFGVYSHRLDDMWLVGGASNTGGAVLRQLFTDDQLVALSHEIDPSVPSLLDYYPLPKRGERFPVSDPNMMPLQPRPESDTAYLHGILESIARIEAKGYNLLKELGASMVEEVLTAGGGARNDKWTAIRGRVLGVPVRKAEQTEAAYGAALLALKGANTTH

SEQ ID NO: 58656 - DNA, 1329 bp, Arabidopsis thaliana
  CDS (1)..(1329)
atggattttggtacttctggaggtcgatttacagttattgatgagcaaggagagattaaagcacaaggcaaaagagaatatcctcctttcatgaaagaagaaagcatgggttgggcaagctcatggaaagcaactcttttttcgttgctagaggacattcccgtcacagttcgctccctcgtctcatccatttcgcttgatggaacttctgcaactactctcatcttaaacaggcatgtaattcaccggatcacttctcttttctgtttctgtattccatttacattagaggatttgattgagagtggagaagttctgtgtcaaccttatctctacaaccagagctgccctgatgctctgccagaggtcaagtctatagcgccagcaaaccatacagtctgctctggtacttctaccttgtgcaaacttgtctcatggtggaacactgaggtgccaaacagagaatcagcggtattgctgcatcaggcagactggttgttgtggttacttcacggtagactcggagtgtcagattacaacaatgccttgaaggtgggctatgatcctgagagtgaatcatatccatcatggttgctaggtcagccttattctcagttattacctaaggtgcaagctcctggaacatcaataggcaatctgaaagaaagctttacaaggcaatttggatttccagatgattgcattgtctgcaccggtactactgatagcatagctgcatttcttgcagcacgcgcgactgaacctgggaaagcagtaacttcattgggttcgaccttagccatcaaacttctcagcaccaaaagagttgatgatgcgaggtatggagtctacagccaccgcctggatgacaaatggttggtcggaggagcttccaacactggtggagccattctcagacagctctttagtgacgaacagttagagagactgagccaagaaatcaatcctatggtcggatctcctctagattactatcctttgcaaagcagcggtgaaagatttcccattgctgatcctaacttggctcccagattacttccacgcccagaaagcgacgttgaattcttgcatggtatattggaatcaatcgcacgtattgaggggaaaggctacaagttgctgaaagagttgggagcaacggaggccgaggaagtgttgacagcaggaggtggagccaagaatgacaagtggataaagataaggcagcgagttttgggtttgcctgtgaaaaaagccgtccacactgaagcttcctatggagcttctcttcttgcgctaaagggcgcaaaacagaacagtggtttgtga

SEQ ID NO: 58657 - protein, 442 aa, Arabidopsis thaliana
MDFGTSGGRFTVIDEQGEIKAQGKREYPPFMKEESMGWASSWKATLFSLLEDIPVTVRSLVSSISLDGTSATTLILNRHVIHRITSLFCFCIPFTLEDLIESGEVLCQPYLYNQSCPDALPEVKSIAPANHTVCSGTSTLCKLVSWWNTEVPNRESAVLLHQADWLLWLLHGRLGVSDYNNALKVGYDPESESYPSWLLGQPYSQLLPKVQAPGTSIGNLKESFTRQFGFPDDCIVCTGTTDSIAAFLAARATEPGKAVTSLGSTLAIKLLSTKRVDDARYGVYSHRLDDKWLVGGASNTGGAILRQLFSDEQLERLSQEINPMVGSPLDYYPLQSSGERFPIADPNLAPRLLPRPESDVEFLHGILESIARIEGKGYKLLKELGATEAEEVLTAGGGAKNDKWIKIRQRVLGLPVKKAVHTEASYGASLLALKGAKQNSGL

SEQ ID NO: 58658 - DNA, 20 bp, Artificial sequence
  primer
atggagaaggttgaccaagc

SEQ ID NO: 58659 - DNA, 20 bp, Artificial sequence
  primer
ttattcccaagatttactac

SEQ ID NO: 58660 - protein, 470 aa, Artificial sequence
  consensus sequence
  Variant (2)..(2): Xaa in position 2 is any amino acid
  Variant (4)..(4): Xaa in position 4 is any amino acid
  Variant (9)..(9): Xaa in position 9 is any amino acid
  Variant (10)..(10): Xaa in position 10 is any or no amino acid
  Variant (12)..(17): Xaa in position 12 to 17 is any amino acid
  Variant (18)..(44): Xaa in position 18 to 44 is any or no amino acid
  Variant (46)..(51): Xaa in position 46 to 51 is any amino acid
  Variant (52)..(67): Xaa in position 52 to 67 is any or no amino acid
  Variant (69)..(86): Xaa in position 69 to 86 is any amino acid
  Variant (87)..(89): Xaa in position 87 to 89 is any or no amino acid
  Variant (93)..(93): Xaa in position 93 is any amino acid
  Variant (95)..(101): Xaa in position 95 to 101 is any amino acid
  Variant (102)..(124): Xaa in position 102 to 124 is any or no amino acid
  Variant (126)..(133): Xaa in position 126 to 133 is any amino acid
  Variant (135)..(153): Xaa in position 135 to 153 is any amino acid
  Variant (154)..(163): Xaa in position 154 to 163 is any or no amino acid
  Variant (165)..(180): Xaa in position 165 to 180 is any amino acid
  Variant (181)..(190): Xaa in position 181 to 190 is any or no amino acid
  Variant (193)..(193): Xaa in position 193 is any amino acid
  Variant (196)..(199): Xaa in position 196 to 199 is any amino acid
  Variant (201)..(210): Xaa in position 201 to 210 is any amino acid
  Variant (212)..(212): Xaa in position 212 is any amino acid
  Variant (214)..(215): Xaa in position 214 to 215 is any amino acid
  Variant (217)..(224): Xaa in position 217 to 224 is any amino acid
  Variant (226)..(236): Xaa in position 226 to 236 is any amino acid
  Variant (237)..(241): Xaa in position 237 to 241 is any or no amino acid
  Variant (244)..(248): Xaa in position 244 to 248 is any amino acid
  Variant (250)..(258): Xaa in position 250 to 258 is any amino acid
  Variant (259)..(273): Xaa in position 259 to 273 is any or no amino acid
  Variant (278)..(279): Xaa in position 278 to 279 is any amino acid
  Variant (281)..(282): Xaa in position 281 to 282 is any amino acid
  Variant (284)..(284): Xaa in position 284 is any amino acid
  Variant (285)..(294): Xaa in position 285 to 294 is any or no amino acid
  Variant (296)..(296): Xaa in position 296 is any amino acid
  Variant (299)..(299): Xaa in position 299 is any amino acid
  Variant (301)..(303): Xaa in position 301 to 303 is any amino acid
  Variant (305)..(314): Xaa in position 305 to 314 is any amino acid
  Variant (315)..(316): Xaa in position 315 to 316 is any or no amino acid
  Variant (318)..(320): Xaa in position 318 to 320 is any amino acid
  Variant (322)..(326): Xaa in position 322 to 326 is any amino acid
  Variant (327)..(328): Xaa in position 327 to 328 is any or no amino acid
  Variant (331)..(331): Xaa in position 331 is any amino acid
  Variant (337)..(337): Xaa in position 337 is any amino acid
  Variant (339)..(341): Xaa in position 339 to 341 is any amino acid
  Variant (343)..(345): Xaa in position 343 to 345 is any amino acid
  Variant (347)..(353): Xaa in position 347 to 353 is any amino acid
  Variant (356)..(357): Xaa in position 356 to 357 is any amino acid
  Variant (359)..(365): Xaa in position 359 to 365 is any amino acid
  Variant (366)..(366): Xaa in position 366 is any or no amino acid
  Variant (368)..(370): Xaa in position 368 to 370 is any amino acid
  Variant (373)..(375): Xaa in position 373 to 375 is any amino acid
  Variant (381)..(382): Xaa in position 381 to 382 is any amino acid
  Variant (385)..(387): Xaa in position 385 to 387 is any amino acid
  Variant (389)..(389): Xaa in position 389 is any amino acid
  Variant (391)..(391): Xaa in position 391 is any amino acid
  Variant (395)..(400): Xaa in position 395 to 400 is any amino acid
  Variant (402)..(405): Xaa in position 402 to 405 is any amino acid
  Variant (407)..(408): Xaa in position 407 to 408 is any amino acid
  Variant (410)..(410): Xaa in position 410 is any amino acid
  Variant (413)..(414): Xaa in position 413 to 414 is any amino acid
  Variant (416)..(418): Xaa in position 416 to 418 is any amino acid
  Variant (420)..(421): Xaa in position 420 to 421 is any amino acid
  Variant (425)..(433): Xaa in position 425 to 433 is any amino acid
  Variant (438)..(438): Xaa in position 438 is any amino acid
  Variant (440)..(441): Xaa in position 440 to 441 is any amino acid
  Variant (443)..(445): Xaa in position 443 to 445 is any amino acid
  Variant (447)..(452): Xaa in position 447 to 452 is any amino acid
  Variant (454)..(461): Xaa in position 454 to 461 is any amino acid
  Variant (462)..(462): Xaa in position 462 is any or no amino acid
  Variant (464)..(464): Xaa in position 464 is any amino acid
  Variant (466)..(466): Xaa in position 466 is any amino acid
  Variant (468)..(468): Xaa in position 468 is any amino acid
GXDXGTSGXXRXXXXXXXXXXXXXXXXXXXXXXXXXXXXXXXXXWXXXXXXXXXXXXXXXXXXXXXXLXXXXXXXXXXXXXXXXXXXXXGTSXTXXXXXXXXXXXXXXXXXXXXXXXXXXXXXXGXXXXXXXXYXXXXXXXXXXXXXXXXXXXXXXXXXXXXXLXXXXXXXXXXXXXXXXXXXXXXXXXXHQXDWXXXXLXXXXXXXXXXNXLXXGXXXXXXXXPXXXXXXXXXXXXXXXXLPXXXXXGXXXXXXXXXXXXXXXXXXXXXXXXGTTDXXAXXLXXXXXXXXXXXTXLGXTXXXKXXXXXXXXXXXXGXXXHXXXXXXXWLXGGASNXGXXXLXXXFXXXXXXXLSXXIXXXXXXXXLXXXPLXXXGERFPXXDPXXXPXLXPRPXXXXXXLXXXXEXXAXIEXXGXXXLXXLGAXXXXXXXXXGGGAXNXXWXXXRXXXXXXPXXXXXXXXXAXGXAXLA

SEQ ID NO: 58661 - protein, 33 aa, Artificial sequence
  protein pattern
  Variant (2)..(2): Xaa in position 2 is any amino acid
  Variant (3)..(3): Xaa in position 3 is Phe, Leu or Val
  Variant (4)..(4): Xaa in position 4 is any amino acid
  Variant (5)..(5): Xaa in position 5 is Asp, Gly or Asn
  Variant (6)..(6): Xaa in position 6 is any amino acid
  Variant (9)..(9): Xaa in position 9 is Ala, Cys, Gly, Ser, Thr or Val
  Variant (15)..(15): Xaa in position 15 is Ala, Cys, Ser or Thr
  Variant (17)..(17): Xaa in position 17 is Ala or Gly
  Variant (18)..(19): Xaa in position 18 to 19 is any amino acid
  Variant (21)..(22): Xaa in position 21 to 22 is any amino acid
  Variant (23)..(28): Xaa in position 23 to 28 is any or no amino acid
  Variant (30)..(31): Xaa in position 30 to 31 is any amino acid
  Variant (32)..(32): Xaa in position 32 is Phe, Ile or Leu
  Variant (33)..(33): Xaa in position 33 is Ala, Ser or Val
HXXXXXWLXGGASNXGXXXLXXXXXXXXLXXXX

SEQ ID NO: 58662 - protein, 35 aa, Artificial sequence
  protein pattern
  Variant (2)..(2): Xaa in position 2 is any amino acid
  Variant (6)..(6): Xaa in position 6 is any amino acid
  Variant (7)..(7): Xaa in position 7 is Asp, Asn or Ser
  Variant (8)..(8): Xaa in position 8 is Asp, Pro or Ser
  Variant (9)..(10): Xaa in position 9 to 10 is any amino acid
  Variant (11)..(11): Xaa in position 11 is Phe, His or Tyr
  Variant (13)..(13): Xaa in position 13 is any amino acid
  Variant (14)..(14): Xaa in position 14 is Ala or Gly
  Variant (15)..(15): Xaa in position 15 is Ile, Leu or Met
  Variant (16)..(16): Xaa in position 16 is Phe or Leu
  Variant (18)..(18): Xaa in position 18 is Gly or Ser
  Variant (19)..(19): Xaa in position 19 is Ile, Leu or Met
  Variant (20)..(20): Xaa in position 20 is Ala, Ser or Thr
  Variant (21)..(21): Xaa in position 21 is any amino acid
  Variant (24)..(25): Xaa in position 24 to 25 is any amino acid
  Variant (27)..(27): Xaa in position 27 is Trp or Tyr
  Variant (28)..(29): Xaa in position 28 to 29 is any amino acid
  Variant (31)..(32): Xaa in position 31 to 32 is any amino acid
  Variant (33)..(33): Xaa in position 33 is Leu or Met
  Variant (34)..(34): Xaa in position 34 is Gly, Ser or Thr
  Variant (35)..(35): Xaa in position 35 is Ala or Gly
LXPRPXXXXXXLXXXXEXXXXIEXXGXXXLXXXXX

SEQ ID NO: 58663 - protein, 26 aa, Artificial sequence
  protein pattern
  Variant (2)..(2): Xaa in position 2 is Asp or Asn
  Variant (3)..(3): Xaa in position 3 is Ala, Pro or Val
  Variant (4)..(6): Xaa in position 4 to 6 is any amino acid
  Variant (7)..(7): Xaa in position 7 is Ser or Thr
  Variant (8)..(8): Xaa in position 8 is any amino acid
  Variant (10)..(12): Xaa in position 10 to 12 is any amino acid
  Variant (15)..(17): Xaa in position 15 to 17 is any amino acid
  Variant (23)..(23): Xaa in position 23 is any amino acid
  Variant (24)..(24): Xaa in position 24 is Ala, Asp, Asn or Ser
  Variant (26)..(26): Xaa in position 26 is Pro, Gln or Ser
IXXXXXXXLXXXPLXXXGERFPXXDX

SEQ ID NO: 58664 - protein, 21 aa, Artificial sequence
  protein pattern
  Variant (2)..(2): Xaa in position 2 is any amino acid
  Variant (5)..(5): Xaa in position 5 is any amino acid
  Variant (7)..(8): Xaa in position 7 to 8 is any amino acid
  Variant (10)..(12): Xaa in position 10 to 12 is any or no amino acid
  Variant (14)..(16): Xaa in position 14 to 16 is any amino acid
  Variant (17)..(17): Xaa in position 17 is Ile or Leu
  Variant (18)..(19): Xaa in position 18 to 19 is any amino acid
  Variant (20)..(20): Xaa in position 20 is Asp, Gly or Pro
  Variant (21)..(21): Xaa in position 21 is Phe, Ile or Val
GXGAXNXXWXXXRXXXXXXXX

SEQ ID NO: 58665 - protein, 16 aa, Artificial sequence
  protein pattern
  Variant (2)..(2): Xaa in position 2 is any amino acid
  Variant (3)..(3): Xaa in position 3 is any or no amino acid
  Variant (5)..(5): Xaa in position 5 is any or no amino acid
  Variant (7)..(7): Xaa in position 7 is any or no amino acid
  Variant (9)..(9): Xaa in position 9 is Ala, Gly or Ser
  Variant (10)..(10): Xaa in position 10 is any amino acid
  Variant (12)..(12): Xaa in position 12 is Ala, Gly or Ser
  Variant (13)..(13): Xaa in position 13 is any amino acid
  Variant (14)..(14): Xaa in position 14 is Ile or Leu
  Variant (15)..(15): Xaa in position 15 is Ala or Thr
  Variant (16)..(16): Xaa in position 16 is Ala, Ser, Thr or Val
VXXGXTXDXXAXXXXX

SEQ ID NO: 58666 - protein, 12 aa, Artificial sequence
  protein pattern
  Variant (2)..(2): Xaa in position 2 is Ser or Val
  Variant (5)..(5): Xaa in position 5 is Ser or Thr
  Variant (7)..(7): Xaa in position 7 is Ile or Leu
  Variant (8)..(8): Xaa in position 8 is Ala or Val
  Variant (9)..(9): Xaa in position 9 is Ile, Leu, Met or Val
  Variant (11)..(11): Xaa in position 11 is any amino acid
  Variant (12)..(12): Xaa in position 12 is Phe, Ile or Leu
TXLGXTXXXKXX

SEQ ID NO: 58667 - protein, 15 aa, Artificial sequence
  protein pattern
  Variant (2)..(2): Xaa in position 2 is Ile or Leu
  Variant (4)..(4): Xaa in position 4 is Phe or Leu
  Variant (9)..(9): Xaa in position 9 is Ala, Gly, Ile, Leu or Val
  Variant (11)..(12): Xaa in position 11 to 12 is any amino acid
  Variant (13)..(13): Xaa in position 13 is Ala, Gly, Ile, Leu or Val
  Variant (14)..(14): Xaa in position 14 is any amino acid
  Variant (15)..(15): Xaa in position 15 is Ala, Asp, Asn, Ser or Thr
GXDXGTSGXRXXXXX

SEQ ID NO: 58668 - DNA, 936 bp, Synechocystis sp.
  CDS (1)..(936): transl_table=11
atgttagtggtggcctgtcaaaatccctctcaacgggaagcagtaaaaaattctgaagattgcgtcatcgttaaccagcctgaggatcaagcctgtgtcccaaaaaccattgatcgtctcgttaccttagatggagccgcctttgaatatgcgatcgcccttggcctggagccgatcgccacagtgcccagcaattttcaggcccaactgccagccctaatgaccaatgctgaaaatattcaaaatattggcaagggggaacaacccaatttagaagcaattttgggaacaaatcccgacttgattgtggggctagattcccaccaaagtatttacccccaacttagccagattgggccgacagtgctgtttccttttgaacatagtggacagtggaaagaggtttttgcttccgtgggcaatgctctccaccggcaggccgccacccagtcagccttggccgcctatcaagctcgctcgacggattttcgcactcaaatgggcgatcgccttgataatctgcaagtttccgtcattcgcctctatcccgatggcattaacttatacctgaaggactcatttgccggtacagtgctgcaggatgcgggtttagctcgtcccccttcccagaatattagtgcggtggaagcccaacaaaaatttggcaatcctatccaaaccagaattagccgtgaagtattggagcaagccgacggagatgtgatttttctttggacaggggaaaacactccccagggcaatgaggaagcgaaaaaacgactgcaacaactacagcaagatcccctctggggtcaactgagggccgtaaaggcaggcaaagtgtacgaagtaccaagctattggattggcagtggaccgatcgccgctaatgccatcctcgacgacctatataaataccttcttggagaaaattaa

SEQ ID NO: 58669 - protein, 311 aa, Synechocystis sp.
MLVVACQNPSQREAVKNSEDCVIVNQPEDQACVPKTIDRLVTLDGAAFEYAIALGLEPIATVPSNFQAQLPALMTNAENIQNIGKGEQPNLEAILGTNPDLIVGLDSHQSIYPQLSQIGPTVLFPFEHSGQWKEVFASVGNALHRQAATQSALAAYQARSTDFRTQMGDRLDNLQVSVIRLYPDGINLYLKDSFAGTVLQDAGLARPPSQNISAVEAQQKFGNPIQTRISREVLEQADGDVIFLWTGENTPQGNEEAKKRLQQLQQDPLWGQLRAVKAGKVYEVPSYWIGSGPIAANAILDDLYKYLLGEN

SEQ ID NO: 58670 - DNA, 948 bp, Synechocystis sp. PCC 6803
  CDS (1)..(948): transl_table=11
atgaaaagtaaactaataatttttactttctgcctggtgctatttggttgtgctaaacaagtacccgttgaattttcccctggggaaaccattcaatcaaacctaacccagcgcaccatagcccacgccatgggcgtaacggcagtccccaatgagccacagcgcatagtggtgttgaccaatgaagcaacagatatggtattggccttgggagtcaccccggtgggggcagttaaatcttggtccggagatccttactacgaatatttagcaaaggatatgcttggagtccccatcgtgggagatgaaatgcagcctaacctagagaaaattgtcgccttacagccggacttgattatcggtagtcggttgcgccagggacaaatttacaagtcactgagtgccattgcccccacagttttttcagaaaccattggtgaatcatggcaagataacctacgtctttatgggcaggcccttgacagagaagccgaagcggagcaacttttgaacgattgggacacgcgtgtggcccaaatgcgtcaaaaactaagtgcaaaagatttaacaatttccctcgtccgatttatgccaaggggagcccgcatttatttacaaaattctttccccggtcaaattttgcaggcagtgggtttggaaagaccggcgagtcaagctaaccatggctttgctgaacatgtttccttcgagcaaattccccaaatggaagctgatgcactgttttacttcatctataccggagatagcggggaccaaacccccggcagcataacgaatccttggttaaaccatcccctatggcagcagttggaggttgttcaatcgggtaaggcctacgctgttagcgatgtggtttggaccactgccggaggtatccaagccgcccacctgctactagatgatttggaacgacatttagagccttag

SEQ ID NO: 58671 - protein, 315 aa, Synechocystis sp. PCC 6803
MKSKLIIFTFCLVLFGCAKQVPVEFSPGETIQSNLTQRTIAHAMGVTAVPNEPQRIVVLTNEATDMVLALGVTPVGAVKSWSGDPYYEYLAKDMLGVPIVGDEMQPNLEKIVALQPDLIIGSRLRQGQIYKSLSAIAPTVFSETIGESWQDNLRLYGQALDREAEAEQLLNDWDTRVAQMRQKLSAKDLTISLVRFMPRGARIYLQNSFPGQILQAVGLERPASQANHGFAEHVSFEQIPQMEADALFYFIYTGDSGDQTPGSITNPWLNHPLWQQLEVVQSGKAYAVSDVVWTTAGGIQAAHLLLDDLERHLEP

SEQ ID NO: 58672 - DNA, 993 bp, Synechocystis sp. PCC 6803
  CDS (1)..(993): transl_table=11
atgcacagatcgggtcgtagatttagactatttacactaacaatcctgacgattgtatttttttctgcctgtgttggtagcacctcacaaaatctggatcaatctacagagttattgtccgtagattgcaggattgtcgagcattccttgggaaaaacttgtgtgcccctggagccgcgtcgagtggtggccctagatggtgccacggtgggtaatttactagccttggggatgatgcccgctggggtggccagcaatcttttacccgaaataacccgtttaattcccaatgtgccccgtttaggacagagtagtcagatcaatttagaaaccctagcggttctacagcctgacttgattatcggggccgtctgggaaatgaaaggcatttataacaaattatcggcgatcgcccccactgttgcctttgagatgcaaacccccgctgactggcaacgtccattccgtttcgatggtcaggtactgggcttagaaacccaagcggaaaaggtgctggagcagtatcaaatgcgtgtaaataagttgagggcccaagttagtgactcccctctacagatttccttggtacggattagggccgagtcgggacagatgagtttatatctgaagaattgcttcggcggggccattttggctgatttaggctttgctcgtcccccgtctcaggatcaaggaactccagaccaaccgccctttgcaaagtccattagcagagaatcgatgaccgaagctgatggagatgtaatttttctgttcacttttggtcatactccacaaattgctgccgccgccgaggcccagttagaacgcttggacaccgaccccctctggcagtcccttggggcggtgcagaaaaaccgagtgtattcggtggggcactattggggggctggtaatagtcctctggcagcggactgggtattggatgacgtggagcagtatctgttggaggttcctggcaatggagtataa

SEQ ID NO: 58673 - protein, 330 aa, Synechocystis sp. PCC 6803
MHRSGRRFRLFTLTILTIVFFSACVGSTSQNLDQSTELLSVDCRIVEHSLGKTCVPLEPRRVVALDGATVGNLLALGMMPAGVASNLLPEITRLIPNVPRLGQSSQINLETLAVLQPDLIIGAVWEMKGIYNKLSAIAPTVAFEMQTPADWQRPFRFDGQVLGLETQAEKVLEQYQMRVNKLRAQVSDSPLQISLVRIRAESGQMSLYLKNCFGGAILADLGFARPPSQDQGTPDQPPFAKSISRESMTEADGDVIFLFTFGHTPQIAAAAEAQLERLDTDPLWQSLGAVQKNRVYSVGHYWGAGNSPLAADWVLDDVEQYLLEVPGNGV

SEQ ID NO: 58674 - DNA, 996 bp, Nostoc sp. PCC 7120
  CDS (1)..(996): transl_table=11
atgaagaaacgactgctccattattaccgacttattttcttgataacctttgctttagtattggttacagcttgctacagcaatataaatgacaatataaaatcttcaaagtcacaaccaataacatctgagtgccgagttatcaagcatcctttaggagaaacctgtattcctttgcagccacaacgcattatcacaatggatgaagatattttagaagtgttgctggcacttgacttaaaaccagtagcagtagcaacaaatgtaaatgcctggggtaacagagaacgacaattattcagtaaagctgaaggtatagcttcaattattttaggaaatgaagctctgccaaatttagaaaaaatggtgctgttacatccagatttgattttgggacttgcatctagtactagcagaaaagattatgaattattttcacagatagctcccacgattacacttgattacgtccaatctcgttggaaagataggttcttgcgtattggcgaaatcatgggtagaagggaacaagcccaaaaagcactcacccaatatcaacaacgagtggaacaattgcgaacaattgtggcaaaacaattaggagaaatcaaagtttctgttagtaacttcactatttggagtcagacaatagaacttcgttccaaattttcatttcctggtagtgtccttttagaagtaggactgtcttttccagaaagacaaaatcaattttctaccactccagactatccttttgtatctgttagcatggaacgtctagaattgctagatgcagatgtaatgtttgcgtcattggaatatggttcggaagaaaaatttcaaaaatatcagaatagccctttatggcaaaaacttaaggtagttaaaaacaaccgattatacacagttgattcaggttactggatatttggcaatattctctcagctaatgccatacttgatgatttatatcaatacctggtaggaaaatcatga

SEQ ID NO: 58675 - protein, 331 aa, Nostoc sp. PCC 7120
MKKRLLHYYRLIFLITFALVLVTACYSNINDNIKSSKSQPITSECRVIKHPLGETCIPLQPQRIITMDEDILEVLLALDLKPVAVATNVNAWGNRERQLFSKAEGIASIILGNEALPNLEKMVLLHPDLILGLASSTSRKDYELFSQIAPTITLDYVQSRWKDRFLRIGEIMGRREQAQKALTQYQQRVEQLRTIVAKQLGEIKVSVSNFTIWSQTIELRSKFSFPGSVLLEVGLSFPERQNQFSTTPDYPFVSVSMERLELLDADVMFASLEYGSEEKFQKYQNSPLWQKLKVVKNNRLYTVDSGYWIFGNILSANAILDDLYQYLVGKS

SEQ ID NO: 58676 - DNA, 1086 bp, Nostoc sp. PCC 7120
  CDS (1)..(1086): transl_table=11
atgagaaagagagtcatcaatacaattatgccattgttagttcttgttaaaggagtttgtgttttgacttttgctaagtttgtttgggttgtcaagactgttttttcgagtaattacaagtttttaccattctttctgaccatagttgctgttgttgcgatcgcagcctgtaacaacacatcgcagctagaacaaagggaaacaagtgcaactgctctaagtccaatagaaacaaaaactattagccatgctttaggtaaagttaaaattccacttaaaccgcagcgagttgttgtattagaagaaaatataattctcgattctgtactggctctgggtgtaaagccagttggtgtcatgtattgtcaggactgtgaggaaaattttcgaggtatccccagcgacttacttgctgatgttccagtggtgggcaatattggaaatcaaccttccctagagaaaattcttagtttaaaacccgatttaattttggggttaacatggctcaagagttcttataaaatcctttccagtatcgcgccaaccgtactgatcgattttccgagtatgtatgattttaaagaaagactacgatatgtagcccaggtgttgggaaagagcgatcgcgcagaggaacttctgactcagtaccaaaatcgtatccaaacattgcggcagcaattaggaaagcaactagaaacaaaaacaatatctgtgatttatcttgcaggttcggcggatattttttatagctacagaccggactttctagcttatggtcaaattcttagcgacgcaggtttacgactaatccaacaaaatcaaaaacaacgcgagttaactttaagtattgaagttttacccaaatacgatgcggatattttatttattatgacagaacacttgactagagattttaaagaagcaaatcctgaagttttatctttcttacaaaagcctatttggtcaaatcttaaagctgttaaaactaaacagatatatagggtaaattggactgtcgggggagctatgggagctaacagaataattgatgacctctataaatatttagtcaaaacaccttaa

SEQ ID NO: 58677 - protein, 361 aa, Nostoc sp. PCC 7120
MRKRVINTIMPLLVLVKGVCVLTFAKFVWVVKTVFSSNYKFLPFFLTIVAVVAIAACNNTSQLEQRETSATALSPIETKTISHALGKVKIPLKPQRVVVLEENIILDSVLALGVKPVGVMYCQDCEENFRGIPSDLLADVPVVGNIGNQPSLEKILSLKPDLILGLTWLKSSYKILSSIAPTVLIDFPSMYDFKERLRYVAQVLGKSDRAEELLTQYQNRIQTLRQQLGKQLETKTISVIYLAGSADIFYSYRPDFLAYGQILSDAGLRLIQQNQKQRELTLSIEVLPKYDADILFIMTEHLTRDFKEANPEVLSFLQKPIWSNLKAVKTKQIYRVNWTVGGAMGANRIIDDLYKYLVKTP

SEQ ID NO: 58678 - DNA, 993 bp, Nostoc sp. PCC 7120
  CDS (1)..(993): transl_table=11
atgaaaaaaaagaagatttgggctttaatttggagaaagtctgcttttagatggttattaatatctatttttaccgccatcataatttcagcttgcagctataacgtaagcaaggatgagaatggcaaagtaaagactgttaaatcacatttcacaccctgttacgtagtgaagcacaaaatgggagaaacctgtgttccccagaatcctcaacgtattgttgttttagctcaaactactttggcaaatgttctagctttaggtgtgaaaccaattggtatactaggtgctgatttacctacctatctccaacaagccagggatattcaagtagttggtgagggatgggaacctgatgttgaaaaaattttgctgcttaaacccgatctgattcttggcaaagagtaccatcgcacacaatataatacattatcacagattgctccaacggtactcttggaatggaacggcacaccttcttggaaacagcatttagaagatgttgcccaggttttaaataaaacagatcaagccaaatccttaatgcgaaattaccaccaacggctggaagaatttaaaataaaaatgggcgatcgcctgaaaaatcttcaaatttcctacatcgatatattggtaggttatatctggtgtgatgtgaaaaattcctttgcagggacgattctagcagatgcaggtttacagcatccttctgctcaagaagttgtgactaaaggtggatacattacatttggtttagaaaccatgccaatggatgcagacggagatgtaatttttactagccattggatggatgaagatggtgcaaaagctttgaaaagaaatcaaaataaccctctttggcgcaaactcaaagccgtagaacagaaccaagtatatgttgttaatcgtcacttttggcgaggttcaaatattcttgctgctcacaaagtcattgatgatttatttaattatttagtagatgcgaaaagttaa

SEQ ID NO: 58679 - protein, 330 aa, Nostoc sp. PCC 7120
MKKKKIWALIWRKSAFRWLLISIFTAIIISACSYNVSKDENGKVKTVKSHFTPCYVVKHKMGETCVPQNPQRIVVLAQTTLANVLALGVKPIGILGADLPTYLQQARDIQVVGEGWEPDVEKILLLKPDLILGKEYHRTQYNTLSQIAPTVLLEWNGTPSWKQHLEDVAQVLNKTDQAKSLMRNYHQRLEEFKIKMGDRLKNLQISYIDILVGYIWCDVKNSFAGTILADAGLQHPSAQEVVTKGGYITFGLETMPMDADGDVIFTSHWMDEDGAKALKRNQNNPLWRKLKAVEQNQVYVVNRHFWRGSNILAAHKVIDDLFNYLVDAKS

SEQ ID NO: 58680 - DNA, 981 bp, Nostoc sp. PCC 7120
  CDS (1)..(981): transl_table=11
atgaaacctaaatatcgatacaagtatataaaactactcttagtaattactttaaccatagtattttttaaagggtgtcatagctttttaacacaaaatatatattcatcaaatgaatatgtaaaatcaacagaatgtcgaataattaaacataaattaggcgaaatttgtattcctcttaatccgcaacgcattattgtgactgacccagaaaatttagagatattattagcattaggtataaagccaatagcatcagcaagagcaaatgcagtaggtaataaagtcaacatattagataaggataaagttgatgggattattaatttaggaaaagaaagccaaataaatcttgaaaggattatccagctaaacccagatttaattctaggtttttcatacagttctcaagattataaattactttcacaaatagctcctacagcttattttaattatacagaaacagactggaaaaaaactttactagaagttgcagaagtagttaataaaacaaaaaaggcggaaaaattattagaagaatatcaacacagaattgaagatttaaaattaaaatttactcaaaaaaataaaaacacaaaaatttctgtaatgcgattttatacaactattcaatttacacaatttttgaatgagttatcgtttcctgtcagcattttagaggaattgaaattatctatccctctggcacaacggcaagttagtagaggtgcaaatgtcagttataacaatgttagtttagaacgtgtagatttactagaatcagacgcgatgtttatcgcattagatccaggtgcagaagaaaattttcaaacatatcagaatagtcctctatggcaaacactaaatgtagtaaaaaataaccatgtatataccgttgattctggttactggatttttggaaatattttgtcagctaatgctattttagatgacatcgttaaatatttagtggaataa

SEQ ID NO: 58681 - protein, 326 aa, Nostoc sp. PCC 7120
MKPKYRYKYIKLLLVITLTIVFFKGCHSFLTQNIYSSNEYVKSTECRIIKHKLGEICIPLNPQRIIVTDPENLEILLALGIKPIASARANAVGNKVNILDKDKVDGIINLGKESQINLERIIQLNPDLILGFSYSSQDYKLLSQIAPTAYFNYTETDWKKTLLEVAEVVNKTKKAEKLLEEYQHRIEDLKLKFTQKNKNTKISVMRFYTTIQFTQFLNELSFPVSILEELKLSIPLAQRQVSRGANVSYNNVSLERVDLLESDAMFIALDPGAEENFQTYQNSPLWQTLNVVKNNHVYTVDSGYWIFGNILSANAILDDIVKYLVE

SEQ ID NO: 58682 - DNA, 978 bp, Nostoc sp. PCC 7120
  CDS (1)..(978): transl_table=11
atgaaacagtttttacatcgttatatcaagttatttattctcatacccctaactttagttttggttaatagttgttatattaattatcctgaaaattccggcttgataacgacaagaataaaaacatctgagtgtagactaatcaaacatcctttaggtgaaagctgcgttcctgtaaaacctcagcgcgttattgctttagatgaaacctctatggaagcattgttagcactggacttaaaaccaatagctacagcacagcctaatattgcaggtagcataatacaaaagttgggtaaaaaagctgaaggtatagtttctttagggaaagatggtcagccaaatatagaaaaaatggtgcaattaaatccagatttaattttgggtttttctgtgagcgcagaacaatacaaattattttcccaaatagcaccgacagttacacttgattatattcaatttgcttggaaagatgctttatcacgtattgctgaaatcatagataaaagtgaacaagcaaaaatattacttgagcaatatcagcaaagagttaaagaattacgcacctttataaattataatctcaaagaaaaaactgtttcggtgagtcgcttttatgctggtaatcaagttccagagtttcgtactaaatattcatttcctggaagtttacttacagaagtgagaatacctgtaccagagatgcaaaatcaactgactactaatgaaaatcagcctttagtttcagttagtttagagcgtttagagttattagatgcagatgttttatttgtagctttagaccctggtgcagaagagtcatttcaaaaatatcaaaacactcctttatggcaaaagctagatgtcgtgaaaaatcagcgcgtgtatgcggttgattctggttactggatatttggcaatattctatcagctaatgccattttagatgacctatttaaatacttagtaggaaaataa

SEQ ID NO: 58683 - protein, 325 aa, Nostoc sp. PCC 7120
MKQFLHRYIKLFILIPLTLVLVNSCYINYPENSGLITTRIKTSECRLIKHPLGESCVPVKPQRVIALDETSMEALLALDLKPIATAQPNIAGSIIQKLGKKAEGIVSLGKDGQPNIEKMVQLNPDLILGFSVSAEQYKLFSQIAPTVTLDYIQFAWKDALSRIAEIIDKSEQAKILLEQYQQRVKELRTFINYNLKEKTVSVSRFYAGNQVPEFRTKYSFPGSLLTEVRIPVPEMQNQLTTNENQPLVSVSLERLELLDADVLFVALDPGAEESFQKYQNTPLWQKLDVVKNQRVYAVDSGYWIFGNILSANAILDDLFKYLVGK

SEQ ID NO: 58684 - DNA, 960 bp, Nostoc sp. PCC 7120
  CDS (1)..(960): transl_table=11
atgaaaaagcatttttattatcatattcaactatttttagtcatagctatttcatgcttgattagtatttcttgccagagtagtttgccagataaaatatcatcaaatttagagtgtagattaattaatcatgaattgggagaaacttgtgtacctctaaatccacagcgcattatagtcactgatcaggtggcattagaagatgtaatagcattaggattaaaacctatgggtgcgcctgatactacttatgtagctagcaaatctagttttctcaagagcaaaatgtctggtatcaattatataggcaaagaagatcaatttaatttagaaaagatattaaatttacatccagatttaattattagcttgtatgggattaattcagcaaactatcagttattttcaaaaatagctcctacagttcaatttaaatatgttcatgctaaatggcaaacatcttttcggcagattggtgaagtattaggcaaggctgaacaagctgaaaatttactgactgagtataaacagcgattaacaaaattgcgaactgtcctaaataatcagaccaatcaactaaaagtatctgttagccgttttcatggtggggtacaattgcccgaatttcgttctcaattttcatttcctggcagtattttgcaagaagtcggtatttctatgccaaatgctcaacgtcagttaattaaaactcctgatgatactttaataatgttgaacctagaacgtatagatttacttgatgctgatgttttatttgtagcagtagatcctggtgctagagagttattccaaaaatatcaaaatactcgtctttggcagacgctgaatgtagcgcagaatcagagagtttatagtgtggattctagttactggatttttggtagcattctatcggctaatgccatagttgatgatttatttaagtatcttaaagggtga

SEQ ID NO: 58685 - protein, 319 aa, Nostoc sp. PCC 7120
MKKHFYYHIQLFLVIAISCLISISCQSSLPDKISSNLECRLINHELGETCVPLNPQRIIVTDQVALEDVIALGLKPMGAPDTTYVASKSSFLKSKMSGINYIGKEDQFNLEKILNLHPDLIISLYGINSANYQLFSKIAPTVQFKYVHAKWQTSFRQIGEVLGKAEQAENLLTEYKQRLTKLRTVLNNQTNQLKVSVSRFHGGVQLPEFRSQFSFPGSILQEVGISMPNAQRQLIKTPDDTLIMLNLERIDLLDADVLFVAVDPGARELFQKYQNTRLWQTLNVAQNQRVYSVDSSYWIFGSILSANAIVDDLFKYLKG

SEQ ID NO: 58686 - DNA, 987 bp, Nostoc sp. PCC 7120
  CDS (1)..(987): transl_table=11
atgtcaattaaaaataatttatttatcagggtatttaccttcctgcaccatatacttaattatcatcaaattaagttaattttattcagcatcatcacagctttaatagttatcggctgtgaaatgagtacaccaaacaatgtcactataaattctgtgaatgcaacttcagaaatgcgcgtagttaaacatactatgggcgaaacaaaaatacctttgcgtccacagagggtagttgtactaggtggcttagataatattttagctttaggggtaaaaccaatagcagctacaacattcagtgatgataactttgctgattacttacaagatgtaacatcaggaattgaaaaaattggtattaatggtcaaccaaatctagaaaagattttatatctcaaaccagacttaattttaggtttttcttgggatgctgaattatatggacaactatcgcaaattgccccaacagtattggcagatcaagatagcgattggaaagattggttaaagaaatatgcggaagcagttggagaaacagcaaaagctgaaaaattgttgcaagaatatgatcaaagaatggaaagcctgcgtcaacaaatgggagataccctttcccaaaccaaagtatctttagtcaacttttgggctaattttactcgtctttatatgaataattcctttggtggatcaatcctcaaagaaatcggtttacctcgtcctaaatatcaagataaagataaaaatcacgaaaatatctctttagaattaattcctcagatcaatggtgatgttattttcttaattcttggaggacacaatgaatcaaggttgaaacaatttaccaatcatcctttgtggtcgcagttacaagctgtacaaaaaaatcaggtttatccagttacaggtgatgtttggatttctgcatggggaatcattggagctaatcttgttttggatgacttattcaaatatttgcttgagtaa

SEQ ID NO: 58687 - protein, 328 aa, Nostoc sp. PCC 7120
MSIKNNLFIRVFTFLHHILNYHQIKLILFSIITALIVIGCEMSTPNNVTINSVNATSEMRVVKHTMGETKIPLRPQRVVVLGGLDNILALGVKPIAATTFSDDNFADYLQDVTSGIEKIGINGQPNLEKILYLKPDLILGFSWDAELYGQLSQIAPTVLADQDSDWKDWLKKYAEAVGETAKAEKLLQEYDQRMESLRQQMGDTLSQTKVSLVNFWANFTRLYMNNSFGGSILKEIGLPRPKYQDKDKNHENISLELIPQINGDVIFLILGGHNESRLKQFTNHPLWSQLQAVQKNQVYPVTGDVWISAWGIIGANLVLDDLFKYLLE

SEQ ID NO: 58688 - DNA, 1002 bp, Nostoc sp. PCC 7120
  CDS (1)..(1002): transl_table=11
atgtccaaacggtggctttattctctccagctaatcttctttataaccttggtctttgtattagtgacgggttgttatagccatccaaatcaaaatattcaatctgctaattcaaaaccagtcacatctgaatgtcgaattatcaagcatcccttgggagaaacctgtattcctttgcatccccagcgcattatcgctatggatgaagatattttagaaattttggtagcactagatttaaaacccatagctgtagccataaattttgatgaatggagtagtagagaaaaacaattatggcaaaaagctgaaggtatagattcaattgttataggaaatcatggtattttgaatctagaaaaaatgctgctattaaaaccagatttaattttaggtctagcagaaagcaccgacagaaaaagctacgagttattttcgcaaatagccccgactgttactgttgattatgctcaaactgcttggagagatgtccttttgcgtgttggtaatataatcggtaaaactgaacaagcccagaaattaattgctgaatttcagcaacgaatagaaaaattgcgggtaattgtaaaaaacaaattgggaaaaacaaaaatttctgtagtacgtgtatataattactttcacaaaacaatagaatttcgctccaatttctcattccccggtagccttcttgtggagttgggactgtcttttccagaaaaacaaaatcaaattcctactagtccaggctttccttttgtatttgcaagtctagaaagactagacttactagatgcagatgtaatgtttgtcacattagatgctggtggtgaagaaaacttcaaaaaatttcaggctagccccttatggcaaaagctgaaagcagtcaaaaacaattgcgtatacacagttgattcaggttactggatatttggcaatattatgtcagctaacgccatactcgatgatttagataaataccttctccagcaatgtagataa

SEQ ID NO: 58689 - protein, 333 aa, Nostoc sp. PCC 7120
MSKRWLYSLQLIFFITLVFVLVTGCYSHPNQNIQSANSKPVTSECRIIKHPLGETCIPLHPQRIIAMDEDILEILVALDLKPIAVAINFDEWSSREKQLWQKAEGIDSIVIGNHGILNLEKMLLLKPDLILGLAESTDRKSYELFSQIAPTVTVDYAQTAWRDVLLRVGNIIGKTEQAQKLIAEFQQRIEKLRVIVKNKLGKTKISVVRVYNYFHKTIEFRSNFSFPGSLLVELGLSFPEKQNQIPTSPGFPFVFASLERLDLLDADVMFVTLDAGGEENFKKFQASPLWQKLKAVKNNCVYTVDSGYWIFGNIMSANAILDDLDKYLLQQCR

SEQ ID NO: 58690 - DNA, 960 bp, Nostoc sp. PCC 7120
  CDS (1)..(960): transl_table=11
atgtataaaattcgtcgtgggctggggttctttgggttaacacttatggcagttgtgctgttttctgcttgtactaataatgtctcacaaaagttaactaactctgctgagttattgccttcacagtgcagaatagtcaaacatcttacgggtgaaacctgtgttcctaatatcccacagcgaattattgctgcaagtgaaccagctttggaggctgctttaatactagacttcaagcccataggtacaactaattacgcacaacaggctgattacttgagagaacggtttgaaagttctgacagtgttggtttagattcacgacaactaagtttagagaaaattctcactatcaaaccagatttaattttagctacagatgattatggagaacagcaggaattgtatgaccggctctcacaaatggctcctactgtgattgcaaagtggtgggatggtcagagtattcgctggaaagaatgctttcaactatttgctcaagcctttgggaaaacatctgaagctgaagaaaccgtcaatgcttacaatcaaaggattgcagaattacagcagcaaatgggcgatcgcctcccaaatactgtcatctcaattatcgaaatttatcccgatagaatccgcctatatgggaaaaccaagactgttagcctgagtagcaccattatcgaagatatcggcttacctcgcccaccttcccaggaagagggaatggatatctcccttgaaagtattggggatgctgatggcgacatcatttttttaacggcacgagatcccgaagcacaactttatcagcaagttcttaatcatcctctatggaaacaactgaaggctgtacaggctggaaaagtgtataaagttgaaaatagttactggggtggaagcggctacattgctgccaatctcgttttggatgacttgtttaaatatttagtgaagtaa

SEQ ID NO: 58691 - protein, 319 aa, Nostoc sp. PCC 7120
MYKIRRGLGFFGLTLMAVVLFSACTNNVSQKLTNSAELLPSQCRIVKHLTGETCVPNIPQRIIAASEPALEAALILDFKPIGTTNYAQQADYLRERFESSDSVGLDSRQLSLEKILTIKPDLILATDDYGEQQELYDRLSQMAPTVIAKWWDGQSIRWKECFQLFAQAFGKTSEAEETVNAYNQRIAELQQQMGDRLPNTVISIIEIYPDRIRLYGKTKTVSLSSTIIEDIGLPRPPSQEEGMDISLESIGDADGDIIFLTARDPEAQLYQQVLNHPLWKQLKAVQAGKVYKVENSYWGGSGYIAANLVLDDLFKYLVK

SEQ ID NO: 58692 - DNA, 996 bp, Nostoc sp. PCC 7120
  CDS (1)..(996): transl_table=11
atgaatgacagttatatcaaaatcaaaaacttgactcgctggtggcgatttgggattgtactattttgtagtctaatcctatctatagcttgtcatcgtgatggttctctacctgttaattatcaaaatacaaatgcagcttgtcgtcagatggaacacgctgcgggaattgcctgtattcccgaaaagtttgagcgacttgtgactttagatgatggagaaaatgcgatcgcactaggtattaaacctcttggtgctgtaatctccgatttttcatcattttggaaagataagctcacaggagtaaaaaacattgggacaactggtgaacctaatttagaaagtattcttgcactcaaaccagatttaattgtcggttctgactatgaacaagatatttatcctattacttcaaaaattgctccaaccgttttgttgaaatttgaacacagtggtcaatggaaagaggtatttacaaatactagtgtggcgttaggtaagacagaagttggtcaaaaggtaatggaaaattattaccgtcgtcttgcagaatttaagcagaagatgggtaataagttgtcaaaaattaaagtttctgtagtgcgcgtatatccagataaaataaacctttatctccttgattccttctgcggaactattttgcaagatgccggattatctcgccccgaatcgcaaaatttcacggcatcagaagcaacaattttatttaataatcagattcaaatgtccatcagtaatgaattaatcgaacaagctgatggtgatgttatatttatctggacggctgagaatgatgccaaaggtaatcaaacagcacaatataaattagagcaacttaaagcaagtccactgtggagaaatttaaaagctgtaaaagaaaataaggtttatgtagttccaagttactggatagggagtggtatgttagcggcaaacgcaattattgatgatttatttaagtatctaacaaattaa

SEQ ID NO: 58693 - protein, 331 aa, Nostoc sp. PCC 7120
MNDSYIKIKNLTRWWRFGIVLFCSLILSIACHRDGSLPVNYQNTNAACRQMEHAAGIACIPEKFERLVTLDDGENAIALGIKPLGAVISDFSSFWKDKLTGVKNIGTTGEPNLESILALKPDLIVGSDYEQDIYPITSKIAPTVLLKFEHSGQWKEVFTNTSVALGKTEVGQKVMENYYRRLAEFKQKMGNKLSKIKVSVVRVYPDKINLYLLDSFCGTILQDAGLSRPESQNFTASEATILFNNQIQMSISNELIEQADGDVIFIWTAENDAKGNQTAQYKLEQLKASPLWRNLKAVKENKVYVVPSYWIGSGMLAANAIIDDLFKYLTN

SEQ ID NO: 58694 - DNA, 921 bp, Agrobacterium tumefaciens str. C58
  CDS (1)..(921): transl_table=11
atgatcctgcggtcgtttctcatcttgctgatgggactttttgcctccggcgcctcggcgcaatgttcgggccgttccctcacgacaggcgtatatggcgcaccgatctgcgtgccggacacgccccgcaggatcgtcgtgctcgatcccttctataatctgggaatggcgcttgaactcggcctgcctttggtcggcgcaccgcttatgtccgttcaggaccatgaactgaaggagaaggccgacaaggcgacggtctccgatattggcgaggcccggcagcccagtctcgagcgcatagtggccctgaagccggacctgattgtcggggacgcagccctgcacggccagtcctaccagaacttcgccaagattgcgccgaccgcgctcatcgatgcaaagagctggaaagaccatttccgcacattggcgctcctttcgggaaaaagtgatgaggccgcgcagatgctggccggttacgaaaaacgtgtttccgccatcagagagaagactgcttcccatacggtatcggtattgcgggtgacacccagcggttttcatgtctatctcgacggtccggccgcctatgcgccctatgcggttcttcgtgacgccggcgtaaaacgcagcacctacgaaacgactaacgacaacacggtcttcaaacggcccgaatgggaggacctcgccctcctcgacggggacatcctgctttacgtcgttgccggcagatacgatacgaccatggacgatgcgcttgccgaccgcacgaccagcaaccccttctggcaaatgttgccggcagtcgcatccgggaacgcccaccgggtaaagcgcgaaacatggatgagcttcaacggcatcggctccgccaacaaagttctcgatgacatcgagcaatatctgctgggcaagccgtga

SEQ ID NO: 58695 - protein, 306 aa, Agrobacterium tumefaciens str. C58
MILRSFLILLMGLFASGASAQCSGRSLTTGVYGAPICVPDTPRRIVVLDPFYNLGMALELGLPLVGAPLMSVQDHELKEKADKATVSDIGEARQPSLERIVALKPDLIVGDAALHGQSYQNFAKIAPTALIDAKSWKDHFRTLALLSGKSDEAAQMLAGYEKRVSAIREKTASHTVSVLRVTPSGFHVYLDGPAAYAPYAVLRDAGVKRSTYETTNDNTVFKRPEWEDLALLDGDILLYVVAGRYDTTMDDALADRTTSNPFWQMLPAVASGNAHRVKRETWMSFNGIGSANKVLDDIEQYLLGKP

SEQ ID NO: 58696 - DNA, 951 bp, Clostridium perfringens str. 13
  CDS (1)..(951): transl_table=11
atgaaaaaaaaattactatctatagctttatcaagcttagtagttgtaagcctatttataggttgttctaataaaaaaattaacgaaaatacaactgtaccaacaaatatggtatcagttgaacatgcaatgggtactacagaaatacctactaatcctcaaaaagttgtaattcttactagtgaaggtacagaagctctacttgctcttggcgttaaaccagtaggtgctgtaactggagttactggtgattggtatgatcatactaaagacgaacttgaaggtgtaaaacaagtcggtatggaaagagagcctaatatagaagcaattgctgctttaaaacctgatttaataataggaaataaaatgagacatgaaaaaatttattctcaactaagtgccatagctccaactgtttactctgatactataagaggagcatggaaagataactttaaattttatgcaaaagttttaaataaagaatctgaatctgaaaaagctttaaaagaatatgatgataaaattgcttatattcaaaataattataaagataagctagatacagaaatttcacttattagatttatgtctggaaaaactagaatatatcttggaaatacttttgctggtactatattaaaagaaataggatttaagagaccagcatctcaacaaagtgatgaatttgcccttgaaattggtaaagaaagattaaaagaagctgatggagatgttctattctactttacttatgaaactggtgatggtaaagctactgcaagagagcaagaatggatgcaagaccctctatttaactcattaaatgctgtacaaaataataaagtctataaagtaaatgactttatttggaatactgctggtggaataaaatcagctaacttaatgctcgacgatttaactaatatgctaaatgaaggaaaattataa

SEQ ID NO: 58697 - protein, 316 aa, Clostridium perfringens str. 13
MKKKLLSIALSSLVVVSLFIGCSNKKINENTTVPTNMVSVEHAMGTTEIPTNPQKVVILTSEGTEALLALGVKPVGAVTGVTGDWYDHTKDELEGVKQVGMEREPNIEAIAALKPDLIIGNKMRHEKIYSQLSAIAPTVYSDTIRGAWKDNFKFYAKVLNKESESEKALKEYDDKIAYIQNNYKDKLDTEISLIRFMSGKTRIYLGNTFAGTILKEIGFKRPASQQSDEFALEIGKERLKEADGDVLFYFTYETGDGKATAREQEWMQDPLFNSLNAVQNNKVYKVNDFIWNTAGGIKSANLMLDDLTNMLNEGKL

SEQ ID NO: 58698 - DNA, 948 bp, Corynebacterium glutamicum ATCC 13032
  CDS (1)..(948): transl_table=11
atgcatttttgtctcctgcctctggccaaacctgccaaagttgtggccccgctcctcggcgtcgcactccttctaagctcctgttcttcaacatcttccgatgaatcaatccaacctgaagttgccagcactggatattcagtggagcacgcaatgggcaccaccgaaatccctgaaaccccaacgcgtgtggtcgtcattgattccccacacctcgacgcacttttggctttgggaattactccagtcggagctacggaatctggatccgaaaatggtttccccgcctacttggctgacgagctaaaagacaccgaatctgttgggctgacatctgagccaaatttggaaaagatcgccgcactggatccggatttgatcattggcgcaaaggtccgccacgaggctatttatgatcagctttcagacatcgcaccaaccgtgatgtccgaaggttccggcacaaactggaatgaacaggcagaaatcactgcggcagcagtaaacaagtctgatgagatggacaaactgatctcagacttggacacccgtgccacagagcttggtgaagagatcggtgctgacggacaaaccgcttcaatggttcgattccgcacggacaacttcaggctctatggtcccgagaccttctctggttcagttctggaacaagttggatttgacctgggggaacgtgattggaatgagtactccatgatggagctatcctcagaaaactttgggcagatcgatggagaccttattttctacaccatcccaggatcccctgaagcaaccacttatccaaagatttccgaactgtgggttgattcaccagcagttcggcaaggtagaacttacgagtttgaagacgaaacctggatggtcggcatcggtgtattaggtgccaatgaaatcttggatgacctggaagaaactctgagctag

SEQ ID NO: 58699 - protein, 315 aa, Corynebacterium glutamicum ATCC 13032
MHFCLLPLAKPAKVVAPLLGVALLLSSCSSTSSDESIQPEVASTGYSVEHAMGTTEIPETPTRVVVIDSPHLDALLALGITPVGATESGSENGFPAYLADELKDTESVGLTSEPNLEKIAALDPDLIIGAKVRHEAIYDQLSDIAPTVMSEGSGTNWNEQAEITAAAVNKSDEMDKLISDLDTRATELGEEIGADGQTASMVRFRTDNFRLYGPETFSGSVLEQVGFDLGERDWNEYSMMELSSENFGQIDGDLIFYTIPGSPEATTYPKISELWVDSPAVRQGRTYEFEDETWMVGIGVLGANEILDDLEETLS

SEQ ID NO: 58700 - DNA, 921 bp, Corynebacterium glutamicum ATCC 13032
  CDS (1)..(921): transl_table=11
atgtcatctcgcagaaaactctcctccgcactgatcgtgcttctcgcagcagcactacctcttactgcttgttcctccagctcagaagaggaagcatccaccagctctgcgactcgcgaattcacagacgctcacggaacaaccgaagttcccgaaaatcctcagcgcgtcgttgtcctcgagccacttgagctagacaccgcaatcgccctcggaatcaccccagtgggtgcagctgtcgccaacaacgtcactggtattcctgcatatctcggcgtcgatggaatcgagcctgtcggcaccgtttctgagccaaatatcgaagcgatcgctgctctcgagcccgacctgatcctgggcaccgattcccgccacgccgaaatctacgaccgcctcgaatccatcgccccaaccgtgttcatgacaacccatgttgatccgtggaaagacaatgtcgtcttcatcggcgatgcattgggcaagaagcaggaatccgaggatctcatccaaggctttaatgacaagtgcgaagagatcaagtccgagcatgatgtcgaaggtaagaccgtcaacatgattcgtccccgcgacgagcaaaccatgagcctatacggcccgacctcatttgccggcagctctttggagtgcgcaggactcaccattcctgatcaggaatggaaggatgacctccaggccgacatcgctcctgagaacttcatgctcgccaccgccgactacgtctttgtcaccgcaactgatgtcaccgatgaaaatgagctccccgaagtaatccgagaaaaccgcgaacagttcccatcactcacccttgtcgataccagctactgggtatctggcgtcggtccacttggcggcagcaaagtcttggaagacatcgatgccttcctcgacgcacagcaataa

SEQ ID NO: 58701 - protein, 306 aa, Corynebacterium glutamicum ATCC 13032
MSSRRKLSSALIVLLAAALPLTACSSSSEEEASTSSATREFTDAHGTTEVPENPQRVVVLEPLELDTAIALGITPVGAAVANNVTGIPAYLGVDGIEPVGTVSEPNIEAIAALEPDLILGTDSRHAEIYDRLESIAPTVFMTTHVDPWKDNVVFIGDALGKKQESEDLIQGFNDKCEEIKSEHDVEGKTVNMIRPRDEQTMSLYGPTSFAGSSLECAGLTIPDQEWKDDLQADIAPENFMLATADYVFVTATDVTDENELPEVIRENREQFPSLTLVDTSYWVSGVGPLGGSKVLEDIDAFLDAQQ

SEQ ID NO: 58702 - DNA, 1029 bp, Corynebacterium glutamicum ATCC 13032
  CDS (1)..(1029): transl_table=11
atgcaatctattcgaacgaccttcaggtcgctttcacgcagcgcagttatcgtgggtaccgttttggctttgggtatcgcaggatgttccacggccagtgatgaagccacaagcaccagcgacgatgtagctgtcggcggccgcctattttctacagcggattccgccaccgccgctctgggaagcgacgccgaaccaggccaattcccccgcaccgttgtgcattcacgcggcgaaactacccttgagcagcagccacaacgagtcgtggttctcgacagcggtgaaatcgaccaggttttgagcctcggcgtgactcccgtcggcatcgccagcccgaaagacgcctccagccagcccgcttacctcgaaaatcagctggcagatgtacaaactgtgggcaccacgagtgagctcaatttcgaagccatcgccgccctcaagcctgacctgattctgggcagcaagctgcgcgtcgacgaatcctacgatcagctctcccaaatcgcaccaaccgtgctgagtattcgccccggattcccctggaaggaaaacttcctcctcaccgccgacgcgctcggtctcgagggcaaagccgtcgaggttctcaacgagtaccaaacccatgtcgatgcagtccgcgagaccatcgacggcagcccagaaatctcactcgtccgcttcatgcctggtcgcacccgcctgtacggaaacctctctttcatcggtgcaatccttaaggacctggggctttctcgcccagagatccaaaatatcgacgatcttgccgtggagatctcccccgaaaacatcaccgatgccaacggcgactggattttctactccacctacggcaagcccgaggccaccgagcaggacaacattttgtccaacgagctgtggcacaacctccccgccgtccaagaaggtcatgccctggaggtcaatgacgagagctggttcatggggttgggtcctctcggcgccaatgaagtgctcgacgacatcgaaaacatcctcggatcctag

SEQ ID NO: 58703 - protein, 342 aa, Corynebacterium glutamicum ATCC 13032
MQSIRTTFRSLSRSAVIVGTVLALGIAGCSTASDEATSTSDDVAVGGRLFSTADSATAALGSDAEPGQFPRTVVHSRGETTLEQQPQRVVVLDSGEIDQVLSLGVTPVGIASPKDASSQPAYLENQLADVQTVGTTSELNFEAIAALKPDLILGSKLRVDESYDQLSQIAPTVLSIRPGFPWKENFLLTADALGLEGKAVEVLNEYQTHVDAVRETIDGSPEISLVRFMPGRTRLYGNLSFIGAILKDLGLSRPEIQNIDDLAVEISPENITDANGDWIFYSTYGKPEATEQDNILSNELWHNLPAVQEGHALEVNDESWFMGLGPLGANEVLDDIENILGS

SEQ ID NO: 58704 - DNA, 969 bp, Bacillus cereus ATCC 14579
  CDS (1)..(969): transl_table=11
atgaatttcatgcggaagaaatcgtttacagtatttgtatttttactagcattttcaatgcttttaagcgcttgtggaaaatcaaataacaaagaagaatctacaaaagaagataataaaaaagaagtggttactgtagaacatgcaatgggtaaaacagaagttcctgctaatccaaaacgtgtagttatcttaacaaatgaaggaactgaagctttacttgaattaggtgtgaaaccagttggtgctgtaaagtcttggactggtgacccatggtatccacatattaaggataaaatgaaagatgtaaaagttgttggtgatgaaggacaagttaacgttgaaacaatcgcttctttaaaaccagacttaattatcggtaacaaaatgcgccacgaaaaagtgtacgaacaattaaaagcaattgcacctactgtgttctcagaaacattacgtggtgaatggaaagataacttcaaattttatgcaaaagcattaaataaagaaaaagaaggtcaaaaagttgtagctgattacgaatcacgtatgaaagatttaaaaggcaaacttggcgataaagtaaatcaagaaatctctatggttcgtttcatgcctggtgatgttcgtatttatcatggcgatacattctctggtgttattttaaaagaacttggatttaaacgtcctggagatcaaaacaaagatgattttgcagagcgtaacgtatctaaagagcgtatttctgctatggatggtgacgtattattctacttcacattcgataaaggaaatgagaaaaaaggatctgaactagaaaaagaatatataaacgatcctctatttaaaaatttaaatgccgtaaagaatggtaaagcatacaaagtcgacgatgttatttggaatacagctggcggtgtaattgctgctaacctattactagatgacatcgaaaaacgctttgttaaataa

SEQ ID NO: 58705 - protein, 322 aa, Bacillus cereus ATCC 14579
MNFMRKKSFTVFVFLLAFSMLLSACGKSNNKEESTKEDNKKEVVTVEHAMGKTEVPANPKRVVILTNEGTEALLELGVKPVGAVKSWTGDPWYPHIKDKMKDVKVVGDEGQVNVETIASLKPDLIIGNKMRHEKVYEQLKAIAPTVFSETLRGEWKDNFKFYAKALNKEKEGQKVVADYESRMKDLKGKLGDKVNQEISMVRFMPGDVRIYHGDTFSGVILKELGFKRPGDQNKDDFAERNVSKERISAMDGDVLFYFTFDKGNEKKGSELEKEYINDPLFKNLNAVKNGKAYKVDDVIWNTAGGVIAANLLLDDIEKRFVK

SEQ ID NO: 58706 - DNA, 963 bp, Bacillus cereus ATCC 14579
  CDS (1)..(963): transl_table=11
atgatacatactaaaaaactaattatgttctgcattatgatactcatggttgtaattgcaggatgtagtaaagaagagaaaaaagaaaataatatatcagcgaaagcaaaagattcatatacggtaaagcatgcaatgggtgaaacgacagtaaatggtacacctaaaaaagttgttgttttaacaaatgaaggcgcagaggctctcctagctgtgggcgtaacgccagtggggactacgaaaccacgtgctggtgatgaatggtatcctcatttagcgaaagagttaaaaaacacggaagttgtaggaactgaacgtgatattaatttagaggctgtaatgaagcttaagccagatttaattatcggaaataaaatgcgtcatgaaaaaatatatgatcagctaaaagaaatcgcaccaactgtttatgcagaaacattacgcggtgattggaaagaaaactttacactttatacaaaagctgtaaataaagaaaaagaagggcaaaaagctcttgatgattataaaaaacgcattgaaggaatgaaagagaagttaggcgataaattgaattctaaagtttctattattcgtttcgtgccaggtgatgttcgtatttatcaaaaaaactcattctcgggcgttgttttaaatgatattggatttaaacgaccaccattacaagataaagatgattttgcgataaaaggaattacaaaagagcagattccaaatatggacggagactacttattctatttcacttctgataaagatgcagataagaataatgaaggaaattcgttagcgaaggaatggacagaagatccactctttaagcaactacaggcttctaaaaataataaagtattccaagtggatgaggtaatctggaatacagcaggcggtattaaagctgcgaaccttatgttagatgatattgaaaaatatttccttaaataa

SEQ ID NO: 58707 - protein, 320 aa, Bacillus cereus ATCC 14579
MIHTKKLIMFCIMILMVVIAGCSKEEKKENNISAKAKDSYTVKHAMGETTVNGTPKKVVVLTNEGAEALLAVGVTPVGTTKPRAGDEWYPHLAKELKNTEVVGTERDINLEAVMKLKPDLIIGNKMRHEKIYDQLKEIAPTVYAETLRGDWKENFTLYTKAVNKEKEGQKALDDYKKRIEGMKEKLGDKLNSKVSIIRFVPGDVRIYQKNSFSGVVLNDIGFKRPPLQDKDDFAIKGITKEQIPNMDGDYLFYFTSDKDADKNNEGNSLAKEWTEDPLFKQLQASKNNKVFQVDEVIWNTAGGIKAANLMLDDIEKYFLK

SEQ ID NO: 58708 - DNA, 966 bp, Bacillus anthracis str. Ames
  CDS (1)..(966): transl_table=11
atgaatttcatgcgaaagaaatcgtttacagtatttgtattttcattagccttttcactacttttaagtgcttgtggaaaatcaaatacgaaagaagaatcaaaagaagatacgaaaaaagaaatgattcctgtggaacatgcaatgggtaaaacagaagttcctgctaatccaaaacgtgtagtcattttaacaaatgaaggtactgaagctttacttgaattaggtgtgaaaccagttggggctgtaaaatcttggactggtgatccatggtatccacatattaaagataaaatgaaagatgtaaaagttgttggtgatgaaggacaagtgaacgtagaaacaatcgcttctttaaaaccagacttaattatcggtaacaaaatgcgtcacgaaaaagtgtacgagcaactaaaagcaattgcacctactgtgttctctgaaacattacgcggtgaatggaaagataacttcaagttttatgcaaaagcattaaataaagaaaaagatggtcaaaaggttttagctgcttatgataaacgtatgaaagatttaaaagccaaactaggtgataaagtaaatcaagaaatctctatggttcgcttcatgcctggtgatgttcgtatttatcatggtgatacattctctggtgttattttaaaagaacttggatttaagcgtcctggcgatcaaaataaaaacgacttcgcagagcgtaacgtatctaaagaacgtatttctgcaatggatggtgatgtattattctacttcacattcgataaaggaaacgagaaaaagggctctgaattagaaaaagaatatattaatgatcctctatttaaaaatttaaatgcagtgaaaaatggtaaagcatacaaagttgacgacgttatttggaatacagctggtggtgtaatggctgctaacctactattagatgatatcgaaaaacgctttgttaaatag

SEQ ID NO: 58709 - protein, 321 aa, Bacillus anthracis str. Ames
MNFMRKKSFTVFVFSLAFSLLLSACGKSNTKEESKEDTKKEMIPVEHAMGKTEVPANPKRVVILTNEGTEALLELGVKPVGAVKSWTGDPWYPHIKDKMKDVKVVGDEGQVNVETIASLKPDLIIGNKMRHEKVYEQLKAIAPTVFSETLRGEWKDNFKFYAKALNKEKDGQKVLAAYDKRMKDLKAKLGDKVNQEISMVRFMPGDVRIYHGDTFSGVILKELGFKRPGDQNKNDFAERNVSKERISAMDGDVLFYFTFDKGNEKKGSELEKEYINDPLFKNLNAVKNGKAYKVDDVIWNTAGGVMAANLLLDDIEKRFVK

SEQ ID NO: 58710 - DNA, 963 bp, Bacillus anthracis str. Ames
  CDS (1)..(963): transl_table=11
atgacacgcactaaaaatatgcttatattttgcattatgctactaacaatcataatcgcagggtgtagtaaagaagaaaagaaagaaaatgatacatcagctaaagcgaaagattcgtatacgataaaacatgcaatgggcgaaacgacagtggatggtacgccaaaaagagttgttgttttaacaaatgagggcgctgaggcacttttatctgttggagtaacgccagttggaacgacaaaaccacgagctggtgatgaatggtatcctcatttagcgaaagagttaaaaaatacgaaagtagtaggaactgagcgtgacattaatttagaagcagtaatgaagcttcagccggatttaattatcggaaataaaatgcgtcacgaaaaaatatacgagcagttaaaagaaatcgcgccaacagtatatgctgaaacattacgcggtgattggaaagaaaactttacgctatatacaaaagctgtaaataaagaaaaagaaggacaaaatgctcttaatgattataaaaagcgtattgcaggaataaaagaaaaattaggtgaaaaagttaattctaaagtttctattattcgcttcgtccctggtgatgttcgtatttatcaaaaaaattcattctcaggtgttgtattaaatgatattggatttaaacgaccaccattacaagataaagatgaatttgcaattaaaggaattacaaaagagcaaattccaaatatggacggggattatttattctatttcacatctgataaagacgcggataagaataatgaaggaaatacattagcaaaagaatggacagaagatccactctttaagcaactgcaggcttctaaagataataaagtattccaagtagatgaagtgatttggaatacagcaggtggtattgtagctgcaaatcttatgttagatgatattgaaaaatattttctgaagtaa

SEQ ID NO: 58711 - protein, 320 aa, Bacillus anthracis str. Ames
MTRTKNMLIFCIMLLTIIIAGCSKEEKKENDTSAKAKDSYTIKHAMGETTVDGTPKRVVVLTNEGAEALLSVGVTPVGTTKPRAGDEWYPHLAKELKNTKVVGTERDINLEAVMKLQPDLIIGNKMRHEKIYEQLKEIAPTVYAETLRGDWKENFTLYTKAVNKEKEGQNALNDYKKRIAGIKEKLGEKVNSKVSIIRFVPGDVRIYQKNSFSGVVLNDIGFKRPPLQDKDEFAIKGITKEQIPNMDGDYLFYFTSDKDADKNNEGNTLAKEWTEDPLFKQLQASKDNKVFQVDEVIWNTAGGIVAANLMLDDIEKYFLK

SEQ ID NO: 58712 - DNA, 963 bp, Bacillus thuringiensis serovar konkukian str. 97-27
  CDS (1)..(963): transl_table=11
atgacacgcactaaaaatatgcttatattttgcattatgctactaacaatcataatcgcagggtgtagtaaagaagaaaagaaagaaaatgatacatcagctaaagcgaaagattcgtatacgataaaacatgcaatgggcgaaacgacagtggatggtacgccaaaaagagttgttgttttaacaaatgagggcgctgaggcacttttatctgttggagtaacgccagttggaacgacaaaaccacgagctggtgatgaatggtatcctcatttagcgaaagagttaaaaaatacgaaagtagtaggaactgagcgtgacattaatttagaagcagtaatgaagcttcagccggatttaattatcggaaataaaatgcgtcacgaaaaaatatatgagcaattaaaagaaattgcgccaactgtatacgctgaaacattacgcggtgattggaaagaaaactttacgctatatacaaaagctgtaaataaagaaaaagaaggacaaaatgctcttaatgattataaaaagcgtattgcaggaataaaagaaaaattaggtgataaagttaattctaaagtttctattattcgcttcgtccctggtgatgttcgtatttatcaaaaaaattcattctcaggtgttgtattaaatgatattggatttaaacgaccaccattacaagataaagatgaatttgcaattaaaggaattacaaaagagcaaattccaaatatggacggggattatttattctatttcacatctgataaagacgcggataagaataatgaaggaaatacattagcaaaagaatggacagaagatccactctttaagcaactgcaggcttctaaagataataaagtattccaagtagatgaagtgatttggaatacagcaggtggtattgtagctgcaaatcttatgttagatgatattgaaaaatattttctgaagtaa

SEQ ID NO: 58713 - protein, 320 aa, Bacillus thuringiensis serovar konkukian str. 97-27
MTRTKNMLIFCIMLLTIIIAGCSKEEKKENDTSAKAKDSYTIKHAMGETTVDGTPKRVVVLTNEGAEALLSVGVTPVGTTKPRAGDEWYPHLAKELKNTKVVGTERDINLEAVMKLQPDLIIGNKMRHEKIYEQLKEIAPTVYAETLRGDWKENFTLYTKAVNKEKEGQNALNDYKKRIAGIKEKLGDKVNSKVSIIRFVPGDVRIYQKNSFSGVVLNDIGFKRPPLQDKDEFAIKGITKEQIPNMDGDYLFYFTSDKDADKNNEGNTLAKEWTEDPLFKQLQASKDNKVFQVDEVIWNTAGGIVAANLMLDDIEKYFLK

SEQ ID NO: 58714 - DNA, 963 bp, Bacillus cereus E33L
  CDS (1)..(963): transl_table=11
atgacacgcactaaaaatatgcttatattttgcattatgctactaacaatcataatcgcagggtgtagtaaagaagaaaagaaagaaaatgatacatcagctaaagcgaaagattcgtatacgataaaacatgcaatgggcgaaacgacagtgaatggtacgccaaaaagagttgttgttttaacaaatgagggcgctgaggcacttttatctgttggagtaacgccagttggaacgacaaaaccacgagctggtgatgaatggtatcctcatttagcgaaagagttaaaaaatacgaaagtagtaggaactgagcgtgacattaatttagaagcagtaatgaagcttcagccggatttaattatcggaaataaaatgcgtcacgaaaaaatatacgagcagttaaaagaaatcgcgccaacagtatatgctgaaacattacgcggtgattggaaagaaaacttcacactttatacaaaagctgtaaataaagaaaaagaagggcaaaatgctctaaatgattataaaaagcgtattgtagcaataaaaggacaattaggtgataaaattaattctaaagtttccattattcgcttcgtccctggtgatgttcgtatttatcaaaaaaattcattctcaggtgttgtattaaatgatattggatttaaacgaccaccattacaagataaagatgaatttgcaattaaaggaattacaaaagagcaaattccaaatatggacggggactatttattctatttcacatcagataaagacgcggataagaataatgaaggaaacacattagcaaaagaatggacagaagatccactctttaagcaactgcaggcttctaaagataataaagtattccaagtagatgaagtaatttggaatacagcaggtggtattgtagctgcaaaccttatgttagatgatattgaaaaatattttatgaagtaa

SEQ ID NO: 58715 - protein, 320 aa, Bacillus cereus E33L
MTRTKNMLIFCIMLLTIIIAGCSKEEKKENDTSAKAKDSYTIKHAMGETTVNGTPKRVVVLTNEGAEALLSVGVTPVGTTKPRAGDEWYPHLAKELKNTKVVGTERDINLEAVMKLQPDLIIGNKMRHEKIYEQLKEIAPTVYAETLRGDWKENFTLYTKAVNKEKEGQNALNDYKKRIVAIKGQLGDKINSKVSIIRFVPGDVRIYQKNSFSGVVLNDIGFKRPPLQDKDEFAIKGITKEQIPNMDGDYLFYFTSDKDADKNNEGNTLAKEWTEDPLFKQLQASKDNKVFQVDEVIWNTAGGIVAANLMLDDIEKYFMK

SEQ ID NO: 58716 - DNA, 948 bp, Bacillus licheniformis ATCC 14580
  CDS (1)..(948): transl_table=11
atgaaacgttttaaatggtttgcactgttcgctgcgcttatccttttattagccgcctgcggaaatcaagataaagatcaatctgcggagaagaacggcagcaaagattcctatactgtaaagcacgcaatgggaacagcgacaattgacggcactccgaaaaaagtcgtcgtactcacgaatgaagcgacagaagcagtgctcgcacttggcgtaaaacctgtcggcgccgttcaatcctggctgggagatccatggtatgaccatattaaagataaaatgaaaggcgtagagaacgtcggaacggaggctgcgccgaatattgaaaaaatcgcgagcctgaagcctgacttaatcatcggcaacaaaatccgccaagaagaagtatacgacaagctgaaagcaatcgcgccgaccgtatttgccgagacattgtcaggggaatggaaaaacaactttaagcttactgccgaagcgctcaataaaaaagctgaaggcgaaaaagtcatcgctgactttgacaagcgcgttgaagacattcatgaaaaactaggcgataaagtgaaacaaaaagtctctctcgtccgctttacagatgctgatacccgcatctatcacaaaggatcatttgccggaacgattttggatcagctcggttttgcaaggcctaaaggccaggaagccaacgatctcggacaaatggaagtgacaaaggaacaaattcctgatatggacggggacgtgcttttttattacacgtatgagacaggcgatgacaaagcaagcgccattgagaaagactatgtcaatgatccgctctttaaaaacttaaacgtctccaaaaaaggaaacgtccataaagtgagcgatgccatctggaatacagcagggggcgtccttgcagcaaacctgatgcttgatgatattgaaaaatactttttaaaatga

SEQ ID NO: 58717 - protein, 315 aa, Bacillus licheniformis ATCC 14580
MKRFKWFALFAALILLLAACGNQDKDQSAEKNGSKDSYTVKHAMGTATIDGTPKKVVVLTNEATEAVLALGVKPVGAVQSWLGDPWYDHIKDKMKGVENVGTEAAPNIEKIASLKPDLIIGNKIRQEEVYDKLKAIAPTVFAETLSGEWKNNFKLTAEALNKKAEGEKVIADFDKRVEDIHEKLGDKVKQKVSLVRFTDADTRIYHKGSFAGTILDQLGFARPKGQEANDLGQMEVTKEQIPDMDGDVLFYYTYETGDDKASAIEKDYVNDPLFKNLNVSKKGNVHKVSDAIWNTAGGVLAANLMLDDIEKYFLK

SEQ ID NO: 58718 - DNA, 960 bp, Rubrobacter xylanophilus DSM 9941
  CDS (1)..(960): transl_table=11
atgtcatggtggagggggtttgtgatctctgtcctgctcgccgcgggggcgctcgggctcgcggcctgcggcggggcctcggggggctcctcgggcggggaggagggctccggcgggaggatcatagagcacgccatgggccggaccgaggtccccgagcggcccgagcgggtcgtcgtgctcgacaccggcgagctcgacagcgccataacgctcggcgtcaagccggtgggggcggtggaggccgtgcccgggatggggctgccggagtacctcggggagaagacccggggcatagagctcgtgggcaccatcgagcagccgaacctggagaagatagccgcgctggaccccgacctcatcctctccagcaagctccggcacgagaagatctacgaccagctctccgagatagcgccaaccgtcttcaccgagaccaccggggtcacctggaagcagaacttcgagctgcacgccagggcgctcggcaggaccgagagggccgaggaggtcaagcgcgagtaccggcggcacatacgagagctccgcgacgagctcggcgagaagccctggcccgaggtctccgtggtccggttcgtccccggggacaccaggatctaccagaaggagaacttcatcggcaccgtgctcgaggacgtggggctgccgcgccccgagtcccaggacgtcgaggagttcgccctgctcaacgtcagcaaggaggccatccccaagatgggcggggacgtgatcttcgtgaccgtctacggcaacgaggaggacaccgccaagcaggagatcatgaacgaccccctctggcggcagctggaggccgtgcgcgagggcagggtctacgaggtctccgacgacctgtggatgctcgggatcggctacaccgcagcaaacggcgtcctcgacgacctggagaagtatctggcagaggagcggcgggcctcctga

SEQ ID NO: 58719 - protein, 319 aa, Rubrobacter xylanophilus DSM 9941
MSWWRGFVISVLLAAGALGLAACGGASGGSSGGEEGSGGRIIEHAMGRTEVPERPERVVVLDTGELDSAITLGVKPVGAVEAVPGMGLPEYLGEKTRGIELVGTIEQPNLEKIAALDPDLILSSKLRHEKIYDQLSEIAPTVFTETTGVTWKQNFELHARALGRTERAEEVKREYRRHIRELRDELGEKPWPEVSVVRFVPGDTRIYQKENFIGTVLEDVGLPRPESQDVEEFALLNVSKEAIPKMGGDVIFVTVYGNEEDTAKQEIMNDPLWRQLEAVREGRVYEVSDDLWMLGIGYTAANGVLDDLEKYLAEERRAS

SEQ ID NO: 58720 - DNA, 1065 bp, Rhodococcus sp. RHA1
  CDS (1)..(1065): transl_table=11
ttgtcccctcgtaggttttccgcccgccgcgcgtccaccggtctcgtcgccgtcgctgtgctcgcagtcgccggctgctctcaaccgtccgacgacgatcccgcagcgtccatcgtccggaccaccacgcagatcgccggagccggtgtggtcggcatcgagcgggacaccacgaccgcctgcgccgagccggccccggtcgacgccgcactcgcggccggctcgacgcaccgggtggtccacacgaagggcgagagcgacgttccgtccgatccgcagcggatcgtggtactcgacagcgccgcactggacgcggtgtgcgcactcggtctgtggaaaaacgtggtcggcgcggcgaccgtcgacggggactcgcctcagcccggctacctcggcacgggcatctccgagatcccgagcgtcggatccgtcgacgccccggatgtgaacaagatcgcgcaggcggacccggacctgatcctcggatcgagtccggcgtccgaccagctgtacggcgcgctctcccccatcgcgcccaccgtgttcgtcggctccgaccccgtgtactggaaggcccagttccttctcgccggcaacgccctgggccgggccgacgcggcgacggccgcactcgagcagtaccagcaggacgccacgcagctcggcgtcgacatcgatgccgcgcagacacaggcgtccgtcgtccgattcgacgccgacagcatggaggtcgagggtccggccacgttcgccggccaggtgctcaccgacgccggagtgcggcggcccgcctatcagaacctcgacggcgcagtcaccgaaccgatcaccgaatccgacatcgaccaggccgagggcgacctcatctacgccgtcctggacggcgaggagggcaccgcgcacgcggaggacgtcatgtccggtgaggcatgggaagacctcgaggcggcctccgacaagcgggtcttcgctgtggagggtgacgtgtggggcggaaacggtgtcgtcgccgcgcgcgcgatgctcaccgacctgcggaacacgctgaacggctacgtcggctag

SEQ ID NO: 58721 - protein, 354 aa, Rhodococcus sp. RHA1
MSPRRFSARRASTGLVAVAVLAVAGCSQPSDDDPAASIVRTTTQIAGAGVVGIERDTTTACAEPAPVDAALAAGSTHRVVHTKGESDVPSDPQRIVVLDSAALDAVCALGLWKNVVGAATVDGDSPQPGYLGTGISEIPSVGSVDAPDVNKIAQADPDLILGSSPASDQLYGALSPIAPTVFVGSDPVYWKAQFLLAGNALGRADAATAALEQYQQDATQLGVDIDAAQTQASVVRFDADSMEVEGPATFAGQVLTDAGVRRPAYQNLDGAVTEPITESDIDQAEGDLIYAVLDGEEGTAHAEDVMSGEAWEDLEAASDKRVFAVEGDVWGGNGVVAARAMLTDLRNTLNGYVG

SEQ ID NO: 58722 - DNA, 966 bp, Bacillus cereus G9241
  CDS (1)..(966): transl_table=11
atgaattttatgcgaaagaaaccgtttacagtatttgtatttttattagccttttcactacttttaagtgcttgtggaaaaccaaatacgaaagaagatacaaaagaagatacaaaaaaagaaatgattacagttgaacatgcaatgggtaaaacagaagttcctgctaatccaaaacgtgtagttattttaacaaacgaaggaactgaagctttacttgagctaggtgtgaaaccagttggggctgtaaaatcttggactggtgatccgtggtatccacatattaaagataaaatgaaagatgtaaaagttgttggtgatgaaggacaagtgaacgtagaaactatcgcttctttaaaaccagacttaattatcggtaacaaaatgcgtcacgaaaaagtgtacgagcaactaaaagcaattgcacctactgtgttctctgaaacattacgtggtgaatggaaagataacttcaagttttatgcgaaagcattaaataaagaaaaagaaggcgaaaaggttttagctgattacgataaacgtatgaaagatttaagaactaaactaggcgataaagtaaaccaagaaatttctatggttcgcttcatgcctggtgatgttcgtatttatcatggtgatacattctctggtgttattttaaaagaacttggattcaaacgtccaggcgatcaaaataaagatgacttcgcagagcgtaacgtatctaaagaacgtatttctgcaatggatggtgatgtattgttctacttcacattcgataaaggaaacgagaaaaaaggctctgaattagaaaaagaatatatcaatgatccattatttaaaaacttaaatgcagtgaaaaataataaagcatacaaagttgacgatgtgatttggaataccgctggcggtgtaatggctgctaacctactattagatgatatcgaaaaacgctttgttaaatag

SEQ ID NO: 58723 - protein, 321 aa, Bacillus cereus G9241
MNFMRKKPFTVFVFLLAFSLLLSACGKPNTKEDTKEDTKKEMITVEHAMGKTEVPANPKRVVILTNEGTEALLELGVKPVGAVKSWTGDPWYPHIKDKMKDVKVVGDEGQVNVETIASLKPDLIIGNKMRHEKVYEQLKAIAPTVFSETLRGEWKDNFKFYAKALNKEKEGEKVLADYDKRMKDLRTKLGDKVNQEISMVRFMPGDVRIYHGDTFSGVILKELGFKRPGDQNKDDFAERNVSKERISAMDGDVLFYFTFDKGNEKKGSELEKEYINDPLFKNLNAVKNNKAYKVDDVIWNTAGGVMAANLLLDDIEKRFVK

SEQ ID NO: 58724 - DNA, 960 bp, Corynebacterium glutamicum
  CDS (1)..(960): transl_table=11
ttgggtatcgcaggatgttccacggccagtgatgaagccacaagcaccagcgacgatgtagctgtcggcggccgcctattttctacagcggattccgccaccgccgctctgggaagcgacgccgaaccaggccaattcccccgcaccgttgtgcattcacgcggcgaaactacccttgagcagcagccacaacgagtcgtggttctcgacagcggtgaaatcgaccaggttttgagcctcggcgtgactcccgtcggcatcgccagcccgaaagacgcctccagccagcccgcttacctcgaaaatcagctggcagatgtacaaactgtgggcaccacgagtgagctcaatttcgaagccatcgccgccctcaagcctgacctgattctgggcagcaagctgcgcgtcgacgaatcctacgatcagctctcccaaatcgcaccaaccgtgctgagtattcgccccggattcccctggaaggaaaacttcctcctcaccgccgacgcgctcggtctcgagggcaaagccgtcgaggttctcaacgagtaccaaacccatgtcgatgcagtccgcgagaccatcgacggcagcccagaaatctcactcgtccgcttcatgcctggtcgcacccgcctgtacggaaacctctctttcatcggtgcaatccttaaggacctggggctttctcgcccagagatccaaaatatcgacgatcttgccgtggagatctcccccgaaaacatcaccgatgccaacggcgactggattttctactccacctacggcaagcccgaggccaccgagcaggacaacattttgtccaacgagctgtggcacaacctccccgccgtccaagaaggtcatgccctggaggtcaatgacgagagctggttcatggggttgggtcctctcggcgccaatgaagtgctcgacgacatcgaaaacatcctcggatcctag

SEQ ID NO: 58725 - protein, 319 aa, Corynebacterium glutamicum
MGIAGCSTASDEATSTSDDVAVGGRLFSTADSATAALGSDAEPGQFPRTVVHSRGETTLEQQPQRVVVLDSGEIDQVLSLGVTPVGIASPKDASSQPAYLENQLADVQTVGTTSELNFEAIAALKPDLILGSKLRVDESYDQLSQIAPTVLSIRPGFPWKENFLLTADALGLEGKAVEVLNEYQTHVDAVRETIDGSPEISLVRFMPGRTRLYGNLSFIGAILKDLGLSRPEIQNIDDLAVEISPENITDANGDWIFYSTYGKPEATEQDNILSNELWHNLPAVQEGHALEVNDESWFMGLGPLGANEVLDDIENILGS

SEQ ID NO: 58726 - DNA, 25 bp, Artificial sequence
  primer
atgttagtggtggcctgtcaaaatc

SEQ ID NO: 58727 - DNA, 30 bp, Artificial sequence
  primer
ttaattttctccaagaaggtatttatatag

SEQ ID NO: 58728 - protein, 292 aa, Artificial sequence
  consensus sequence
  Variant (2)..(3): Xaa in position 2 to 3 is any amino acid
  Variant (5)..(11): Xaa in position 5 to 11 is any amino acid
  Variant (13)..(13): Xaa in position 13 is any amino acid
  Variant (15)..(26): Xaa in position 15 to 26 is any amino acid
  Variant (27)..(29): Xaa in position 27 to 29 is any or no amino acid
  Variant (32)..(33): Xaa in position 32 to 33 is any amino acid
  Variant (35)..(61): Xaa in position 35 to 61 is any amino acid
  Variant (62)..(69): Xaa in position 62 to 69 is any or no amino acid
  Variant (71)..(71): Xaa in position 71 is any amino acid
  Variant (73)..(76): Xaa in position 73 to 76 is any amino acid
  Variant (78)..(78): Xaa in position 78 is any amino acid
  Variant (83)..(83): Xaa in position 83 is any amino acid
  Variant (85)..(91): Xaa in position 85 to 91 is any amino acid
  Variant (92)..(94): Xaa in position 92 to 94 is any or no amino acid
  Variant (96)..(100): Xaa in position 96 to 100 is any amino acid
  Variant (106)..(111): Xaa in position 106 to 111 is any amino acid
  Variant (112)..(116): Xaa in position 112 to 116 is any or no amino acid
  Variant (119)..(140): Xaa in position 119 to 140 is any amino acid
  Variant (142)..(175): Xaa in position 142 to 175 is any amino acid
  Variant (176)..(181): Xaa in position 176 to 181 is any or no amino acid
  Variant (183)..(183): Xaa in position 183 is any amino acid
  Variant (185)..(186): Xaa in position 185 to 186 is any amino acid
  Variant (188)..(190): Xaa in position 188 to 190 is any amino acid
  Variant (192)..(194): Xaa in position 192 to 194 is any amino acid
  Variant (196)..(196): Xaa in position 196 is any amino acid
  Variant (197)..(197): Xaa in position 197 is any or no amino acid
  Variant (199)..(214): Xaa in position 199 to 214 is any amino acid
  Variant (215)..(227): Xaa in position 215 to 227 is any or no amino acid
  Variant (229)..(230): Xaa in position 229 to 230 is any amino acid
  Variant (232)..(248): Xaa in position 232 to 248 is any amino acid
  Variant (249)..(256): Xaa in position 249 to 256 is any or no amino acid
  Variant (258)..(260): Xaa in position 258 to 260 is any amino acid
  Variant (262)..(268): Xaa in position 262 to 268 is any amino acid
  Variant (269)..(271): Xaa in position 269 to 271 is any or no amino acid
  Variant (273)..(273): Xaa in position 273 is any amino acid
  Variant (274)..(276): Xaa in position 274 to 276 is any or no amino acid
  Variant (278)..(284): Xaa in position 278 to 284 is any amino acid
  Variant (285)..(285): Xaa in position 285 is any or no amino acid
  Variant (288)..(289): Xaa in position 288 to 289 is any amino acid
HXXGXXXXXXXPXRXXXXXXXXXXXXXXXLGXXPXXXXXXXXXXXXXXXXXXXXXXXXXXXXXXXXXXXNXEXXXXLXPDLIXGXXXXXXXXXXYXXXXXIAPTVXXXXXXXXXXXWKXXXXXXXXXXXXXXXXXXXXXXYXXXXXXXXXXXXXXXXXXXXXXXXXXXXXXXXXXXXXXXXFXGXXLXXXGXXXPXXQXXXXXXXXXXXXXXXXXXXXXXXXXXXXXDXXFXXXXXXXXXXXXXXXXXXXXXXXXXLXXXLXXXXXXXXXXVXXXXWXXXXXXXXANXXLDD

SEQ ID NO: 58729 - protein, 41 aa, Artificial sequence
  protein pattern
  Variant (2)..(4): Xaa in position 2 to 4 is any amino acid
  Variant (6)..(6): Xaa in position 6 is any amino acid
  Variant (7)..(7): Xaa in position 7 is Ala or Val
  Variant (8)..(8): Xaa in position 8 is Ala, Ser or Val
  Variant (9)..(10): Xaa in position 9 to 10 is any amino acid
  Variant (11)..(11): Xaa in position 11 is Gly, Asn or Gln
  Variant (12)..(12): Xaa in position 12 is any amino acid
  Variant (13)..(13): Xaa in position 13 is Ala, Leu or Val
  Variant (14)..(15): Xaa in position 14 to 15 is any amino acid
  Variant (17)..(19): Xaa in position 17 to 19 is any amino acid
  Variant (20)..(20): Xaa in position 20 is any or no amino acid
  Variant (22)..(28): Xaa in position 22 to 28 is any amino acid
  Variant (29)..(29): Xaa in position 29 is any or no amino acid
  Variant (31)..(32): Xaa in position 31 to 32 is any amino acid
  Variant (33)..(33): Xaa in position 33 is Ile, Leu, Met or Val
  Variant (34)..(34): Xaa in position 34 is Ile, Leu or Val
  Variant (37)..(37): Xaa in position 37 is Ile, Leu or Val
  Variant (38)..(40): Xaa in position 38 to 40 is any amino acid
  Variant (41)..(41): Xaa in position 41 is Phe or Leu
LXXXLXXXXXXXXXXVXXXXWXXXXXXXXAXXXXDDXXXXX

SEQ ID NO: 58730 - protein, 35 aa, Artificial sequence
  protein pattern
  Variant (2)..(2): Xaa in position 2 is Phe, Ile, Leu or Val
  Variant (4)..(4): Xaa in position 4 is any amino acid
  Variant (5)..(5): Xaa in position 5 is Ile, Leu, Met or Val
  Variant (6)..(9): Xaa in position 6 to 9 is any amino acid
  Variant (14)..(22): Xaa in position 14 to 22 is any amino acid
  Variant (23)..(24): Xaa in position 23 to 24 is any or no amino acid
  Variant (26)..(30): Xaa in position 26 to 30 is any amino acid
  Variant (32)..(32): Xaa in position 32 is Ala or Gly
  Variant (35)..(35): Xaa in position 35 is Ala, Ile or Val
NXEXXXXXXPDLIXXXXXXXXXXXYXXXXXIXPTX

SEQ ID NO: 58731 - DNA, 369 bp, Synechocystis sp.
  CDS (1)..(369): transl_table=11
atgatgaccctcactcccaccatcgaattttttgctgatctccccgaagaactcagcaatgtcagcctccgccgcaattctactaccggcgctcgcactgtggtgatgacctttgaacgtctccaggcgatcgaaaagtttcagagttttacccaaaggtttaacggccatttacgtcttgctgacgaagagggggcgatggaaattgaaccatcgtcagtaaaatttatttttggtggagacgaaggggatgaactgcggggtgcccagtgcagttttgacctagttaaaaatgatcattgggaacgctttatccgtttcatggagcgctatgcggaggccaatggcatgggctaccaagatcgttaa

SEQ ID NO: 58732 - protein, 122 aa, Synechocystis sp.
MMTLTPTIEFFADLPEELSNVSLRRNSTTGARTVVMTFERLQAIEKFQSFTQRFNGHLRLADEEGAMEIEPSSVKFIFGGDEGDELRGAQCSFDLVKNDHWERFIRFMERYAEANGMGYQDR

SEQ ID NO: 58733 - DNA, 369 bp, Nostoc sp. PCC 7120
  CDS (1)..(369): transl_table=11
atgacatctatcaccccctcaattcaatttttcgcaggtatttttgaagaattaagtaatgttagtttacggagagaagtccgtactggcaaacgtatcgttatgatgaagtttaatcaactccaagcgatagaaggattcaacagctttactaaacaatccttgaattctctattgttaaccgatgaagaaggagaaattagcgtcaccccctctgcaacaagatttatttttgggggtgacgaaggtgatgaactacaaggagtagagtgcaaatttgaagttgagcgtgatgatcattgggaacgattcatgcgctttatgaaccgttacgccgaggctaatgatatggaatatggagaacgttag

SEQ ID NO: 58734 - protein, 122 aa, Nostoc sp. PCC 7120
MTSITPSIQFFAGIFEELSNVSLRREVRTGKRIVMMKFNQLQAIEGFNSFTKQSLNSLLLTDEEGEISVTPSATRFIFGGDEGDELQGVECKFEVERDDHWERFMRFMNRYAEANDMEYGER

SEQ ID NO: 58735 - DNA, 456 bp, Gloeobacter violaceus PCC 7421
  CDS (1)..(456): transl_table=11
gtgtaccagcccatccgcccggaaagcacccgccgcttcggcgcggtacagtggttggaacggcattcgggagggcagtccttggcgacgatcgaatttatcagcggcatccgcgaggaactgaccgaaatcaaactgcgccgcggccagaccagcggcaaccgcatcgtcgtgttcgtcttcgagaaggtgaatgcgatggacaaacttagcagcttctcctcggggggtgcccagtacatgttgctcaacgacgaagaaggcgacatccaggtcaccccgcgcaatctcgaatttttttataaaagcgacgacaacctcgccaagcttgtgtgcaccttcgaattgatcgacgatttgcagtggcagcggttgcgccggtttatggaccgctacgccgccagcaacggcatggagtaccaggaccgaggcccgcaggacaaaatgaaacagtag

SEQ ID NO: 58736 - protein, 151 aa, Gloeobacter violaceus PCC 7421
MYQPIRPESTRRFGAVQWLERHSGGQSLATIEFISGIREELTEIKLRRGQTSGNRIVVFVFEKVNAMDKLSSFSSGGAQYMLLNDEEGDIQVTPRNLEFFYKSDDNLAKLVCTFELIDDLQWQRLRRFMDRYAASNGMEYQDRGPQDKMKQ

SEQ ID NO: 58737 - DNA, 375 bp, Synechococcus elongatus PCC 7942
  CDS (1)..(375): transl_table=11
atgaccgacgtactgcccacgatcgaactgtttgatggcatcgctgaagaactcgataacgtcagcttgcggcgcgatcgccaatccggcacccgcaatgtcttgctccgcttccgtgccctcaaagcccttgatcgcttcaatagtttccgaagccgcttttccaaagcgattcgcctcaccgatagtgaaggggcaatcgaactttggcccgactcctccaagttggtgtttggcggtgatgacggcgatgaactggaccgcgtcgagtttgtcgtcccgatcgacaatgaagaccactggcaacgcttcatgcgatttatggagcgctacgctgcggccaatgacatgacctacggcgatcgccaggcataa

SEQ ID NO: 58738 - protein, 124 aa, Synechococcus elongatus PCC 7942
MTDVLPTIELFDGIAEELDNVSLRRDRQSGTRNVLLRFRALKALDRFNSFRSRFSKAIRLTDSEGAIELWPDSSKLVFGGDDGDELDRVEFVVPIDNEDHWQRFMRFMERYAAANDMTYGDRQA

SEQ ID NO: 58739 - DNA, 363 bp, Trichodesmium erythraeum IMS101
  CDS (1)..(363): transl_table=11
atgactacaattgacaaaaagttgactacaattcagtttattcaaggaatagatgaagaagtaacaccagaagtgcgtctaactcgttctcgtagtggtaaccagggaacagctacattgatttttgaagatcccaaggctttaggccaagatgttactcaagaaattacagggatgtatatgattgatgaagaaggccaaataactagtcgtgacgttaaggccagatttgttaatggtcagcctaaattccttgagggactttatgttatgaagactaagcaagaatgggagcgttttatgcgctttatggagagttatgctaaagagcatgacttaggatttaaaaaggctaaggcttga

SEQ ID NO: 58740 - protein, 120 aa, Trichodesmium erythraeum IMS101
MTTIDKKLTTIQFIQGIDEEVTPEVRLTRSRSGNQGTATLIFEDPKALGQDVTQEITGMYMIDEEGQITSRDVKARFVNGQPKFLEGLYVMKTKQEWERFMRFMESYAKEHDLGFKKAKA

SEQ ID NO: 58741 - DNA, 372 bp, Crocosphaera watsonii WH 8501
  CDS (1)..(372): transl_table=11
atgagtaatgtcaccccttccatcgagttctttgtgggcatttcggaggaattaagtaatgtaagtttacgacggagtaagcaaacagggattcgtaatgtcttaatgatttttgagaatttaaaatctttagaaaggttcagaagttatacaaatcaaacctacggtgatttacgtttaattgactcggaaggagaaattagcgtcactccctcttctttaaaaattatttggggaggggatgaaggggatgaattaaaagaggttagatgcggatttgatcttgaaaaagatgagcattgggatcgttttatgcgttttatggaacgttacgcagaagctaatggcatggcttatcaagatacaaaataa

SEQ ID NO: 58742 - protein, 123 aa, Crocosphaera watsonii WH 8501
MSNVTPSIEFFVGISEELSNVSLRRSKQTGIRNVLMIFENLKSLERFRSYTNQTYGDLRLIDSEGEISVTPSSLKIIWGGDEGDELKEVRCGFDLEKDEHWDRFMRFMERYAEANGMAYQDTK

SEQ ID NO: 58743 - DNA, 336 bp, Anabaena variabilis
  CDS (1)..(336): transl_table=11
atggcaaaaatccagttttctagaggactcgatgaagaagtaattccagaagtacgtttgacgcgatcgcgcacaggtgacactggtacagcaacttttatttttacaaatcctaaaattttagaccaaggtactactgaagatattaccgggatgtatttaattgacgaagaaggagaaattatcacccgtgaggttaagggtaaatttgtcaacggtagacctgaaggagtagaggctgtttatgtgatgaaatcagcccaagaatgggagcgtttcatcagatttatggaacgttacgcccaagaaaacgatttaggattcagtaaatcttaa

SEQ ID NO: 58744 - protein, 111 aa, Anabaena variabilis
MAKIQFSRGLDEEVIPEVRLTRSRTGDTGTATFIFTNPKILDQGTTEDITGMYLIDEEGEIITREVKGKFVNGRPEGVEAVYVMKSAQEWERFIRFMERYAQENDLGFSKS

SEQ ID NO: 58745 - DNA, 348 bp, Phaeodactylum tricornutum
  CDS (1)..(348): transl_table=11
atggaagctaaaattcaatttataaaaggtcttgatgaaaaagttttaccggatgttcgtttaactcgatcaaaagatggcagtacgggtacagcaacatttcgctttaaaaatccaaatatattagataaaactactgcaaaagagggtgaaattaccggtatgtatctaattgacgaagaagggattttagaaactcgcgatgtcaatgcaagatttgttaatggaaaaccagaggcgattgaatcgatttatattatgaaaagtcctgaagcctgggatagatttatgcgatttatggaaagatatggggaaacaaatggtttagtatttagtaaagcaagttaa

SEQ ID NO: 58746 - protein, 115 aa, Phaeodactylum tricornutum
MEAKIQFIKGLDEKVLPDVRLTRSKDGSTGTATFRFKNPNILDKTTAKEGEITGMYLIDEEGILETRDVNARFVNGKPEAIESIYIMKSPEAWDRFMRFMERYGETNGLVFSKAS

SEQ ID NO: 58747 - DNA, 20 bp, Artificial sequence
  primer
atgatgaccctcactcccac

SEQ ID NO: 58748 - DNA, 22 bp, Artificial sequence
  primer
ttaacgatcttggtagcccatg

SEQ ID NO: 58749 - protein, 109 aa, Artificial sequence
  consensus sequence
  Variant (2)..(2): Xaa in position 2 is any amino acid
  Variant (4)..(5): Xaa in position 4 to 5 is any amino acid
  Variant (7)..(8): Xaa in position 7 to 8 is any amino acid
  Variant (11)..(13): Xaa in position 11 to 13 is any amino acid
  Variant (14)..(14): Xaa in position 14 is any or no amino acid
  Variant (16)..(16): Xaa in position 16 is any amino acid
  Variant (18)..(18): Xaa in position 18 is any amino acid
  Variant (20)..(31): Xaa in position 20 to 31 is any amino acid
  Variant (33)..(50): Xaa in position 33 to 50 is any amino acid
  Variant (51)..(53): Xaa in position 51 to 53 is any or no amino acid
  Variant (55)..(55): Xaa in position 55 is any amino acid
  Variant (57)..(57): Xaa in position 57 is any amino acid
  Variant (60)..(72): Xaa in position 60 to 72 is any amino acid
  Variant (74)..(89): Xaa in position 74 to 89 is any amino acid
  Variant (90)..(94): Xaa in position 90 to 94 is any or no amino acid
  Variant (96)..(96): Xaa in position 96 is any amino acid
  Variant (99)..(99): Xaa in position 99 is any amino acid
  Variant (103)..(103): Xaa in position 103 is any amino acid
  Variant (107)..(108): Xaa in position 107 to 108 is any amino acid
IXFXXGXXEEXXXXVXLXRXXXXXXXXXXXXFXXXXXXXXXXXXXXXXXXXXXLXDXEGXXXXXXXXXXXXXGXXXXXXXXXXXXXXXXXXXXXWXRFXRFMXRYAXXN

SEQ ID NO: 58750 - protein, 39 aa, Artificial sequence
  protein pattern
  Variant (2)..(13): Xaa in position 2 to 13 is any amino acid
  Variant (14)..(18): Xaa in position 14 to 18 is any or no amino acid
  Variant (20)..(20): Xaa in position 20 is Asp, Glu or Gln
  Variant (23)..(23): Xaa in position 23 is Ile or Met
  Variant (27)..(27): Xaa in position 27 is Glu or Asn
  Variant (28)..(28): Xaa in position 28 is Arg or Ser
  Variant (30)..(30): Xaa in position 30 is Ala or Gly
  Variant (31)..(31): Xaa in position 31 is any amino acid
  Variant (32)..(32): Xaa in position 32 is Ala, Glu or Thr
  Variant (33)..(33): Xaa in position 33 is any amino acid
  Variant (34)..(34): Xaa in position 34 is Asp or Gly
  Variant (35)..(35): Xaa in position 35 is Leu or Met
  Variant (36)..(36): Xaa in position 36 is any amino acid
  Variant (37)..(37): Xaa in position 37 is Phe or Tyr
  Variant (38)..(38): Xaa in position 38 is any amino acid
  Variant (39)..(39): Xaa in position 39 is Asp, Glu or Lys
GXXXXXXXXXXXXXXXXXWXRFXRFMXXYXXXXXXXXXX

SEQ ID NO: 58751 - DNA, 771 bp, Synechocystis sp.
  CDS (1)..(771): transl_table=11
atggaattaacaatcggctggctttatcccaaactcatgagcacctacggcgatcggggcaatgtcatttgcatccaacgtcgttgtcaatggcgggatatccctgtgaaaattctgcccctggaacagaccagcgaggcggcactgtttctccaagccgacttaattgtggggggcggggcccaggatcgccaacaggaaattgtcatgcgggatttgcaaggatccaaagcagaggcgctgaaaaatcagttagacgatggcattcccggagtattcacctgtggttctccccaactgctggggcattattacgagcctgccttagggcaacgcattcagggtttgggactgctggatatggtcagtaaacatccaggaccagaagcaaaacgctgcattggtaacgtagtgtttgaaattaccgctgaacccctccggcaagaattacaggctatgaccggggaaactcccattgtcattggctttgaaaaccatggcggccgcacctatctccaaaccgtttctcccctgggtaaggttaaaaccggctatggcaacaacggcgaagatggctttgagggggctttccaccaaaaggcgatcgccacttactcccatggccctctgttgcccaaaaatccctttttagctgattggttaatccgcacggcgttggagaagaagtatcaggattcggtgcagttaactcccttggatgactgcctcgcccaacaagcccgcgccgccatgctcaaacggctagaataa

SEQ ID NO: 58752 - protein, 256 aa, Synechocystis sp.
MELTIGWLYPKLMSTYGDRGNVICIQRRCQWRDIPVKILPLEQTSEAALFLQADLIVGGGAQDRQQEIVMRDLQGSKAEALKNQLDDGIPGVFTCGSPQLLGHYYEPALGQRIQGLGLLDMVSKHPGPEAKRCIGNVVFEITAEPLRQELQAMTGETPIVIGFENHGGRTYLQTVSPLGKVKTGYGNNGEDGFEGAFHQKAIATYSHGPLLPKNPFLADWLIRTALEKKYQDSVQLTPLDDCLAQQARAAMLKRLE

SEQ ID NO: 58753 - DNA, 696 bp, Mycobacterium tuberculosis H37Rv
  CDS (1)..(696): transl_table=11
gtggtgcggatcgggctcgtgctgcccgacgtgatgggcacctacggcgacggcggcaacgccgtggtgctacgacagcggctgctgctgcgcggcatcgccgccgagatcgtcgagatcacgctggccgatccagtgccggattcgctggacctctacacgctgggcggagcggaggactacgcgcagcggctggccacccggcacctacgtcgatatccgggcctgcaacgcgcggcgggccggggtgctccagtattggcgatctgcgcggccatccaggtgcttgggcactggtacgagacgtcgtcgggagaccgggtcgacggcgtggggttgctggatgtgaccacgtcaccgcaggatgcgcgcaccatcggcgagttggtcagcaagccgttgctggccggtttgacccaacccttgaccggttttgagaaccaccgcggcggcaccgtcctcgggcccggaacgtcgcccttgggcgcggtggtcaagggagccggcaaccgggccggcgacggttttgatggcgcggttgcgggcagcgtggtcgcgacctacatgcacgggccgtgcctggcccgcaacccggagcttgccgacctgctgctgagcaaggtggttggtgagctggcgccgctggatttgcccgaggtggacctgctgcgccgcgaacggctatccgcgcgttag

SEQ ID NO: 58754 - protein, 231 aa, Mycobacterium tuberculosis H37Rv
MVRIGLVLPDVMGTYGDGGNAVVLRQRLLLRGIAAEIVEITLADPVPDSLDLYTLGGAEDYAQRLATRHLRRYPGLQRAAGRGAPVLAICAAIQVLGHWYETSSGDRVDGVGLLDVTTSPQDARTIGELVSKPLLAGLTQPLTGFENHRGGTVLGPGTSPLGAVVKGAGNRAGDGFDGAVAGSVVATYMHGPCLARNPELADLLLSKVVGELAPLDLPEVDLLRRERLSAR

SEQ ID NO: 58755 - DNA, 786 bp, Lactococcus lactis subsp. lactis Il1403
  CDS (1)..(786): transl_table=11
atggcttatatctctttaaaatcaaatcttgaaaatccaaagtattccctcaacgtggctcatctttatggtgatttaatgaatacttatggtgataatggaaatattctcatgctcaagtatgtcggagaaaaattaggggcagagatgaccttcaatatcgtttctttaggtgatacttttgcaaaagaagattatgaccttgttttctggggtggtggtcaagattatgagcaagaaattattgcagatcaatcattgattgacttgtcagcacctttaaaagattacattgaatctgaaaaaccacttcttgcaatttgcggtggttatcaaatgctcggtcagtactatgttaattccgaagggacaaaaattcaaggaacgggaattcttggacattatactgaaaatttacgaactgaccgttttattggtgatattgaaactcacaatgaagaatttggtgaaacatattatggttttgaaaaccattcaggaattacctatctgtctgatgacgaaaagccactaggaaccgtcgtttacggtggtggaaataatccagatgaccaaaccgaaggtttaatttacaaaaatacttttggaacttatttccatgggccaattctttcaagaaatgcacgactagcttatcgtttggtgactactgctctttaccaaaaatatggagaagaaattcaactccctgcttttgaagagattttagctgacgaagataaaggccaacaaattggtgacctcaaacgtaaagttgaaaaataa

SEQ ID NO: 58756 - protein, 261 aa, Lactococcus lactis subsp. lactis Il1403
MAYISLKSNLENPKYSLNVAHLYGDLMNTYGDNGNILMLKYVGEKLGAEMTFNIVSLGDTFAKEDYDLVFWGGGQDYEQEIIADQSLIDLSAPLKDYIESEKPLLAICGGYQMLGQYYVNSEGTKIQGTGILGHYTENLRTDRFIGDIETHNEEFGETYYGFENHSGITYLSDDEKPLGTVVYGGGNNPDDQTEGLIYKNTFGTYFHGPILSRNARLAYRLVTTALYQKYGEEIQLPAFEEILADEDKGQQIGDLKRKVEK

SEQ ID NO: 58757 - DNA, 822 bp, Nostoc sp. PCC 7120
  CDS (1)..(822): transl_table=11
atgaattctccacaattagaattaactatcggttggctatatcctacattgatgagtacctatggcgatcgcggtaatgtaattactatcgaacgtcgcgcccaatggcggggatatacggtgaaagtattgcctttagaccaaaactccacagcagatgatattaagtctgtagatgtgatagttggtggtggcgcacaagacagacagcaagaaattgtcatgcgcgatttgcaaggcgcgaaagctgacgcgatgcgtgagaaaatcgacaatggcacaccaggagtgtttacttgtggttcaccccaattattaggacactattacgaaccagcatttggacagcgtattgaaggtttaggaatacttgatttagtttctatccatcctggtgaaaatactaagcgttgtatcggtaacttagttatagaagttacagctagtcgtctggctaaagatttagaagaaatgacgggaagcaaagcctacttagtgggttttgaaaatcacggtggacgcactaagttaggtaaggtagaagctttaggaaaagtggtttacggcttaggcaataatggtgaagatggtacagaaggctcattttatcagaatgccatagcaacctattcccacgggccattattacccaaaaacccctttgtggctgactggttaattcaaacagcgttgcggttaaagtatcagcaggcaattactttacaagctttagatgatagtttggctatgcaggcacgggaagctatgtttaaaaagttacaagtcaacccaccaagaccatctgcggtagctaaagtctaa

SEQ ID NO: 58758 - protein, 273 aa, Nostoc sp. PCC 7120
MNSPQLELTIGWLYPTLMSTYGDRGNVITIERRAQWRGYTVKVLPLDQNSTADDIKSVDVIVGGGAQDRQQEIVMRDLQGAKADAMREKIDNGTPGVFTCGSPQLLGHYYEPAFGQRIEGLGILDLVSIHPGENTKRCIGNLVIEVTASRLAKDLEEMTGSKAYLVGFENHGGRTKLGKVEALGKVVYGLGNNGEDGTEGSFYQNAIATYSHGPLLPKNPFVADWLIQTALRLKYQQAITLQALDDSLAMQAREAMFKKLQVNPPRPSAVAKV

SEQ ID NO: 58759 - DNA, 732 bp, Clostridium perfringens str. 13
  CDS (1)..(732): transl_table=11
atggaattaaatatatgtcacttatatcctgatctacttaatgtttatggagatgtaggaaatattttaatattaaagcatagagcaaaattgcgtggaatcaaagtaaatgtaataaatgtttctatgggtgataaatttgataaagataattacgatatagtattctttggtggcggtcaagactttgagcaatcaatagtatctgatgatttaataaacttaaaaaaagatgttttaaaagaatatgttgaagaaggaaaagttcttttagctatctgtggtggatatcaacttttaggtaattattatactgcccctacaggagaaaaaatagatggcttaggaattttagatatatatactgaaggtggagacactagattcataggtaacacagtaattcataacgaagaatttgatgaaacttatgttggctttgagaatcactctggtagaacatttattggagatttaaaacctcttggaaaatgcattcatggttatggaaataatggggaaagtggttatgagggatgtatttataaaaatactttctgtacatacttccacggatcacttttatctaagaatccagagcttgcagatagaattttaacattagctcttagtaataaatatgatgatatttcattatcacctttagatgatacttttgaaattaaagctaagaatgttatgatagatagattaaataatgaaaataagtaa

SEQ ID NO: 58760 - protein, 243 aa, Clostridium perfringens str. 13
MELNICHLYPDLLNVYGDVGNILILKHRAKLRGIKVNVINVSMGDKFDKDNYDIVFFGGGQDFEQSIVSDDLINLKKDVLKEYVEEGKVLLAICGGYQLLGNYYTAPTGEKIDGLGILDIYTEGGDTRFIGNTVIHNEEFDETYVGFENHSGRTFIGDLKPLGKCIHGYGNNGESGYEGCIYKNTFCTYFHGSLLSKNPELADRILTLALSNKYDDISLSPLDDTFEIKAKNVMIDRLNNENK

SEQ ID NO: 58761 - DNA, 753 bp, Corynebacterium glutamicum ATCC 13032
  CDS (1)..(753): transl_table=11
atgaccaccctcaacatcggcctcatcctccccgacgtcctcggaacttacggcgacgacggcaacgcactagtcctgcgccaacgcgcacgcatgcgtggcattaatgctgaaatccagcgcgtcaccctcgacgacgccgtcccttccacccttgatctctactgcctcggcggcggcgaggacaccgcacagatccttgccaccgaacacctcaccaaagacggcggcctccaaaccgcagccgccgcaggccgccccatcttcgcagtctgcgcaggtctccaggtactcggcgactccttccgcgccgccggccgtgtcatcgacggccttgggcttatcgacgccaccaccgtctctttacaaaaacgcgccatcggagaagtcgaaacgacaccaacccgcgccggattcaccgccgagctgaccgaacgactcaccggcttcgaaaaccacatgggcgccaccctgctcggccccgacgccgaaccactcggccgagtcgtccgcggcgaaggcaacaccgatgtctgggcagcctccgaaaacaccgacgaccaacgccaacaattcgccgaaggcgccgtccaaggcagcatcatcgccacctacatgcacggccccgcactcgcccgaaacccccaactcgccgacctcatgctcgcaaaagcaatgggtgtcgcgctgaaagacctggagcctttggacatcgacgtcatcgaccgcctccgcgccgaacgcctggcgtag

SEQ ID NO: 58762 - protein, 250 aa, Corynebacterium glutamicum ATCC 13032
MTTLNIGLILPDVLGTYGDDGNALVLRQRARMRGINAEIQRVTLDDAVPSTLDLYCLGGGEDTAQILATEHLTKDGGLQTAAAAGRPIFAVCAGLQVLGDSFRAAGRVIDGLGLIDATTVSLQKRAIGEVETTPTRAGFTAELTERLTGFENHMGATLLGPDAEPLGRVVRGEGNTDVWAASENTDDQRQQFAEGAVQGSIIATYMHGPALARNPQLADLMLAKAMGVALKDLEPLDIDVIDRLRAERLA

SEQ ID NO: 58763 - DNA, 729 bp, Thermoanaerobacter tengcongensis MB4
  CDS (1)..(729): transl_table=11
atgaagctaactattggccacatgtatcccgaccttttaaacttatacggtgacaggggaaatataatcgctctaaaaaaaagatgtgaatggagaaaaattgatgtagaaataaaggaaataaaggcaggaataaatgaaaactttgcagacatagaccttttattttttggtggaggatcagacagagagcaaaaaatagtaagcgaagatttgaaaagtaaaaagaaaaatttaataaaagcaatagaagacggcatgccagttttagcaatatgcggagggtaccagcttctaggagagtattacaagactttagaaggaaataaaatagaagggcttggaattttagatgcttacactgtggcaagtaataaaagattaattggaaatattgtagtggaagcccatctttttaataaaaaattctacctggtaggctttgaaaatcactcaggaaagacttttttaagaaattgtagccctctaggcacagtaataataggatatggaaacaatggtgaagataaaaaagaaggctgtgtatacaaaaatgtctacggcacatatttgcacggcccacttcttcccaaaaatccggaaatggctgacatattgattgaaactgctctttctagaaaatacgggaaaataaattttgaacctctggaagattccattgaacaaagagcaaaagaagcttttataaaaagatttatgaaaaaataa

SEQ ID NO: 58764 - protein, 242 aa, Thermoanaerobacter tengcongensis MB4
MKLTIGHMYPDLLNLYGDRGNIIALKKRCEWRKIDVEIKEIKAGINENFADIDLLFFGGGSDREQKIVSEDLKSKKKNLIKAIEDGMPVLAICGGYQLLGEYYKTLEGNKIEGLGILDAYTVASNKRLIGNIVVEAHLFNKKFYLVGFENHSGKTFLRNCSPLGTVIIGYGNNGEDKKEGCVYKNVYGTYLHGPLLPKNPEMADILIETALSRKYGKINFEPLEDSIEQRAKEAFIKRFMKK

SEQ ID NO: 58765 - DNA, 729 bp, Streptomyces coelicolor A3(2)
  CDS (1)..(729): transl_table=11
gtgagcgacaaccaactgcggatcgtctggatctacccggatctgctcagcacctacggcgaccagggcaacgccctcgtcgtggagcgccgggcccgccagcgcggactcgacgtggcccggctcgacgtacgcagcgaccagccgattccgacctccggcgacatctacctcgtcggcggcggcgaggaccggccgcagcggctcgcggccgagcggctgcgccgtgacggcggcctgtaccgggcggtggagaacggcgcgatcgtcttctcggtctgcgccggctaccagatcctgggccacgagttcatcaacgacctcggccagcgcgagccgggcctcggcctgctcgacgtggtctccacccgcggcgagggcgcccggtgcgtcggcgacgtcctcggcgacatcgacccgcgcctcggcctgcccccgctgaccggcttcgagaaccaccagggcgtcacccacgtcgggcccaacgcccgcccgctcgcccaggtccgcttcggcaacggcaacggcacgggggacggcacggagggcgcgtacaacgacacggtcttcggcacctacatgcacggccccgtgctggcccgcaacccgctgatcgcggacctgctgctcaagctggccctcgacgtgaacgcgctgccgccgaccgacgaccgctggtacgaggcgctgcgcaacgagcgcatcgcggccgcgcagcagcctgcctga

SEQ ID NO: 58766 - protein, 242 aa, Streptomyces coelicolor A3(2)
MSDNQLRIVWIYPDLLSTYGDQGNALVVERRARQRGLDVARLDVRSDQPIPTSGDIYLVGGGEDRPQRLAAERLRRDGGLYRAVENGAIVFSVCAGYQILGHEFINDLGQREPGLGLLDVVSTRGEGARCVGDVLGDIDPRLGLPPLTGFENHQGVTHVGPNARPLAQVRFGNGNGTGDGTEGAYNDTVFGTYMHGPVLARNPLIADLLLKLALDVNALPPTDDRWYEALRNERIAAAQQPA

SEQ ID NO: 58767 - DNA, 753 bp, Bifidobacterium longum NCC2705
  CDS (1)..(753): transl_table=11
atggccagaacaattgatgtggtgtccctgtatcccaaagacatgaacatctacggcgattccggcaacgtgctgactatccgccgccgtctggaactgtacggttatgaaccggtcgtccaccagtacaatcaaggcgacgactggcccgaccaggtggaccttattctgggaggcggcggccaagacaccggccagaagaaaatcatcgacgacttctaccatcgcgccgacctgttgcgttcgcttgccgcagacggtacgccgatgctgatgatctgcggcctgtaccagctgttcggcgagtactttgaaaccgtggacggcacccgtctggacggcatcggcgttatcggtgcttataccgtgggccagaacgtgcgtatgatcggcaatcttgttgagcattccgaccagttcggcgatgtgattggctacgagaaccactccggccagaccttcctgcgcgaaggcgttcagccactcggcaccgtcaatcaggacggccgaggcaacaatggcgaagaccataccgagggcgcgcgcgtgcacaacgtgatcggcacctacatgcacggctcgttgctgcctaaaaaccccgccatcagcgatttccttatcgaaactgccgtgactcgtcgttacggtacgttcgatacgtccgatcagacccccgaacaagccaaggagctcgcccggctcgatcaagtagccaccaacgcgcgcaaggctgccgccgaacgtcctcggtga

SEQ ID NO: 58768 - protein, 250 aa, Bifidobacterium longum NCC2705
MARTIDVVSLYPKDMNIYGDSGNVLTIRRRLELYGYEPVVHQYNQGDDWPDQVDLILGGGGQDTGQKKIIDDFYHRADLLRSLAADGTPMLMICGLYQLFGEYFETVDGTRLDGIGVIGAYTVGQNVRMIGNLVEHSDQFGDVIGYENHSGQTFLREGVQPLGTVNQDGRGNNGEDHTEGARVHNVIGTYMHGSLLPKNPAISDFLIETAVTRRYGTFDTSDQTPEQAKELARLDQVATNARKAAAERPR

SEQ ID NO: 58769 - DNA, 753 bp, Corynebacterium efficiens YS-314
  CDS (1)..(753): transl_table=11
atgagtaccctgacaatcggcctggtccttcccgacgtcctcggcacctacggcgatgacggcaatgccctcgtcctgcgccaacgtgcccgcatgcgcggcatcgacgccgagatccagcgcatcaccctcgacgacgccgtcccctcgggtctcgacctctactgcctgggcggcggtgaggacaccgcccagatcctcgccgtggaacacctcgcgcaggaccgcggcctggccaccgcggccgccgccggtcgccccatcttcgccgtgtgcgcgggcatgcagatcctcggcgactccttccgggccgccggccgcatcgtcgacggtctcgggcttatcgacgccaccaccgtctccctccagaaacgcgccatcggtgaagtcgtctccgaccccacccgcgccggtgtcaccgccgaactcaccgacaccctcaccggcttcgagaaccacatgggagccaccctgctgggccgcgacgccgaacccctcggccgtgtcatccgtggcgaaggcaactgcgacacctggggcgcctccgacgtggtggaccacgaacgccaacagcacgccgagggcgccgtgcagggcagcgtcatcgccacctacatgcacggccccgccctcgcccgcaacccccagctcgccgacctgctgctggccaaggccatgggtcagtccctgaaggacctcgcgcctctccacatcgaggttgtcgaccgcctccgcgccgaacgcctggcttag

SEQ ID NO: 58770 - protein, 250 aa, Corynebacterium efficiens YS-314
MSTLTIGLVLPDVLGTYGDDGNALVLRQRARMRGIDAEIQRITLDDAVPSGLDLYCLGGGEDTAQILAVEHLAQDRGLATAAAAGRPIFAVCAGMQILGDSFRAAGRIVDGLGLIDATTVSLQKRAIGEVVSDPTRAGVTAELTDTLTGFENHMGATLLGRDAEPLGRVIRGEGNCDTWGASDVVDHERQQHAEGAVQGSVIATYMHGPALARNPQLADLLLAKAMGQSLKDLAPLHIEVVDRLRAERLA

SEQ ID NO: 58771 - DNA, 723 bp, Lactobacillus plantarum WCFS1
  CDS (1)..(723): transl_table=11
atgacttatacactacacgccgcacacctctacggcgatctaatgaacacgtatggtgatatcggtaacattttagcaatgcgctactatgctaaagcagtggatgccgacatcactgttgacttagttagcttggatgatcggtttgacgaagaaaaatatgacttcgccctcttcggcggtggtcaggattacgagcaaacgattgtttccaaggatttacaaacgaaaaaagacgccttgaccgcatatatcgaagccggtggcccattattagcaatctgtggtggctttcaaatgctgggccattactacattggggcccatggtgaaaagatcgcgggtatcggtgccttagatcattacacgctcagtcaggataacaatcgctttattggtaatataaccattgagaacgccgaaacccaccagacctactatggttttgaaaaccacaacgggatgaccttcctgggcgaaggtgaacggccccttggtcaagtgctccaaggtaacggcaataatggcaaagatcaatctgagggcgttatctacaagaacacctttgggtcttacttccatggtccaatccttgcacgcaatgaagccctcgctaaacgaatcttgaaactggccttacaacgtaagtaccctgaaggcaacttcgatgcactggatcaactcaacgaagacctcactaaaaacgttatcgtgaaaccttaa

SEQ ID NO: 58772 - protein, 240 aa, Lactobacillus plantarum WCFS1
MTYTLHAAHLYGDLMNTYGDIGNILAMRYYAKAVDADITVDLVSLDDRFDEEKYDFALFGGGQDYEQTIVSKDLQTKKDALTAYIEAGGPLLAICGGFQMLGHYYIGAHGEKIAGIGALDHYTLSQDNNRFIGNITIENAETHQTYYGFENHNGMTFLGEGERPLGQVLQGNGNNGKDQSEGVIYKNTFGSYFHGPILARNEALAKRILKLALQRKYPEGNFDALDQLNEDLTKNVIVKP

SEQ ID NO: 58773 - DNA, 693 bp, Enterococcus faecalis V583
  CDS (1)..(693): transl_table=11
atggtgtctaaagaattagtcgtttgtcatttatatggcaacttattaaatacttacggagataacggaaatttattgatgcttaaatatttaaccgaaaaaatgggcgttaccttccgatcagaaattattagtatctacgaaccgtttgatcccgaaaaatatgatttagtctttgttggtggcggtcaagacttcgagcaactgatcatctcagaagacattcagaataaaaaagaagctttgacttcttatattgaaaatgacggcgtcttgttagctatctgtggtggttatcaacttctaggacattactatgtcggcgcacaaggcgaaaaaattaaaggaatcggtgcattagatcattacactttgagccaagacaacaatcgtttcattggtgatattgaaatttataatgaagaatttgatgaaacgtattatggttttgagaatcataacggcatgacttttttaggcgaaggggaacgacctttaggaacagtcaaacaaggcaaaggcaataacggtcaagataatggcgaaggcgttgtctataaaaatgtgtttggctcctacttccacggtccaatcttagcacgcaacaaaaatctagggattcggttaattcggaccgctttagagaaaaaatatggtgaaccgatcgctattcctgaaacgctttataaataa

SEQ ID NO: 58774 - protein, 230 aa, Enterococcus faecalis V583
MVSKELVVCHLYGNLLNTYGDNGNLLMLKYLTEKMGVTFRSEIISIYEPFDPEKYDLVFVGGGQDFEQLIISEDIQNKKEALTSYIENDGVLLAICGGYQLLGHYYVGAQGEKIKGIGALDHYTLSQDNNRFIGDIEIYNEEFDETYYGFENHNGMTFLGEGERPLGTVKQGKGNNGQDNGEGVVYKNVFGSYFHGPILARNKNLGIRLIRTALEKKYGEPIAIPETLYK

SEQ ID NO: 58775 - DNA, 729 bp, Streptomyces avermitilis MA-4680
  CDS (1)..(729): transl_table=11
atgacagacaaccaactgcggctggtgtggatctacccggacctgctgagcacctacggcgaccagggcaacgcgctcgtcgtggagcgccgggcccgccagcgcggcctcgacgtggcccgcctcgacgtgcgcagcgaccagccgatccccacctccggcgacatctacctgatcggcggcggcgaggaccgtccgcagcggctcgcggccgagcggctgcgccgtgacggcggtctgcaccgcgcggtgggcaacggcgcgatcgtcttctcggtgtgcgccggctaccagatcctcggccacgagttcatcaacgacctcggccagcgcgagccgggcctcggcctgctcgacgtggtgtccacgcgcggcgagggcgagcggtgcgtcggcgacgtcctcggggacatcgacccgcgcctcggcctgccccagctgaccggcttcgagaaccaccagggcgtcacgcacctcggcccctccgcccgccccttggcccaggtgcggctcggcaagggcaacggcacgggtgacggcacggagggcgcgtacaacgacacggtcttcggtacgtacatgcacggtcccgtgctcgcccgcaacccgctgatcgcggacctgctgctgaagctggccctcgatgtgaacgcgctgccgccgatcgacgaccggtggtacgaggcgctgcggggcgagcgcatcgccgcggcgcagcagcccgcgtaa

SEQ ID NO: 58776 - protein, 242 aa, Streptomyces avermitilis MA-4680
MTDNQLRLVWIYPDLLSTYGDQGNALVVERRARQRGLDVARLDVRSDQPIPTSGDIYLIGGGEDRPQRLAAERLRRDGGLHRAVGNGAIVFSVCAGYQILGHEFINDLGQREPGLGLLDVVSTRGEGERCVGDVLGDIDPRLGLPQLTGFENHQGVTHLGPSARPLAQVRLGKGNGTGDGTEGAYNDTVFGTYMHGPVLARNPLIADLLLKLALDVNALPPIDDRWYEALRGERIAAAQQPA

SEQ ID NO: 58777 - DNA, 747 bp, Clostridium thermocellum ATCC 27405
  CDS (1)..(747): transl_table=11
atgtatgagctgaatatttgtcatttataccctgaccttttgaatttgtatggtgacagaggaaatataatggctttgaaaatgcgctgcgtatggcgcggaataaacgtaaacgtttcaaacatatccatcggggacaagtttgacgccgaagcctacgacattatatttttgggcggcggtcaggattatgaacaggaaataatccaagatgacctcctaaaccaaaaaggagaggaaatcaggaacgccgtaaaaaatgacaaagtgtttctggcaatttgcggcggatatcagcttttaggcagttattataaaacgtgggacggtaaggaaattcactttctgaacgctctggacttatggaccataggcggcaaggaaagaatgatcggaaactttgtgtttgaatgcgattttttaaagaatgaccattatgatggaaaaatcgtaggctttgaaaatcattccggaagaacctatttaggtcctggagtaaagcctctcggcaagattataaaaggctatggaaacaacggagaagacggttttgaaggagccatttacaaaaatgtttactgctcttattcccacggaagtctgcttcccaaaaacccggccttggccgaccatcttatttctgtcgccttaaaacagaaatacaaggattttgtgtcgttatctggtattgacgatgaatttgaaaacctggcccatgatacaacgattaaaagaataatggggtga

SEQ ID NO: 58778 - protein, 248 aa, Clostridium thermocellum ATCC 27405
MYELNICHLYPDLLNLYGDRGNIMALKMRCVWRGINVNVSNISIGDKFDAEAYDIIFLGGGQDYEQEIIQDDLLNQKGEEIRNAVKNDKVFLAICGGYQLLGSYYKTWDGKEIHFLNALDLWTIGGKERMIGNFVFECDFLKNDHYDGKIVGFENHSGRTYLGPGVKPLGKIIKGYGNNGEDGFEGAIYKNVYCSYSHGSLLPKNPALADHLISVALKQKYKDFVSLSGIDDEFENLAHDTTIKRIMG

SEQ ID NO: 58779 - DNA, 732 bp, Staphylococcus aureus subsp. aureus MRSA252
  CDS (1)..(732): transl_table=11
atgcatgaattgactatttatcattttatgtcagataaattgaatttatacagtgatataggaaatattattgctttaagacaacgtgcaaaaaaacgaaatattaaagttaatgtcgtagaaatcaatgaaacagaaggtattacctttgatgaatgtgatattttctttatcggtggtggaagtgatagagaacaagcattagcaacaaaagaactaagtaaaattaagacaccacttaaagaagcgattgaagatggtatgccgggattaacgatttgtggaggctatcaatttttaggaaaaaaatatatcacgcctgatggtacagaattagaagggttaggtattttagatttttatactgaatcaaagacaaaccgattaacaggagatattgttatcgaaagtgatacttttggaactattgtaggttttgaaaatcacggtggtagaacatatcataatttcggtacacttggtcatgttacttttggttatggtaataatgatgaagataaaaaagaaggcattcattataaaaatttattaggtacttatttacacggaccaattttacctaaaaattacgaaataactgattatctgttagaaaaagcttgtgaacgtaagggtattccgtttgagcctaaagaaatagataatgaagcggaaaagcaagcgaaacaagtattaatagacagagcaaatagacagaagaagtctcgttaa

SEQ ID NO: 58780 - protein, 243 aa, Staphylococcus aureus subsp. aureus MRSA252
MHELTIYHFMSDKLNLYSDIGNIIALRQRAKKRNIKVNVVEINETEGITFDECDIFFIGGGSDREQALATKELSKIKTPLKEAIEDGMPGLTICGGYQFLGKKYITPDGTELEGLGILDFYTESKTNRLTGDIVIESDTFGTIVGFENHGGRTYHNFGTLGHVTFGYGNNDEDKKEGIHYKNLLGTYLHGPILPKNYEITDYLLEKACERKGIPFEPKEIDNEAEKQAKQVLIDRANRQKKSR

SEQ ID NO: 58781 - DNA, 729 bp, Propionibacterium acnes KPA171202
  CDS (1)..(729): transl_table=11
atgaacatcgaccgtcccaagatcgtcctgctgtaccagtccctgttgggcatctacggcgaccacggcaatgccgtcgtcctcactaaacgactgcaatggcgtggcatcgacgccgagctcctcatcgtcgagcctggtcagcctgtgcccaccgacggggccgtttacctgctagggggcggagaggacaccgcccagatcaccgctgtacaagagctcgaagctgatggcgggctgttcaccgccctcgacgacggcgcaatgctttttgcagtgtgcgccggctaccagatctgcggaaagtccttcaccattggggcccgtgatgaggccatcaaagggctagggctcctcgacgctgaaactcgacgtggcccagagcgtgccgtcggggaggtgctacacatctggactcagcccgacggtaatacctatcccatcaccggtttcgaaaatcatggcggctggaccgaactcggttccgacgccaaaccgcttgctgccgtagagagtggctggggcaatggcaaccgtcgtgacgaaggggctgtgcagggtcgggtcatcggcacatatccccacggaccagtactggtacgcaacccgcagctagccgaccacgtgcttgaaatggctctaggaagccgtttagaacccctcgatataccggagataacggcgctgcgacagcgtcggattgaggctgtgcgcaccgatcggtcatga

SEQ ID NO: 58782 - protein, 242 aa, Propionibacterium acnes KPA171202
MNIDRPKIVLLYQSLLGIYGDHGNAVVLTKRLQWRGIDAELLIVEPGQPVPTDGAVYLLGGGEDTAQITAVQELEADGGLFTALDDGAMLFAVCAGYQICGKSFTIGARDEAIKGLGLLDAETRRGPERAVGEVLHIWTQPDGNTYPITGFENHGGWTELGSDAKPLAAVESGWGNGNRRDEGAVQGRVIGTYPHGPVLVRNPQLADHVLEMALGSRLEPLDIPEITALRQRRIEAVRTDRS

SEQ ID NO: 58783 - DNA, 792 bp, Streptococcus pyogenes MGAS10394
  CDS (1)..(792): transl_table=11
atgacatacacttcactaaaatctcccgaaaatcaagactacatctacgacctcaatatcgcccatctctatggtaatcttatgaatacttatggtgataacggcaatattttaatgctcaagtatgtcgctgaaaaacttggagctagggttactgttgatattgtatctatcaatgatacctttgaacaagacgattacgatattgttttctttggtggtggtcaagattatgaacaaagcattgttgccaaggatttgcctagcaaaaaagctgccttagcggattacattgctaataataaagtggcgcttgccatctgtggtggcttccaattactagggcaatactatgtccaagctaatggggttaaaattgatggacttggaattatgggacactacacccttaatcagcaccaaaatcgctttattggagatattaaaattcataatgacgaatttaacgaaacctattatggctttgaaaatcatcaaggacgtaccttcttatctggtgacgaaaagccacttggacgagtggtttatggcaacggtaataataaagaagaccaaactgaaggtgttcactataaaaacgtctatggtagttatttccacggtcctatcttatcacgcaatgttaatcttgcttaccgcttagtaacaacagctcttaaaaaaaagtatggatcagctatttcactacctagctatgatgatatactgaaacaagaaatcactgaagaatatgccgaccttaaaagcaaagcttcctttaataaagtttaa

SEQ ID NO: 58784 - protein, 263 aa, Streptococcus pyogenes MGAS10394
MTYTSLKSPENQDYIYDLNIAHLYGNLMNTYGDNGNILMLKYVAEKLGARVTVDIVSINDTFEQDDYDIVFFGGGQDYEQSIVAKDLPSKKAALADYIANNKVALAICGGFQLLGQYYVQANGVKIDGLGIMGHYTLNQHQNRFIGDIKIHNDEFNETYYGFENHQGRTFLSGDEKPLGRVVYGNGNNKEDQTEGVHYKNVYGSYFHGPILSRNVNLAYRLVTTALKKKYGSAISLPSYDDILKQEITEEYADLKSKASFNKV

SEQ ID NO: 58785 - DNA, 717 bp, Leifsonia xyli subsp. xyli str. CTCB07
  CDS (1)..(717): transl_table=11
gtgagccttctgcgcatcctgcacctgtatccgcgcgaactcggcatcaacggggacgcgggcaatgtacacgccctggcggagcgcgcccggtggcgtggtgtcgacgccgaggtggtgggccatgcccccggcggcgagctgccgggaagcgtggacctcatccacatcggctcgggtccgctgtcgtctcagcgcgccgtgcatgaggacgtcctgcgcatcgcgccgcggctgcggcagtggcgtgatgccggggtccccatcctggcgatcgccggtggctggcagctgctcggccgcgagctggtcacgccggacggcgaggtcctcgccggtgcggaggtgttcccgacgcgcgccgtgctgagttcgcaacggcacgttgcagaggtcctcgtgcgcacgaacgcaagcggcacgctggccggtttcgagaaccattccgcggcgacgaccttggagggcggcgagccgctcggcgggatcgtcggatgcgtgggcaatggcgacggcgccgagggtgtcgtgttcggcgcggcgatgggcacgcacctgcacggtccggtgctgccgatgaacccggtgctggccgatcggatgctggcgacggctctgcacgccgagctgcccccggtcgcggagaccgagcgcgtcgaccgctacgccgccaatgcccgccgggccatcgcggaccggctgggggcagcgctctag

SEQ ID NO: 58786 - protein, 238 aa, Leifsonia xyli subsp. xyli str. CTCB07
MSLLRILHLYPRELGINGDAGNVHALAERARWRGVDAEVVGHAPGGELPGSVDLIHIGSGPLSSQRAVHEDVLRIAPRLRQWRDAGVPILAIAGGWQLLGRELVTPDGEVLAGAEVFPTRAVLSSQRHVAEVLVRTNASGTLAGFENHSAATTLEGGEPLGGIVGCVGNGDGAEGVVFGAAMGTHLHGPVLPMNPVLADRMLATALHAELPPVAETERVDRYAANARRAIADRLGAAL

SEQ ID NO: 58787 - DNA, 744 bp, Symbiobacterium thermophilum IAM 14863
  CDS (1)..(744): transl_table=11
gtggagcgcccccgcattcacatcggctggctctacccggagtatatgaacctgtacggcgaccgcggcaacatcatcgtgctcacccagcgctcccggtggcacggcctggaccccgtggtcaccccggtgcgcatgggcgagtcggccgacttcgcccggttcgacctgctgctgatcggcggcggccaggaccgggagcagtcgctcatcgccgaggacttcgtgcaggtgaaggtcccttcgctggccgacgccatcgaggacgggctcgccgtgctggcggtctgcggcggctaccagatgctgggcaagtacttcaagacccacacgggcgagctgatccgcttcagcggcatcctcgacctgtggaccgaggcgggccgggagcgcatgatcggcaactgcgtcatcgagagcgacctgttcggcggcacccggaccatcgtggggttcgagaaccactccggccgcaccttcctgggcaaggggctgcggccgctggggcgggtggtgaagggttacggcaacaacggctccgatcgcacggaaggggtcgtctacaagaacaccgtgggcacctacctgcacggctccatcctgcccaagaacccgcacctggccgactggctgatccagcgggcgctggaccggcgctacggcggccaggtgaagatcggcgccctcaacgacgacctggagatgcgggcccacgaggcgatcatcgcccgctttggaaagtga

SEQ ID NO: 58788 - protein, 247 aa, Symbiobacterium thermophilum IAM 14863
MERPRIHIGWLYPEYMNLYGDRGNIIVLTQRSRWHGLDPVVTPVRMGESADFARFDLLLIGGGQDREQSLIAEDFVQVKVPSLADAIEDGLAVLAVCGGYQMLGKYFKTHTGELIRFSGILDLWTEAGRERMIGNCVIESDLFGGTRTIVGFENHSGRTFLGKGLRPLGRVVKGYGNNGSDRTEGVVYKNTVGTYLHGSILPKNPHLADWLIQRALDRRYGGQVKIGALNDDLEMRAHEAIIARFGK

SEQ ID NO: 58789 - DNA, 819 bp, Anabaena variabilis ATCC 29413
  CDS (1)..(819): transl_table=11
atgaccctagaattaactatcggttggctatatcctacattgatgagtacctatggcgatcgcggtaatgtgattactatcgaacgtcgcgcccaatggcggggatatacggtgaaagtattacctttagaccaaaactccacagcagaagatattaagtctgtagatgtgatagttggtggtggcgcacaagacagacaacaagaaatcgtcatgcgcgatttgcaaggtgcgaaagctgacgcgatgcgtgagaaaatcgaaaatggcacaccaggagtttttacctgtggttcaccccagttattaggacactattacgaaccaggcttaggacaacgtattgaaggtttaggaatacttgatttagtttctattcatcctggtgaaaataccaagcgttgtatcggtaacttggtaattgaagttacggccagtcgtctagcaaaagatttagaggaaatgacaggaagcaaagcctatttagtgggttttgaaaatcacggtggacgcactaagttagggaaggtggaagctttaggaaaagtggtatatggcttaggcaataatggtgaagatggtacagaaggagcattttatcaaaatgccatagcaacctattcccacgggccattattacccaaaaacccctttgtggctgattggttgattcaaacagcattgcggttaaagtatcaacaaccaattactttacaacctttagatgatagtttggctgtacaagcacgggaagcaatgtttaaaaagttgcaagttaacccaccaaaactatctgcggtagctaaagtttctggttag

SEQ ID NO: 58790 - protein, 272 aa, Anabaena variabilis ATCC 29413
MTLELTIGWLYPTLMSTYGDRGNVITIERRAQWRGYTVKVLPLDQNSTAEDIKSVDVIVGGGAQDRQQEIVMRDLQGAKADAMREKIENGTPGVFTCGSPQLLGHYYEPGLGQRIEGLGILDLVSIHPGENTKRCIGNLVIEVTASRLAKDLEEMTGSKAYLVGFENHGGRTKLGKVEALGKVVYGLGNNGEDGTEGAFYQNAIATYSHGPLLPKNPFVADWLIQTALRLKYQQPITLQPLDDSLAVQAREAMFKKLQVNPPKLSAVAKVSG

SEQ ID NO: 58791 - DNA, 777 bp, Carboxydothermus hydrogenoformans Z-2901
  CDS (1)..(777): transl_table=11
atgtctgagttgacaattggtcatttttatcctgacctgttaaatacctatggagatatgggaaatatcattgctttaaaaaggcgttcagaatggcgtggaattaaggttacggttaaacctattggacttggtgatgagtttagaagcgaggagtatgacttagtgtttttgggtggtggacaggattttgaacaggagattattcaggaagattttcttgaaaataaaggtaaagagttaagaaaggctatcgaaaacaacctggtggttttagcagtatgtggcggttatcaacttctgggaaaattctatcgtactgctaatggtaaagaaattgcaggcctgggggctttagatgtgtggacgatagccgggaggaaaagaatggtcggcaatattttaattgaaagtgaactattagaaaaggtcggctatgatggtaagattgttggttttgaaaaccactcgggaaaaacttatttggggcctgaagtaaaacctttgggccgggttatccatggttatggcaataacggggaagataattttgaaggagcagtatacaaaaatgtcataggaacctatcttcacggcagtgttttacctaaaaaccctggattggctgattatctgctcacattagccttaaagaaaaaatatccagggtttttaggattacaaaaattaaacgatgattatgaaaccatggtaagacgcaaacttatcagtcggttaagtggtaagaaacactggttactaaaacgttttttctaa

SEQ ID NO: 58792 - protein, 258 aa, Carboxydothermus hydrogenoformans Z-2901
MSELTIGHFYPDLLNTYGDMGNIIALKRRSEWRGIKVTVKPIGLGDEFRSEEYDLVFLGGGQDFEQEIIQEDFLENKGKELRKAIENNLVVLAVCGGYQLLGKFYRTANGKEIAGLGALDVWTIAGRKRMVGNILIESELLEKVGYDGKIVGFENHSGKTYLGPEVKPLGRVIHGYGNNGEDNFEGAVYKNVIGTYLHGSVLPKNPGLADYLLTLALKKKYPGFLGLQKLNDDYETMVRRKLISRLSGKKHWLLKRFF

SEQ ID NO: 58793 - DNA, 741 bp, Moorella thermoacetica ATCC 39073
  CDS (1)..(741): transl_table=11
gtgaagttacacctgggacatctctacccggagtttcttaacctctacggagaccggggcaatgtcttgatcctctgccgccgcgcccagtggcggggcatacaggtagaagtaacccccatctcccttggtgataagctggtaccaggagcttatgatctccttttcctcggcggcggccccgaccaggagcaggggatcgccagtgccgatttagtcgccaagggtccctggctaaaggaagcagtggaggaaggtaccgccctgctggccatttgcggcggctaccagctcctgggggagtactaccgcaccgcctccggggagaccctaccgggggtgggtctttttgccgtttacaccgaggcgggaaacaaacgactcaagggtaacatcgctatccaaatgccggaactcggtagcgagcacccggtaatcggcttcgaaaatcatagcggccgtactttccttaagggatcccggcccctggggcaagtcatctacggtgacggtaacaacggtgccgatggaaccgagggggccaggtacaggaatgctatcggcacctacctccacggccctttattgagtaaaaacccccacctggccgactacctcctcaggctggccttgcgacgccgttacggcgaggtggagttatcacctctggatgataccttagagatggcaaccaacacagccgtgtacaagcgcttcctgccgaccaggggtaaatggtaa

SEQ ID NO: 58794 - protein, 246 aa, Moorella thermoacetica ATCC 39073
MKLHLGHLYPEFLNLYGDRGNVLILCRRAQWRGIQVEVTPISLGDKLVPGAYDLLFLGGGPDQEQGIASADLVAKGPWLKEAVEEGTALLAICGGYQLLGEYYRTASGETLPGVGLFAVYTEAGNKRLKGNIAIQMPELGSEHPVIGFENHSGRTFLKGSRPLGQVIYGDGNNGADGTEGARYRNAIGTYLHGPLLSKNPHLADYLLRLALRRRYGEVELSPLDDTLEMATNTAVYKRFLPTRGKW

SEQ ID NO: 58795 - DNA, 744 bp, Frankia sp. CcI3
  CDS (1)..(744): transl_table=11
atgacgggcggctctgcgaccaggatcgcgctgatctaccccgagctgcttggtacctacggcgacggcggtaacgcgatcgtgctgtcccagcgcctgcgctggcgtggtttgccggtcgaggtggtgaacgttcccgcggggtcggcggtgcccgagagctgtgatatctacctgctcggcggcggcgaggacgcaccgcaggtcctcgccgcggacggcatccggcagaaccgggcgatccggcgagcggtgagctcgggagcggcggtgctcgccgtgtgcgccggctaccaggtgatcggcgcgaccttcccatccggtggggagatccacgaggggctgaatctcgtcgacgtggagacccgtcgctccttcggcccgtcggacgcgccgccggcgcgtgcggtcggggacatcgtggtggaaccggacgcacggctcggcctgcccaccctgtacgggtatgagaatcacgccgggcggacgaggcggttgcccggcgcgagcggcatcccgctcggtacggtccggctcgggatcggtgacggtgacggcggaacggacggcatcgtggatggccgggtcatcggcacctacctgcacgggccggtgctcgcgcagaatcccgccctcgccgatctcctgctgagctgggtccatggtccgctgccgccgttggacgcgccccgcgaggtggaggtgctgcgccaggcccggcgccgcgcgttggccgtcacctga

SEQ ID NO: 58796 - protein, 247 aa, Frankia sp. CcI3
MTGGSATRIALIYPELLGTYGDGGNAIVLSQRLRWRGLPVEVVNVPAGSAVPESCDIYLLGGGEDAPQVLAADGIRQNRAIRRAVSSGAAVLAVCAGYQVIGATFPSGGEIHEGLNLVDVETRRSFGPSDAPPARAVGDIVVEPDARLGLPTLYGYENHAGRTRRLPGASGIPLGTVRLGIGDGDGGTDGIVDGRVIGTYLHGPVLAQNPALADLLLSWVHGPLPPLDAPREVEVLRQARRRALAVT

SEQ ID NO: 58797 - DNA, 765 bp, Desulfitobacterium hafniense Y51
  CDS (1)..(765): transl_table=11
ttgaaaatcaaactcggccatctctatccggatttgttggatctctatggggatcgaggaaatattctggtcttggcagcacgaacccgttggcgtgggttagattttgaggtgcaaaatgtttctttaggggagcagattgattttcatgctttggatatcttgtttctcgggggaggatcggatcgggaacaaaacatactcgtggctgacctgatgggacgggttgaggaattaaaggcagccattgaagatggactggtggtattatccatctgcggtggttatcagcttctgggtcaatactatcagaccgctgaggggcagaggattcccggtttggggattctggatctctggaccgtggccggtgccaaccgcttgatcggcaatgtggtggtgaatttagagcttgaagagctggcagaggtgaattccggttccctgtctactttggtgggattcgaaaatcattcggggagaacttatcttggccctggactagaacccctgggcaaggtcatccatggtcatgggaataatggcgaggatcaaggagagggcatgcgctataaaaatgtctttggaacctatctgcatggccccctgctgcctaagaatcctcattttgctgatgtgttgctgaaattagccatggaaagaagaggagaagccgggaacttaactcttttagatgatcaattggaaagacttgcccatgaaagcgtagtggaacgaattcttgccaagcagaagaaaatttag

SEQ ID NO: 58798 - protein, 254 aa, Desulfitobacterium hafniense Y51
MKIKLGHLYPDLLDLYGDRGNILVLAARTRWRGLDFEVQNVSLGEQIDFHALDILFLGGGSDREQNILVADLMGRVEELKAAIEDGLVVLSICGGYQLLGQYYQTAEGQRIPGLGILDLWTVAGANRLIGNVVVNLELEELAEVNSGSLSTLVGFENHSGRTYLGPGLEPLGKVIHGHGNNGEDQGEGMRYKNVFGTYLHGPLLPKNPHFADVLLKLAMERRGEAGNLTLLDDQLERLAHESVVERILAKQKKI

SEQ ID NO: 58799 - DNA, 750 bp, Rubrobacter xylanophilus DSM 9941
  CDS (1)..(750): transl_table=11
ttgaagctcaccgtccaccacctctacgccgacatgatgaacctctacggggaccgggggaacgtgctctccataaagaagcgctgcgagtggcgcggcatccccgtggaggtggtggacgtgggggtgggggagcccgtccgcccgaccggctgcgacatcttcctcttcggcggcgggcaggacagggagcaggcgctcctggccggggatctggccgggaagaagggcgccgagctgcgggccatcgtggaggacggcggggtggtgctgggggtgtgcggcggctaccagctcatgggccactactacgagaccccggagggcgagaggctgccgggcgtggggatcttcgacctgtacaccgagccgcgcaagcccggcgaggggcgcctgatcggcaacgtcctcgtgcgggtggagctcggcggcgaggcccgcgagctcgtcggcttcgagaaccacggcgggcgcacccgcctgggggacgtggagccgctggggaccgtcctctacgggcacggcaacaacggcgaggacggcaccgagggcgcccgccgcctcaacgcctacggcacctacctgcacggctcgctgctgcccaagaacccctggttcaccgaccacctcatcctgagcgccctccgcagggtggacggctccttcgagctcgagcccctcgacgacgcgctcgagctcagggccttcgaggcgatggccgaccgcctccgcggcgggggggcctcctag

SEQ ID NO: 58800 - protein, 249 aa, Rubrobacter xylanophilus DSM 9941
MKLTVHHLYADMMNLYGDRGNVLSIKKRCEWRGIPVEVVDVGVGEPVRPTGCDIFLFGGGQDREQALLAGDLAGKKGAELRAIVEDGGVVLGVCGGYQLMGHYYETPEGERLPGVGIFDLYTEPRKPGEGRLIGNVLVRVELGGEARELVGFENHGGRTRLGDVEPLGTVLYGHGNNGEDGTEGARRLNAYGTYLHGSLLPKNPWFTDHLILSALRRVDGSFELEPLDDALELRAFEAMADRLRGGGAS

SEQ ID NO: 58801 - DNA, 711 bp, Rhodococcus sp. RHA1
  CDS (1)..(711): transl_table=11
atgcctgactcgaccgtacgcatcggcctggtgctccccgacgtgatgggcacctacggcgacggcggaaacgccctgatcctccggcagcgactgcgcatgcgcggatacgacgcggagatcgtcgagatcactctgaacgacccggtcccggaatccctcgacgtgtacacgctcggcggggccgaggactcggcgcagcgcctcgccacccggcacctcgccaagtaccccggactgcagaaggccgccgaacgcggcgcccccgtcctggcgatctgcgccgcgatccaggtgctcggcaactggtacgagacgtcgagcggcgaacgcgtcgacggtgtctcgatgctcgacgtcaccacgtccccgcaggcgacccgttccatcggtgaagtgatcacgacaccacggatggatgggttgacgcagccgctcacggggttcgaaaaccaccgcggcggtaccacactcggcgccgacgcccgcggtctcgcccaggtcacgcacggcgtcggcaacggcgtcggggacggactcgaaggcgtcgtccagggttccgtgatcggcacgtacatgcacggacccgcgctcgcccgcaacccggaactcgccgacctgctcctgaagcgggcgctgggcgtcgacgaactcgcgccgctcgacctgccggaggtcgcgcagctgcgccgggagcgcctgcgcgtctag

SEQ ID NO: 58802 - protein, 236 aa, Rhodococcus sp. RHA1
MPDSTVRIGLVLPDVMGTYGDGGNALILRQRLRMRGYDAEIVEITLNDPVPESLDVYTLGGAEDSAQRLATRHLAKYPGLQKAAERGAPVLAICAAIQVLGNWYETSSGERVDGVSMLDVTTSPQATRSIGEVITTPRMDGLTQPLTGFENHRGGTTLGADARGLAQVTHGVGNGVGDGLEGVVQGSVIGTYMHGPALARNPELADLLLKRALGVDELAPLDLPEVAQLRRERLRV

SEQ ID NO: 58803 - DNA, 705 bp, Pediococcus pentosaceus ATCC 25745
  CDS (1)..(705): transl_table=11
atgaaatacaatctaaacgtggctcatctttatggtgacctattgaatacctatggtgacaacggtaatttactagctttaaaatattatgctaaaaaaatggatacagatttagatattgacattgttagtctcgatgatcaatttaatcctaaagactgggatatcgtctttttcggcggtggtcaagactatgaacaaaccatcgtttccaaggatattcaacacaaaaaagaaggtctaactgattatattgaagatggcggtccactacttgccatctgcggtggttatcaacttctaggtcattactacgttggtgcgaatggtgagaaaattaaagggattgatgctttagatcactacaccttaagtcaagacgataatcgcttcattggcgatattgttatcaaaaatgctgaaactggagaaatttaccatggttttgaaaatcacaacgggaaaactttccttggtaagggagaacgtcctttaggagaagttcagtctggccatggtaacaacggtgaagatcaatcagaaggagtcatttataaaaacgtttatggctcttatttccatggtccaatcctaactcgtaatggtgaattagctaagcgtataattttaactgctcttagtcgtaaatatcctgatgctgatttaactcctcaaaaagaacttactattgaaccaactttctaa

SEQ ID NO: 58804 - protein, 234 aa, Pediococcus pentosaceus ATCC 25745
MKYNLNVAHLYGDLLNTYGDNGNLLALKYYAKKMDTDLDIDIVSLDDQFNPKDWDIVFFGGGQDYEQTIVSKDIQHKKEGLTDYIEDGGPLLAICGGYQLLGHYYVGANGEKIKGIDALDHYTLSQDDNRFIGDIVIKNAETGEIYHGFENHNGKTFLGKGERPLGEVQSGHGNNGEDQSEGVIYKNVYGSYFHGPILTRNGELAKRIILTALSRKYPDADLTPQKELTIEPTF

SEQ ID NO: 58805 - DNA, 735 bp, Oenococcus oeni PSU-1
  CDS (1)..(735): transl_table=11
atggaaaattatcaactgagaattgctcatctatatggggatttgatgaatacgtatggtgattacggaaatgtgattgcgattaaatattatgccaaacaaattcaggttgaaaccgattaccatttaatttcacttggggactcctttaaagccgacgattacgactttgttattttcggtggtggccaagattatgaggaatcggtgactgcaaaagacctgcccagcaaatcggatgaaataaaaaaatatatcgaaaataatgattctttgcttgctgtctgcggcggctttcagctgcttggaacaacaatggaatttgctaacggaaaaataattaacggaattggagcaatgagccatcatacagttaatttgaattcttccgaattgtttgataacatgcgcgggaaacgcttgattggcaatatccaaatcaaaaacaacgaaagcggcgaaacttatcacggctttgaaaatcatcagggaaggactttccttggcaaaggcgaaaaagctctgggaacggtcgtatccggcaatggcaataatggcgacgataaaaccgaaggcgttatctataaacaagtctatgggacttattttcacggtccaattttgacgcgcaacggtaatctagcaaaaagaattttaaaaaatgcgcttcttaaacgttatccggatatcgattggcaggcaaaactcgatggaattccgaccgagagtttttaa

SEQ ID NO: 58806 - protein, 244 aa, Oenococcus oeni PSU-1
MENYQLRIAHLYGDLMNTYGDYGNVIAIKYYAKQIQVETDYHLISLGDSFKADDYDFVIFGGGQDYEESVTAKDLPSKSDEIKKYIENNDSLLAVCGGFQLLGTTMEFANGKIINGIGAMSHHTVNLNSSELFDNMRGKRLIGNIQIKNNESGETYHGFENHQGRTFLGKGEKALGTVVSGNGNNGDDKTEGVIYKQVYGTYFHGPILTRNGNLAKRILKNALLKRYPDIDWQAKLDGIPTESF

SEQ ID NO: 58807 - DNA, 717 bp, Mycobacterium sp. KMS
  CDS (1)..(717): transl_table=11
atgcctgaatcgaccgtgcggatcgggctggtgctgcccgacgtgatgggcacctacggcgacggcggtaactcggtggtgttgcggcagcggttgcggttgcgcggtatcgacgccgaggtcgtcgagatcacgctcgcggatccggtgcccaccgaactcgacctctacaccctcggcggtgccgaggactacgcgcagcggctggcgaccaaacacctgcagcgctatccgggtctgcagcaggccgcctcgcgcggggccccggtgctggccatctgcgcggccattcaggtgctcggccactggtatgagacgtcctcgggagaacgcgtcgacggcgtcgggatgctcgatgtcacgacctcaccgcagccggtccgcacgatcggtgaagtggtgtcccagccgctggtcgccggcctgtccgagaaattgaccggcttcgaaaaccacaggggcggaactgttctgggcccggaggccgctccgctggcccgggtcgagaagggtgcgggcaaccgggacggggacgggttcgacggagcggtgcagggcagcgtcgtcgcgacgtacctgcacggcccgtgcctggcccgcaatccggagttggccgatcatctgctcagcaaggtcgtcggcgacctgccgccactggacctcgacgaggtggcgcagctgcggcgcgaacgcctggcggccccgcgccgcgcctag

SEQ ID NO: 58808 - protein, 238 aa, Mycobacterium sp. KMS
MPESTVRIGLVLPDVMGTYGDGGNSVVLRQRLRLRGIDAEVVEITLADPVPTELDLYTLGGAEDYAQRLATKHLQRYPGLQQAASRGAPVLAICAAIQVLGHWYETSSGERVDGVGMLDVTTSPQPVRTIGEVVSQPLVAGLSEKLTGFENHRGGTVLGPEAAPLARVEKGAGNRDGDGFDGAVQGSVVATYLHGPCLARNPELADHLLSKVVGDLPPLDLDEVAQLRRERLAAPRRA

SEQ ID NO: 58809 - DNA, 819 bp, Nostoc punctiforme PCC 73102
  CDS (1)..(819): transl_table=11
atgagttctcaaaatttagaattaacaataggttggttgtacccgacgctgatgagtacttatggcgatcgcggtaatgtaattactatagaacgtcgcgctcaatggcggggatatgatgttaaagtgttacccctagatcaaaatgccacagccgcagatattaaaactgtagatgtcatcgttggtggtggcgcacaagatcgtcagcaagaaattgtcatgcgtgatttgcaaggtgcaaaagctgatgcgatgcgtgagaaaatcgaaaatggtacaccaggagtatttacttgtggttccccccaattactgggacattattatgaaccaggcttaggacaacggattgatggtttaggaatactcgatttagtttccgtgcatcctggtgaaaatactaagcgctgtattgggaacttggtaattgaagtgacagcttcacgcctagcgcaagatttgcgagagatgacgggtactacaccatatttggtaggctttgaaaatcacggtggacgtaccaaactgggaaaagtggaagctttggggcgcgtggtgtacggtttgggaaataatggtgaagatggcacagaaggagcattttatcagaatgcgatcgctacttattcccacggcccattgttaccgaaaaatccttttgtcgccgattggttaattcaaacagcgctgcggctaaagtatcagcaagaaattaccttaaaaccttttgacgacagccttgctgcacaagcaagagaagcgatgtttaagcgattgaaagtcaatttaccaggtgctgcggcggcaaaagtttaa

SEQ ID NO: 58810 - protein, 272 aa, Nostoc punctiforme PCC 73102
MSSQNLELTIGWLYPTLMSTYGDRGNVITIERRAQWRGYDVKVLPLDQNATAADIKTVDVIVGGGAQDRQQEIVMRDLQGAKADAMREKIENGTPGVFTCGSPQLLGHYYEPGLGQRIDGLGILDLVSVHPGENTKRCIGNLVIEVTASRLAQDLREMTGTTPYLVGFENHGGRTKLGKVEALGRVVYGLGNNGEDGTEGAFYQNAIATYSHGPLLPKNPFVADWLIQTALRLKYQQEITLKPFDDSLAAQAREAMFKRLKVNLPGAAAAKV

SEQ ID NO: 58811 - DNA, 792 bp, Crocosphaera watsonii WH 8501
  CDS (1)..(792): transl_table=11
atgtctgaacccccttctttaaccatcggttggctttaccctaacttaatgagtacctacggcgatcgcggtaacgttatctgcatacaacgccgttgtcaatggcgggatattcctgtaactattcttcctttggatcagcaaacagaaccagatttatttaagagtgtcgatgtcattgttggtggtggggcccaagatcgtcaacaagaaatcgttatgcgagacttacaaggggcaaaggctgatatcctacgcaataagttagacggaggaacccccggagtgtttacctgtggatcacctcaacttttaggccattattacgaaccggccttaggccagcgcatcgaggggttaggattattagatttagttaccaaacatccagggccgaatgtttctcgttgtattggtaatgtggtgtttgaaattactgcttctcccctagcagaagatttacaacaaatgttaggtcaagcaccgattattataggctttgaaaatcatgggggacgaacttatttaggagatgtacaacccttgggcaaggttaagtcaggatacggcaataatggggaagacggttacgaaggggctttttatcgtcatgcgatcgctacctattcccacggacccttattacccaaaaatccttttgttgctgactggttaattaaaaccgcattacaagaaaaatatcaaagggaaatccagttaacgcccctcgatgatagtttagcccaacaagcaagggcagctatgttaaaacgtctagaaactgtggcctaa

SEQ ID NO: 58812 - protein, 263 aa, Crocosphaera watsonii WH 8501
MSEPPSLTIGWLYPNLMSTYGDRGNVICIQRRCQWRDIPVTILPLDQQTEPDLFKSVDVIVGGGAQDRQQEIVMRDLQGAKADILRNKLDGGTPGVFTCGSPQLLGHYYEPALGQRIEGLGLLDLVTKHPGPNVSRCIGNVVFEITASPLAEDLQQMLGQAPIIIGFENHGGRTYLGDVQPLGKVKSGYGNNGEDGYEGAFYRHAIATYSHGPLLPKNPFVADWLIKTALQEKYQREIQLTPLDDSLAQQARAAMLKRLETVA

SEQ ID NO: 58813 - DNA, 759 bp, Heliobacillus mobilis
  CDS (1)..(759): transl_table=11
atgagtaaaacatcgaaccgcaccttgaccctcattcacctctacccagacctgctcaatctctacggcgaccgcggaaatatcatcaccctccgtcgccgctgtgaatggcgcggtatcaccttacaggtccactccgcttccttaggtgaaaaagcggcctttgacgatgccgatctggtcttcatgggcggtggttcagaccgggaacagaccttgctctttcaagactttcaacagcataaaggcccggccctcgtagaagctgccgaaggtggtctccccctcttatccgtctgcggaggttaccaactgctcggcctttactaccgcacccacaccggtgaagaaatgcccggcctcggcctttttgacgcctggaccgaagccggttccacacgtctcatcggcaacgtggtcgcccaagcccctttgctcggcgagcaggccacactggtcggtttcgagaaccactcgggccgcactttcctcggttcccgtggcggtatccagccgctcgcccaggtcaccgccggtttcggcaataacggcgatgatcaaggggaaggcgccgtctacaaaaacgctgtgggcacatacctgcacggccccgtgctgcccaaaaaccccgctttagcagactggctgctcagcaaagccttagaacgccggtacggcggtggaagcttgagcacccttcaggatacttgggaaaatcgggctcatctttcggtagctcagaggtttggtaaaaaatag

SEQ ID NO: 58814 - protein, 252 aa, Heliobacillus mobilis
MSKTSNRTLTLIHLYPDLLNLYGDRGNIITLRRRCEWRGITLQVHSASLGEKAAFDDADLVFMGGGSDREQTLLFQDFQQHKGPALVEAAEGGLPLLSVCGGYQLLGLYYRTHTGEEMPGLGLFDAWTEAGSTRLIGNVVAQAPLLGEQATLVGFENHSGRTFLGSRGGIQPLAQVTAGFGNNGDDQGEGAVYKNAVGTYLHGPVLPKNPALADWLLSKALERRYGGGSLSTLQDTWENRAHLSVAQRFGKK

SEQ ID NO: 58815 - DNA, 20 bp, Artificial sequence
  primer
atggaattaacaatcggctg

SEQ ID NO: 58816 - DNA, 22 bp, Artificial sequence
  primer
ttattctagccgtttgagcatg

SEQ ID NO: 58817 - protein, 241 aa, Artificial sequence
  consensus sequence
  Variant (2)..(7): Xaa in position 2 to 7 is any amino acid
  Variant (11)..(11): Xaa in position 11 is any amino acid
  Variant (14)..(19): Xaa in position 14 to 19 is any amino acid
  Variant (21)..(43): Xaa in position 21 to 43 is any amino acid
  Variant (44)..(45): Xaa in position 44 to 45 is any or no amino acid
  Variant (47)..(50): Xaa in position 47 to 50 is any amino acid
  Variant (53)..(54): Xaa in position 53 to 54 is any amino acid
  Variant (56)..(57): Xaa in position 56 to 57 is any amino acid
  Variant (59)..(70): Xaa in position 59 to 70 is any amino acid
  Variant (71)..(72): Xaa in position 71 to 72 is any or no amino acid
  Variant (74)..(79): Xaa in position 74 to 79 is any amino acid
  Variant (81)..(86): Xaa in position 81 to 86 is any amino acid
  Variant (88)..(90): Xaa in position 88 to 90 is any amino acid
  Variant (92)..(92): Xaa in position 92 is any amino acid
  Variant (95)..(100): Xaa in position 95 to 100 is any amino acid
  Variant (101)..(102): Xaa in position 101 to 102 is any or no amino acid
  Variant (104)..(107): Xaa in position 104 to 107 is any amino acid
  Variant (109)..(109): Xaa in position 109 is any amino acid
  Variant (111)..(112): Xaa in position 111 to 112 is any amino acid
  Variant (114)..(124): Xaa in position 114 to 124 is any amino acid
  Variant (125)..(134): Xaa in position 125 to 134 is any or no amino acid
  Variant (136)..(148): Xaa in position 136 to 148 is any amino acid
  Variant (149)..(161): Xaa in position 149 to 161 is any or no amino acid
  Variant (167)..(167): Xaa in position 167 is any amino acid
  Variant (169)..(169): Xaa in position 169 is any amino acid
  Variant (171)..(171): Xaa in position 171 is any amino acid
  Variant (173)..(176): Xaa in position 173 to 176 is any amino acid
  Variant (177)..(180): Xaa in position 177 to 180 is any or no amino acid
  Variant (183)..(183): Xaa in position 183 is any amino acid
  Variant (185)..(186): Xaa in position 185 to 186 is any amino acid
  Variant (187)..(187): Xaa in position 187 is any or no amino acid
  Variant (189)..(189): Xaa in position 189 is any amino acid
  Variant (192)..(193): Xaa in position 192 to 193 is any amino acid
  Variant (194)..(206): Xaa in position 194 to 206 is any or no amino acid
  Variant (208)..(209): Xaa in position 208 to 209 is any amino acid
  Variant (212)..(219): Xaa in position 212 to 219 is any amino acid
  Variant (222)..(222): Xaa in position 222 is any amino acid
  Variant (226)..(226): Xaa in position 226 is any amino acid
  Variant (228)..(229): Xaa in position 228 to 229 is any amino acid
  Variant (231)..(233): Xaa in position 231 to 233 is any amino acid
  Variant (236)..(240): Xaa in position 236 to 240 is any amino acid
YXXXXXXYGDXGNXXXXXXRXXXXXXXXXXXXXXXXXXXXXXXXXDXXXXGGXXDXXQXXXXXXXXXXXXXXLXXXXXXGXXXXXXCXXXQXLGXXXXXXXXGXXXXGXGXXDXXXXXXXXXXXXXXXXXXXXXGXXXXXXXXXXXXXXXXXXXXXXXXXXGFENHXGXTXLXXXXXXXXLGXVXXXGXGNXXXXXXXXXXXXXXXDXXEGXXXXXXXXTYXHGPXLXXNXXXADXXXXXA

SEQ ID NO: 58818 - protein, 18 aa, Artificial sequence
  protein pattern
  Variant (2)..(2): Xaa in position 2 is any amino acid
  Variant (5)..(5): Xaa in position 5 is Pro or Ser
  Variant (6)..(6): Xaa in position 6 is any amino acid
  Variant (8)..(9): Xaa in position 8 to 9 is any amino acid
  Variant (11)..(12): Xaa in position 11 to 12 is any amino acid
  Variant (13)..(13): Xaa in position 13 is Phe, Ile, Leu, Met or Val
  Variant (15)..(16): Xaa in position 15 to 16 is any amino acid
  Variant (17)..(17): Xaa in position 17 is any or no amino acid
YXHGXXLXXNXXXAXXXL

SEQ ID NO: 58819 - protein, 17 aa, Artificial sequence
  protein pattern
  Variant (2)..(4): Xaa in position 2 to 4 is any amino acid
  Variant (5)..(5): Xaa in position 5 is Leu or Met
  Variant (6)..(6): Xaa in position 6 is Asp, Gly, Asn or Ser
  Variant (7)..(8): Xaa in position 7 to 8 is any amino acid
  Variant (11)..(11): Xaa in position 11 is any amino acid
  Variant (14)..(14): Xaa in position 14 is Ala, Ile, Leu or Val
  Variant (15)..(16): Xaa in position 15 to 16 is any amino acid
  Variant (17)..(17): Xaa in position 17 is Ile, Leu, Met or Val
YXXXXXXXGDXGNXXXX

SEQ ID NO: 58820 - protein, 11 aa, Artificial sequence
  protein pattern
  Variant (6)..(6): Xaa in position 6 is any amino acid
  Variant (8)..(8): Xaa in position 8 is any amino acid
  Variant (10)..(10): Xaa in position 10 is any amino acid
GFENHXGXTXL

SEQ ID NO: 58821 - protein, 16 aa, Artificial sequence
  protein pattern
  Variant (2)..(2): Xaa in position 2 is Ile, Leu or Val
  Variant (3)..(5): Xaa in position 3 to 5 is any amino acid
  Variant (8)..(8): Xaa in position 8 is Ala or Gly
  Variant (9)..(9): Xaa in position 9 is Glu, Gln or Ser
  Variant (11)..(12): Xaa in position 11 to 12 is any amino acid
  Variant (14)..(14): Xaa in position 14 is any amino acid
  Variant (15)..(15): Xaa in position 15 is Ile or Leu
  Variant (16)..(16): Xaa in position 16 is Ala, Ile, Leu or Val
DXXXXGGXXDXXQXXX

SEQ ID NO: 58822 - protein, 14 aa, Artificial sequence
  protein pattern
  Variant (2)..(2): Xaa in position 2 is Ala or Gly
  Variant (3)..(3): Xaa in position 3 is any amino acid
  Variant (5)..(6): Xaa in position 5 to 6 is any amino acid
  Variant (8)..(8): Xaa in position 8 is any amino acid
  Variant (11)..(11): Xaa in position 11 is any amino acid
  Variant (12)..(13): Xaa in position 12 to 13 is any or no amino acid
LXXVXXGXGNXXXD

SEQ ID NO: 58823 - DNA, 993 bp, Synechocystis sp.
  CDS (1)..(993): transl_table=11
atggtcataatggaggcgaagtcaaattacccaaaaaccatgtcctttgctaatgccgatactcccccccaagtcgttgtgttgggggccggagcctggggctctagtcttgcctacgtgctgaataacaatgacattcctacccaagtttggtctcgccgatcgccgcagagcctagaatccatggtggctggagcggatgtaattgtctcggcggtttccattaagggggtaccatcggtggcggcccggttggaggccatggacctccagcggcggactattttggtgacggccactaagggtttagatccagaaaccatgactaccccttcccaaatttggcaagctgcccttccttcccagccgatcgccgttttgtcggggccgaatttatcgaaggaaattgaccagggtttaccggcggccacggtggtggccagtagcgaccaagccgcagcggaggaaattcaaaccatttttgccgcggataacttccgggtttacaccaacaatgatcccttgggtacggaattgggtggcaccctgaaaaacgtcatggcgatcgccgtgggagtatgcgaagggttggggctaggcaccaatgctaaatcagcgttaattaccagagctttaccagaaattaccagggtggggttacattttggggcccaaccggataccttttggggtttagccggactaggagatttattggccacctgctctagcatgctcagccgcaattatcgagtgggttatggtttatccaaaggtcagtccttagaagaaattttggccaacctggggggcaccgccgaaggggtcaacaccaccgacgtactaatcaaaattgccaatcgagaaaaaattgctgtgcccatcacccggcaggtttaccgtttgctccatggaaaaattacccctccccaggcagtggaagcattaatggaaagggaattgaaagcggaatttgaagattttgatctttaa

SEQ ID NO: 58824 - protein, 330 aa, Synechocystis sp.
MVIMEAKSNYPKTMSFANADTPPQVVVLGAGAWGSSLAYVLNNNDIPTQVWSRRSPQSLESMVAGADVIVSAVSIKGVPSVAARLEAMDLQRRTILVTATKGLDPETMTTPSQIWQAALPSQPIAVLSGPNLSKEIDQGLPAATVVASSDQAAAEEIQTIFAADNFRVYTNNDPLGTELGGTLKNVMAIAVGVCEGLGLGTNAKSALITRALPEITRVGLHFGAQPDTFWGLAGLGDLLATCSSMLSRNYRVGYGLSKGQSLEEILANLGGTAEGVNTTDVLIKIANREKIAVPITRQVYRLLHGKITPPQAVEALMERELKAEFEDFDL

SEQ ID NO: 58825 - DNA, 1056 bp, Mycobacterium leprae TN
  CDS (1)..(1056): transl_table=11
gtggagatggccggcatagtggtccgttcagagagtgctgtcgcggtgatgggcgctggtgcatggggcactgcactggccaaggtgcttatcgatgccggcggaccggaggccggagtcgtattgtgggctcggcgaccggatgtcgctgagcggatcaataccacccgatgtaaccgcgcctatctaccgggaacactgcttccgccaggtatccgcgctaccgccgatccagcagatgcgctgcgcggtgcgtcgacggtgctattgggggtgccggcgcagcggatgcgggccaacctcgagcggtggggtggtttggtggccgacggcgcgaccctggtgagtctggcaaaaggcatcgagctgggcacgctgatgcggatgagtcaggtcattgtctcggtaactggcgtggacccggcgcaggtcgcggtgctttcgggacccaacctggctagcgagattgctcaatgccagcccgcagccaccgtcatcgcgtgcagcgacttgggccgagccgtcgctttgcagcgcatgctaagcagtggctactttcggccgtacaccaacagcgatgtcgtcggcaccgagatcggcggggtatgcaagaacgtcatagcgctggcgtgcgggatggctgcgggtgtcgggttcggcgaaaacaccgcggcgacgatcattactcggggcctggcggagatcatccggctggggatggcgctaggcgcccaggttactacgttggccggtctggcgggggtaggtgatttggtggccacctgcacatcgccgcattcgcgtaaccggtcactcggcgaacgcttgggccggggcgagatcatgcagtcgatcttgcacggtatggatggttccgatggcggagacggctacgtcgtcgagggtgtgacgtcgtgcgcgtcggtactcgcgctagcgtccagttatgacgtcgagatgccgctaactgacgccgtccaccgagtttgtcacaagggactctcggtcgagaaggcgatggctctgctgttgggccgcagtactaagtctgagtaa

SEQ ID NO: 58826 - protein, 351 aa, Mycobacterium leprae TN
MEMAGIVVRSESAVAVMGAGAWGTALAKVLIDAGGPEAGVVLWARRPDVAERINTTRCNRAYLPGTLLPPGIRATADPADALRGASTVLLGVPAQRMRANLERWGGLVADGATLVSLAKGIELGTLMRMSQVIVSVTGVDPAQVAVLSGPNLASEIAQCQPAATVIACSDLGRAVALQRMLSSGYFRPYTNSDVVGTEIGGVCKNVIALACGMAAGVGFGENTAATIITRGLAEIIRLGMALGAQVTTLAGLAGVGDLVATCTSPHSRNRSLGERLGRGEIMQSILHGMDGSDGGDGYVVEGVTSCASVLALASSYDVEMPLTDAVHRVCHKGLSVEKAMALLLGRSTKSE

SEQ ID NO: 58827 - DNA, 1053 bp, Drosophila melanogaster
  CDS (1)..(1053)
atggcggataaagtaaatgtgtgcattgtgggctccggcaactggggttcggccatagcgaaaatcgtgggcgccaatgccgccgctctgccggagttcgaggagcgtgtgacgatgttcgtctacgaggagctcatcgatggcaagaagctgacggagattatcaacgagacgcacgagaacgtcaagtacctgaaaggacacaagctgcccccgaatgtggttgccgtgcccgacctggttgaggccgccaagaacgctgacatcctgatcttcgtggtgccccaccagttcattcccaacttctgcaaacagctactgggcaagattaagccaaatgccatcgctatctccctgatcaagggcttcgacaaggccgagggcggcggcatcgatctgatctcgcatataatcacgcgtcacctgaagatcccatgcgccgtgttgatgggcgcaaacctggccaacgaggtggctgagggcaacttctgcgaaacgacaatcggctgcacggacaagaagtatggcaaggtgctgcgcgatctcttccaggcgaaccacttccgcgtggtggtcgtggacgatgctgatgccgtggaggtttgcggtgccctcaagaacatcgtggcctgcggcgctggctttgttgatggcctcaagctgggcgacaacaccaaggcggctgtcatccggctgggcctcatggagatgattcgcttcgtggacgtcttctatcccggaagcaagctgtccaccttcttcgagagctgcggcgtggccgatctgatcacgacgtgttacggtggccgtaaccgccgcgtctctgaggcgtttgtgacttctggaaaaaccattgaggagctggagaaggaaatgctcaacggccagaagctgcagggcccacccactgccgaggaggtcaactacatgctgaagaacaagggtctggaggacaaattccccctgttcacggctattcacaaaatatgcacaaatcagctcaagcctaatgatttaattgattgcatacgcaatcaccctgagcatatgtaa

SEQ ID NO: 58828 - protein, 350 aa, Drosophila melanogaster
MADKVNVCIVGSGNWGSAIAKIVGANAAALPEFEERVTMFVYEELIDGKKLTEIINETHENVKYLKGHKLPPNVVAVPDLVEAAKNADILIFVVPHQFIPNFCKQLLGKIKPNAIAISLIKGFDKAEGGGIDLISHIITRHLKIPCAVLMGANLANEVAEGNFCETTIGCTDKKYGKVLRDLFQANHFRVVVVDDADAVEVCGALKNIVACGAGFVDGLKLGDNTKAAVIRLGLMEMIRFVDVFYPGSKLSTFFESCGVADLITTCYGGRNRRVSEAFVTSGKTIEELEKEMLNGQKLQGPPTAEEVNYMLKNKGLEDKFPLFTAIHKICTNQLKPNDLIDCIRNHPEHM

SEQ ID NO: 58829 - DNA, 1320 bp, Kluyveromyces lactis NRRL Y-1140
  CDS (1)..(1320)
atgattcctagtagttgtgttattggtagaagttttggttataatttgatacatcaaaacatatcaagcaagctcagaggtatattcaaacattatactaaaagttctactgctaatacaataaaaattacaaacacaaacacgatttccaacatgagtccagcttccgatagattaaagcaaacttcctcgattctttctaagtccgttgaacctcaagccgatgcacctttcaaggttacagttgtcggttctggtaactggggtactactatcgccaaggttgttgctgaaaactgtgctttgagacctaacctatttgtcaacagagttgatatgtgggttttcgaagaaaacattaacggtgaaaagttgactgaaatcatcaacactcgtcacgaaaacgtcaaatatttgccaggtattaagcttccaagtaatttggttgctaacccagacttggtcgatgctgctaaggacgctgatatccttgtctttaacattcctcatcaattcttgccaagaatctgttctcaactaaagggtaacgtgaagcctcaggctcgtgctatctcttgtttgaagggtttcgacgtcggtaaggatggtgttaagctattgtctacttatatcaaggaaactttgaatatcgaatgtggtgctctatccggtgctaacttggctccagaagtcgccaaggaaaattggtccgaaaccactgttgcataccaaatcccagaagattacaagggtccaggtaaggatgttgaccattctttgttgaaagccttgttccacagaccttacttccacgtcaacgtcattgaagatgttgctggtatttcggtcgcgggtgctttgaagaacgttatcgccttaggttgtggttacgttgaaggtttgggctggggtaacaacgccagtgctgccattcaaagagtcggtctctctgaaatgatcaaatttggtcgtactttcttcccagaatgtaaggtcgaaacttacttccaagaatctgccggtgttgctgatttgatcaccacttgtgccggtggtagaaacgtaagagttgcgaaacacatggccatcactggtaagtctgctgaagaagctgaaaaggagctattgaacggtcaatccgctcaaggtattatcacaactaaggaagtccacgaatggttggctacctgtggtaagactgctgagttcccattgttcgaagctatctaccaaatcacttacggtaatgcttctatggaacaaatcccagacatgatcgaagacttcgaaggtatcgactacaacgtcaagaagcattaa

SEQ ID NO: 58830 - protein, 439 aa, Kluyveromyces lactis NRRL Y-1140
MIPSSCVIGRSFGYNLIHQNISSKLRGIFKHYTKSSTANTIKITNTNTISNMSPASDRLKQTSSILSKSVEPQADAPFKVTVVGSGNWGTTIAKVVAENCALRPNLFVNRVDMWVFEENINGEKLTEIINTRHENVKYLPGIKLPSNLVANPDLVDAAKDADILVFNIPHQFLPRICSQLKGNVKPQARAISCLKGFDVGKDGVKLLSTYIKETLNIECGALSGANLAPEVAKENWSETTVAYQIPEDYKGPGKDVDHSLLKALFHRPYFHVNVIEDVAGISVAGALKNVIALGCGYVEGLGWGNNASAAIQRVGLSEMIKFGRTFFPECKVETYFQESAGVADLITTCAGGRNVRVAKHMAITGKSAEEAEKELLNGQSAQGIITTKEVHEWLATCGKTAEFPLFEAIYQITYGNASMEQIPDMIEDFEGIDYNVKKH

SEQ ID NO: 58831 - DNA, 1170 bp, Debaryomyces hansenii CBS767
  CDS (1)..(1170)
atgtcacaatatagagccaatcaaagattacaacagttatcgaatatattacgtcctaatcagcttagtgctgaaaaatcgttaaagccagaaactccattcaaggttgctgtgattggatccggtaactgggggactacaattgccaaggttttagccgaaaacacggccgaaaagccagacacttttgctaaacaggtcgatatgtgggttttccaagagaagattgatggtactaacttgactgagatcatcaacaataagcacgaaaatgtgaaatatttgccaggggttaagttgccagaaaacttgcatgcagagcctgatatcgttaaggctgcgcaaggtgccgatttattggtattcaacttgcctcatcaatttttacctaagatctgtaagcagttgaaaggtactttgaagccaaccaccagagcaatttcgtgtttgaaagggttagaagttactccagatgggtgcaaattgttatcaacttacattactgaaaacttaggaatcgaatgtggtgctttatctggtgctaacttggctccagaagttgctagatgcaaatggtctgaaactactgttgcatacaacattccagctgactttaaaggtccaggtaaagatattgatagtgctgttttaaaggaagcattccacagaccttactttcatgtaaatgttattgaagatgttgcaggtgtttctgtagctggtgcattgaagaacattgttgcgattgctgtgggctttgttgaaggattaggctggggtgacaatgctaaatcggctattatgagagttggtttaattgaaactatcaatttttcaaatatgtttttcccaaattctaagccaactacattcacccacgaatctgctggtgttgctgatttaatcaccacttgttccggtggtagaaatgttaaggtcggtagacatatgtcgaaaacaggcgaatctgctgaagaagcagaaaagaaattattgaatggccaatcctcgcaaggtatcatcactgcaaaggaagtccatgagttattaagcaatgttggtaagactgatcaattcccattatttgaagctacttatcaaattatatacggtgatgaatctattcaaaacttgccaaacttattagaagaccattcattattcaaatag

SEQ ID NO: 58832 - protein, 389 aa, Debaryomyces hansenii CBS767
MSQYRANQRLQQLSNILRPNQLSAEKSLKPETPFKVAVIGSGNWGTTIAKVLAENTAEKPDTFAKQVDMWVFQEKIDGTNLTEIINNKHENVKYLPGVKLPENLHAEPDIVKAAQGADLLVFNLPHQFLPKICKQLKGTLKPTTRAISCLKGLEVTPDGCKLLSTYITENLGIECGALSGANLAPEVARCKWSETTVAYNIPADFKGPGKDIDSAVLKEAFHRPYFHVNVIEDVAGVSVAGALKNIVAIAVGFVEGLGWGDNAKSAIMRVGLIETINFSNMFFPNSKPTTFTHESAGVADLITTCSGGRNVKVGRHMSKTGESAEEAEKKLLNGQSSQGIITAKEVHELLSNVGKTDQFPLFEATYQIIYGDESIQNLPNLLEDHSLFK

SEQ ID NO: 58833 - DNA, 1212 bp, Candida albicans SC5314
  CDS (1)..(1212): transl_table=12
atgtatactactgccaataaccgtttaactcaattgacacaaatcttactgccaatagtcaatgatgctgatagttcatttgctcaatatttattacaaaacccaacatttgctcctaatccagaatcatctttaaatcctgaaaaaccattcaaaattgctgttgttggatcaggtaattggggtactaccattgctaaaattgttgctgaaaatgctttagctagaccacatttatttagtcattatgttaatatgtgggtatttgaagaaaaaattaatggtgaaaatttgactcaaatcataaatcaacgccatgaaaatattaaatatttaccaggggttaaattacctaataatttaattgctcaaccagatattgttactgccgttaaaggtgccgatttaattattttcaatttacctcatcaatttttacctaagattttaaaacaattgaaaggtaatgtacctaaaactactagagccatttcttgtttgaaaggtttagaagttagtaaagatggttgtaaattattatcaacttatattaccgaagaattaggaatagtatgtggagctttactgggagccaatttagccccagaaattgctcgtggtaaatggtcagaaactactgtggcttataaattaccaaatgattatcgtggtgccggtaaagatattgataaattagtattaaaagcttgcttccatcgtccttatttccatgttaacgttattgaagatgttgctggtgtttctgtggcgggggctttgaaaaatattgttgccttagccgtggggtttgttgaaggtttaggttggggtgataatgctaaagcagccattatgagagttggattattagaaacaattaagttttctgaaacatttttcccacaatctcaagctgatacttttactgctgaatctgctggtgtagctgatttaattactacttgtgctggtggtagaaatgttaaagttggtagatatatggctgaaactggtgtttctgctgaagaagccgaaaagaaattattaaatggtcaaagttctcaaggtatagttactgctaaagaagttcatgaattattgacttatgttaataaattggaagaattcccattatttgaagctacgtatcaaattgcttttggttctgaatcaattgaaaatttaccaaacttgttaaataccactgcttaa

SEQ ID NO: 58834 - protein, 403 aa, Candida albicans SC5314
MYTTANNRLTQLTQILSPIVNDADSSFAQYLLQNPTFAPNPESSLNPEKPFKIAVVGSGNWGTTIAKIVAENALARPHLFSHYVNMWVFEEKINGENLTQIINQRHENIKYLPGVKLPNNLIAQPDIVTAVKGADLIIFNLPHQFLPKILKQLKGNVPKTTRAISCLKGLEVSKDGCKLLSTYITEELGIVCGALSGANLAPEIARGKWSETTVAYKLPNDYRGAGKDIDKLVLKACFHRPYFHVNVIEDVAGVSVAGALKNIVALAVGFVEGLGWGDNAKAAIMRVGLLETIKFSETFFPQSQADTFTAESAGVADLITTCAGGRNVKVGRYMAETGVSAEEAEKKLLNGQSSQGIVTAKEVHELLTYVNKLEEFPLFEATYQIAFGSESIENLPNLLNTTA

SEQ ID NO: 58835 - DNA, 1071 bp, Ustilago maydis 521
  CDS (1)..(1071)
atgtcaaccgcctcgacatcaagctcttcaaagaagcacaaagtggtgattgtcggctctggaaattggggctctgctatcgctcgtattgccggtcagaacacacaacgacactcggacacgtttcaacgcgaagtgcagatgtacgtgttcgaagaagattacaacggcaaacctctctcgcaggtcatcaacgagacacacgagaatcccaagtacctgcccggatgcaagcttccggataacgtcattgccaacccaaaccctgtcgatgcggtcaaggatgcgacgctgttggtgttcgttttaccgcatcagtttatccgatcggtgtgcaagcagttgaagggccatgtgaacccagatgcacacgcgatctcgatgatcaagggtgtcgaagtcaaggatggcaagatctcaatctttgctgatgtgatccaagaagcgctcggggtgtcgtgctccgctttatctggagctaacatcgcgaacgaggtggcgcaggacaagttctcagaaaccacaatcggtcatcgacccgatgcaaaaggtcgagaaaacgccgagctgttcttcaagctattcgacacgcctaccttcaaagtagggatcatcgaggatgtggcgggagtaagtctgtgtggggcgttgaagaatgtcgttgcgatcgccgcaggtttcacggatggattgggttggggagacaatgccaaagcggcggtgatgcgcatcggtctgatggagatgaagcgcttcagcgaggagttcttcgagggaatcaaacccgagaccttcacagaaacgagtgcgggcgtcgctgatctcatcaccacctgcctcggcggaaggaatcgaaagtgcgccgaggcgttcgtcaagaccggcaaaccattcgatcagctcgaaaaagagttgctcaatggtcaaaagttgcaaggaacagagaccgcaagggaggtacacgaattgttggcggcccgaggcaaggtcgacgactatccgttgttcaaggctgtctattcgatcgcatacgagggcattgacgctcacgatttgacgagtcgtctgtag

SEQ ID NO: 58836 - protein, 356 aa, Ustilago maydis 521
MSTASTSSSSKKHKVVIVGSGNWGSAIARIAGQNTQRHSDTFQREVQMYVFEEDYNGKPLSQVINETHENPKYLPGCKLPDNVIANPNPVDAVKDATLLVFVLPHQFIRSVCKQLKGHVNPDAHAISMIKGVEVKDGKISIFADVIQEALGVSCSALSGANIANEVAQDKFSETTIGHRPDAKGRENAELFFKLFDTPTFKVGIIEDVAGVSLCGALKNVVAIAAGFTDGLGWGDNAKAAVMRIGLMEMKRFSEEFFEGIKPETFTETSAGVADLITTCLGGRNRKCAEAFVKTGKPFDQLEKELLNGQKLQGTETAREVHELLAARGKVDDYPLFKAVYSIAYEGIDAHDLTSRL

SEQ ID NO: 58837 - DNA, 1068 bp, Legionella pneumophila subsp. pneumophila str. Philadelphia 1
  CDS (1)..(1068): transl_table=11
ttgatgctttatatatgcagcagctggaagaaaaacaaaaagcaactggagctaaagacgagactgtttctcactaagatgaataaaaaaaccattgccatgttaggtgccggctcctggggcactgctgtcgcaattcatttagctaaaatagggcataaaacgctgctgtggagtcataatccacagcatgttgccctcatggctgaacagcattcaaatccagcttaccttcctggtataccttttccagagaatttgattccttctgataatttaattgaatgcgttcaatcagcggattatgtcatcatagcagttccttctcatgcctttgcggaaataatcaataaaatccctaaaccaacccaaggattggcgtggcttacgaagggtgttgatccagcgagtcatgaattattaagccaactggttgccagtcgatttggggttgattttcccatagcagttatttcaggcccatcgtttgccaaagaagtggctcgcttcctgcctacagctctcactttggctagtaacaatacgaactatcaaaaaaaaatgcatcaactatttcatcacgacaacattcgtgtctatttaagtgatgatttaataggtgtgcaattatgtggcgctgttaaaaatatcctggcgatagcctgtggaatcagtgatggcttagggtatggcgctaatgccaaggcagcgcttattacccgtggacttgctgaaatgactcgtttgggattaagcatgggagcacggcaagatacttttctaggcttggctggtgtaggggacttggtattgacttgtacagatgatcaatcgcgcaatcgccgctttggattgctcttgggtcgtgaagtgcctattcctgaagccgaacaccaaattggccaagtagttgaagggaaacacaatgccgctcaaatttgcgctatagccaacaaaaataaggtggaaatgccaatttgtgagcaaattaatgcgctattgcatggtattgttcatgcccaagaggccgtgaacaacttaatgagtcgtcccgccaaggaagaataa

SEQ ID NO: 58838 - protein, 355 aa, Legionella pneumophila subsp. pneumophila str. Philadelphia 1
MMLYICSSWKKNKKQLELKTRLFLTKMNKKTIAMLGAGSWGTAVAIHLAKIGHKTLLWSHNPQHVALMAEQHSNPAYLPGIPFPENLIPSDNLIECVQSADYVIIAVPSHAFAEIINKIPKPTQGLAWLTKGVDPASHELLSQLVASRFGVDFPIAVISGPSFAKEVARFLPTALTLASNNTNYQKKMHQLFHHDNIRVYLSDDLIGVQLCGAVKNILAIACGISDGLGYGANAKAALITRGLAEMTRLGLSMGARQDTFLGLAGVGDLVLTCTDDQSRNRRFGLLLGREVPIPEAEHQIGQVVEGKHNAAQICAIANKNKVEMPICEQINALLHGIVHAQEAVNNLMSRPAKEE

SEQ ID NO: 58839 - DNA, 1008 bp, Burkholderia thailandensis E264
  CDS (1)..(1008): transl_table=11
gtgctgagcatgaaagtcgctgttctcggcgccggcgcgtggggcaccgcgctcgcggcgcatctcgccgcgcggcacgacacgctgctctgggcgcgcgacgcggcgctcgtcgccgagcttgccgcgcggcgcgagaacgtccgctacctggacggcgtcgcgctgccgcccgcattgcgctacgaggccgatctcacggcggcgctgtcgcacgcgcaggcggacgacgcgctctgcgtgatcgccgcgcccgtggccggcttgcgcgcgctgtgccgcgcgatgcgcgatgcgggccgcgtgcccgcccacttcgtgtgggtctgcaagggcttcgaggccgacacgcggctgctgccgcatcagatggtcgccgaggaactgccggatcacgcgagctacggcgtgctgtcgggcccgagcttcgcgcgcgaagtcgcgcaggggctgcccgtcgcgctgacggttgcgagcgcgtcggccgcatgccgcgggcgcacgctcgccgcgttccatcacggcgcgatgcgcatctatacgggcgacgacgtcgtcggcgtcgaggtcggcggcgcggtgaagaacgtgcttgcgatcgcgacgggcatcgccgacggcttgggcctcggcctcaacgcgcgcgcggcgctcgttacgcgcgggctcgcggagatgtcgcgtctgggcgtcgcgctcggcggccgcgcggagacgttcacgggcctcacgggcctgggcgacctgatcctcacggcgacgggcgatctgtcgcgcaaccggaccgtcggcctgcagctcgcggccggccgctcgctcgacgacattctggccgcgctcggccacgtggccgaaggcgtgcggtgcgcgcgcgcggtgctgtcgatcgcgcgcgagcgcggcgtcgacatgccgatcaccgaggcggtatgcgcggtgctgttcgacggcgtcgcgccgcgcgacgcggtgagcggcctgctgcggcgggacgcgaaggccgaatag

SEQ ID NO: 58840 - protein, 335 aa, Burkholderia thailandensis E264
MLSMKVAVLGAGAWGTALAAHLAARHDTLLWARDAALVAELAARRENVRYLDGVALPPALRYEADLTAALSHAQADDALCVIAAPVAGLRALCRAMRDAGRVPAHFVWVCKGFEADTRLLPHQMVAEELPDHASYGVLSGPSFAREVAQGLPVALTVASASAACRGRTLAAFHHGAMRIYTGDDVVGVEVGGAVKNVLAIATGIADGLGLGLNARAALVTRGLAEMSRLGVALGGRAETFTGLTGLGDLILTATGDLSRNRTVGLQLAAGRSLDDILAALGHVAEGVRCARAVLSIARERGVDMPITEAVCAVLFDGVAPRDAVSGLLRRDAKAE

SEQ ID NO: 58841 - DNA, 999 bp, Mycobacterium sp. MCS
  CDS (1)..(999): transl_table=11
gtggtgaaggcggcggtgatgggttccggtgcgtggggcacggcgctggccaaagttctcgctgacgcggggaactcggtgaccctgtgggcgaggcgacccgaggtcgcggcggagatcaacgacacccatcgcaacagcggctacctcgacgaggtggacctgcccaagacgatccacgccaccgccgacgccgccgaggcgctcgccggggcgtgcacggtggtgttcgcggtgccggcgcagagcctgcggagcaacctcgagcagtggaagggtctgatcgccgacgacgccacgctggtgagcctggccaagggcatcgaactggacacgctgatgcggatgagccaggtgatcgtccaggtcaccggcgcggacccggcgcgggtcgcggtggtgaccggaccgaatctcgccagcgagatcgccgacgaacagcccgccgccaccgtcgtcgcgtgcagtgacagcgggcgcgccgtcgccctgcaacgcgcactggccacggggtacctgcggccctacaccaacgccgacgtggtcggcgccgagatcggcggtgcgtgcaagaacgtgatcgcactggcgtgcgggatggccgtcggcgtggggctgggggagaacacggtcgcggcgatcatcacccgcgggctggccgagatcatgcggctgggcatcgcgctgggcgccaaaccggcgacgctggccgggctggccggcgtcggtgacctcgtcgcgacctgcacctcggtgcagtcgcgcaaccggaccttcggtgagcggttgggccggggcggcaccatggagtcggcactgcgcgccgcgggcggacacgtggccgagggcgtcacctcctgccggtcggtgctggcgctggccgccagctacgacgtggagatgccgctcaccgacgcggtgaaccgggtctgccacaagggtctttccgtcgacgaagccgtcgtgctgctgctcggccgcagcaccaaaccggagtga

SEQ ID NO: 58842 - protein, 332 aa, Mycobacterium sp. MCS
MVKAAVMGSGAWGTALAKVLADAGNSVTLWARRPEVAAEINDTHRNSGYLDEVDLPKTIHATADAAEALAGACTVVFAVPAQSLRSNLEQWKGLIADDATLVSLAKGIELDTLMRMSQVIVQVTGADPARVAVVTGPNLASEIADEQPAATVVACSDSGRAVALQRALATGYLRPYTNADVVGAEIGGACKNVIALACGMAVGVGLGENTVAAIITRGLAEIMRLGIALGAKPATLAGLAGVGDLVATCTSVQSRNRTFGERLGRGGTMESALRAAGGHVAEGVTSCRSVLALAASYDVEMPLTDAVNRVCHKGLSVDEAVVLLLGRSTKPE

SEQ ID NO: 58843 - DNA, 999 bp, Trichodesmium erythraeum IMS101
  CDS (1)..(999): transl_table=11
atggtaggtaaaatatctcaagctgataaaagaaaggaagttattagaactctagaatctgcttatccaatatcaactgaaaaagcaaatttagcaattctaggtgtaggtgcatggggttctgctttagcaggattagtaagtcataatcaacataaaatatctttatggtctcgtaacttaaatatcagtttagaacaggtaataaaagatgttgatatgatagtttcggcaatttctatgaaaggagttaatgaaactattgagaaaattcaaaagattggtttaccaaaaaaagtaattattattactgctacaaaaggattagatccagaaacaacttgtactccttctcagatttgggaagctaattttccaaataatcctgtggtagttttatccggtcctaatttatcaaaagaaattgatgataaattaccagcagcaacagtagttgctagtaaaaatatagaagcagtaacggcggtacaaaatatttttgcttctggtttatttcgagtttatagtagttccgatccaataggtacagagttaggtggaactttaaaaaatgtcattgctattgctagtggagtttgtgatggtttggaacttggtactaatgctaaatcagctttattaactcgtgctttgacagaaattattcgtattggtactcatttaggcggaaaaactgaaaccttttttgggttatctggtttgggagatatgttggcaacttgtagtagttctttgagtagaaattatcgggttggttatggtttggcgcagggaaaaaatttggaggaaattttagaggaattacctggtactgctgaaggtgttaatactacaaatgttttgattaatattgcgaatagagaggaaatttctctgcctatttctagtcaagtttttttattgttgaacggtaaaattactctagaagaagctgtggaagctctaatgggaagagatttaaaatcagagttttattga

SEQ ID NO: 58844 - protein, 332 aa, Trichodesmium erythraeum IMS101
MVGKISQADKRKEVIRTLESAYPISTEKANLAILGVGAWGSALAGLVSHNQHKISLWSRNLNISLEQVIKDVDMIVSAISMKGVNETIEKIQKIGLPKKVIIITATKGLDPETTCTPSQIWEANFPNNPVVVLSGPNLSKEIDDKLPAATVVASKNIEAVTAVQNIFASGLFRVYSSSDPIGTELGGTLKNVIAIASGVCDGLELGTNAKSALLTRALTEIIRIGTHLGGKTETFFGLSGLGDMLATCSSSLSRNYRVGYGLAQGKNLEEILEELPGTAEGVNTTNVLINIANREEISLPISSQVFLLLNGKITLEEAVEALMGRDLKSEFY

SEQ ID NO: 58845 - DNA, 999 bp, Alkalilimnicola ehrlichei MLHE-1
  CDS (1)..(999): transl_table=11
atgaacaggccactgggcatcatcggggccggcgcctggggcacggcgctggccatcgcggccggccacgccgggcacccggtccgactgtggggccgggacacggcggcggttcaggccatggcccgggaccgggtcaaccggcggaatctgccggactgcccgctgccggacccggtgcagccgcaaccggacctgacagcgctggtggccgagtgcgacgacctgctgctcgtcgtgcccagccgggccttcgagtccatgctgcataccctggccccgctgatcgagcgccgccaccggctgggctgggccaccaagggcctggatgccgccagcggcggcctgttgagccaggtggtccagcgggtgctcaagcccctgccgcccctggcggtcctttccgggccgagctttgccgccgaggtagggcggggcctgcccacggcggtcaccgtggccgctaccgatcagggcttcgccagcgacctggcggacgccttccgctacgagcgcttccgggtctataccagcaccgacctggtcggcgtgcaactgggcggcgcggtgaagaacgtcctggcgatcgccaccggcgtggccgacgggctgggcttcggcgccaacgcccgagccgcgctgatcacccgcggcctggcggagacccggcggctgagtgaggcgctgggcgcggacccggacaccctcaccgggctggccggcatgggcgacctcatcctcacctgcaccgacgaccagtcccgcaaccgccggctgggcctggccctggggcgcggcgaggacctggacgaggcggtggaggccatcggcacggtggagggggtgcgcacggcggatgaactgcaccgcctggccacccaggccggggtggagatgcccatctgcgagcaggtccatctgcgcctcgccggccgggtctccacccgcgaggccgtggagaatctcctgctccggcccggcggccgccaggagcagtaa

SEQ ID NO: 58846 - protein, 332 aa, Alkalilimnicola ehrlichei MLHE-1
MNRPLGIIGAGAWGTALAIAAGHAGHPVRLWGRDTAAVQAMARDRVNRRNLPDCPLPDPVQPQPDLTALVAECDDLLLVVPSRAFESMLHTLAPLIERRHRLGWATKGLDAASGGLLSQVVQRVLKPLPPLAVLSGPSFAAEVGRGLPTAVTVAATDQGFASDLADAFRYERFRVYTSTDLVGVQLGGAVKNVLAIATGVADGLGFGANARAALITRGLAETRRLSEALGADPDTLTGLAGMGDLILTCTDDQSRNRRLGLALGRGEDLDEAVEAIGTVEGVRTADELHRLATQAGVEMPICEQVHLRLAGRVSTREAVENLLLRPGGRQEQ

SEQ ID NO: 58847 - DNA, 1017 bp, Pediococcus pentosaceus ATCC 25745
  CDS (1)..(1017): transl_table=11
atggtaaaaaaagttgcagtgttaggagccggatcatggggcagtattttagctaacatgcttgtccaaaatggcaatgatgtagttgcatggacgaacatggaggaacaagctaaagaacttaacgagcagcactccaatgaacattacgttcccggttttaagtatgacgaacgtttagtagcaacaaccgacttagaagtagcgttgaaggatgttgatgcggtattgtttgttgtaccaaccaaggtaatgcgattagttgcccaacaaatggttgaagttttaaagaaaactggtcaaaagccaattattgttcatgcaagtaaaggtttggaacttggaacgcataagcgtttgtcagaagtattagcggaagaaattcctagtgaattacgtcaagcaattgtagttctttcaggtccaagtcatgctgaagaagttgctaagcaagatttaacgcttgttacagcagctagctcagatttagcaagtgctgaagcagttcaaaaattatttatgaataattacttccgcgtatatactaatgacgatattgtcggagttgaaatgggtgccgcacttaaaaatgtaattgcaattggagccggagcattacatggcttgggttacggcgatgacgctaaggcagctttaatcacacgtggtttagctgaaatttctcgtttaggagtagcctttggggcaaacccactcactttcatcggtttatctggtgtaggtgatttgattgttacggcaactagtgtgcattcacgaaactggcgtgcgggtaacgaacttggccaaggtatgaaactagacgaagttattgatacaatgggaatggtgattgaaggagttccttcaactaaagccgcctatgaattagctcaacaaaaaaatatcgaaatgccaattactgaagctatctatgatgtattgtataatgaaaagggtgtcaaggaagcaatcgacgaattgatgcatcgtgacggtaggtcagaattagagtaa

SEQ ID NO: 58848 - protein, 338 aa, Pediococcus pentosaceus ATCC 25745
MVKKVAVLGAGSWGSILANMLVQNGNDVVAWTNMEEQAKELNEQHSNEHYVPGFKYDERLVATTDLEVALKDVDAVLFVVPTKVMRLVAQQMVEVLKKTGQKPIIVHASKGLELGTHKRLSEVLAEEIPSELRQAIVVLSGPSHAEEVAKQDLTLVTAASSDLASAEAVQKLFMNNYFRVYTNDDIVGVEMGAALKNVIAIGAGALHGLGYGDDAKAALITRGLAEISRLGVAFGANPLTFIGLSGVGDLIVTATSVHSRNWRAGNELGQGMKLDEVIDTMGMVIEGVPSTKAAYELAQQKNIEMPITEAIYDVLYNEKGVKEAIDELMHRDGRSELE

SEQ ID NO: 58849 - DNA, 990 bp, Solibacter usitatus Ellin6076
  CDS (1)..(990): transl_table=11
ttgaagaatctatcgattatcggcggcggtagctgggggacggcgcttgcgatcgttctcgcttcgcgcttctccaaggtcaagctttgggtgtacgaggaagatcttgctgtgcgcatgacagccggacgaataaatgacgtttatctgccttcagtagcgattcctacgaatgtcgatatacatcatgagctggccgaagttgtcgctgatgcggacattgtccttggggtgatgccttcccacctggcgcgcgggatgtacgagaagatgcgtccgttcattaaggaccggatgatctttgttagcgctacgaaaggccttgagaatcactcattactacgaatatcggaggtaatctgcgaggttctggagacgcctcgggtcgcggtgatctccggtccctcttttgcaaaagaagtagcgcgttctgaacctactgccgtggtcgctgctgccgccgatcccaatctcgcggcaatggttcagacggccttctccggcccaagtttccgggtgtacacaagcggcgatcctactggagtagaaattggcggctcgattaaaaacgtagtcgccatcggcgctggcgtgttacatgggatggggttgggacacaacgcgatggccgctctgattacacgcgggttggcggagatgacgcgattggcggtggcgatgggtgggcagtcccagactctggccggcttggccggtttgggcgacctggtgctgacatgcactggcgatctcagccggaatcgcacgcttggggtcgagctcgccaaaggccggaagctcgaggacataatcaactccatgaaaatggtagccgagggtgtgaagactacaaacgccgcagtggatctggccaaacggtattccgtcgagatgccgatcgcggaacagatgtttcacatgctgcattcaggctcctcgcctcaacaggcgatccggcggctgatggagcgttcgctcaaaggggaataa

SEQ ID NO: 58850 - protein, 329 aa, Solibacter usitatus Ellin6076
MKNLSIIGGGSWGTALAIVLASRFSKVKLWVYEEDLAVRMTAGRINDVYLPSVAIPTNVDIHHELAEVVADADIVLGVMPSHLARGMYEKMRPFIKDRMIFVSATKGLENHSLLRISEVICEVLETPRVAVISGPSFAKEVARSEPTAVVAAAADPNLAAMVQTAFSGPSFRVYTSGDPTGVEIGGSIKNVVAIGAGVLHGMGLGHNAMAALITRGLAEMTRLAVAMGGQSQTLAGLAGLGDLVLTCTGDLSRNRTLGVELAKGRKLEDIINSMKMVAEGVKTTNAAVDLAKRYSVEMPIAEQMFHMLHSGSSPQQAIRRLMERSLKGE

SEQ ID NO: 58851 - DNA, 1026 bp, Magnetococcus sp. MC-1
  CDS (1)..(1026): transl_table=11
atggccgttgagtatgctgacaatccttcggtggccgttattggcgcgggatcttggggcacggcgctggcggccctgctggcgggtaagctgccccaagtaaccctgtgggcacgggaacccgaggtggtggagggcattaaccagggtcaccacaacccggtttatctggcagacctggatctgccgcctaacctggttgcccatcaagatctagcctgggtagcggccaaccatgatgtgttggtcatggtggtgcctacccaattttgccgtcaagtgctggctcagctcaaaccccatgtgcggccccatgtcacctttgtgtcggccaccaaaggggtggagactgccaatctggccctgatctcggagatctttacccaaacctttgcggcccccatcgcccagcgtacctgttatctctccggcccctccttcgcccgggaggtgatcgccgggcagccggtggcggtggccatggccggtgccgatgaagcggccttggcggctatgcaggcgctctttttcttcccccattttcgtacttacagcaccagcgatgtggtgggggttgaactgggtggggcgttgaaaaacattattgccattgctgcgggtattagtgatggattggggtatggggctggtgcgcgggcggcgttgatcacccgtggtttggccgaaattgcccgtttgggtcacatctatggggccaacccccagacttttgccggattgtcgggtatgggggatctgctcatgaccgcctcatccaccctgtcgcgcaactataccaccggctttcgcttgggccagggggagagcctaagccacattagcggcagctcaagagaggtggccgaaggggtgcaaaccgccgccagtacttggctgttggcccagcgccatggggtggagatgcccattacccaggcggtacatgccatcttatttgaacaggtacccccacaacaggcggtgacgcaactgctaaaccgggatatgaaacgggaggccgtctag

SEQ ID NO: 58852 - protein, 341 aa, Magnetococcus sp. MC-1
MAVEYADNPSVAVIGAGSWGTALAALLAGKLPQVTLWAREPEVVEGINQGHHNPVYLADLDLPPNLVAHQDLAWVAANHDVLVMVVPTQFCRQVLAQLKPHVRPHVTFVSATKGVETANLALISEIFTQTFAAPIAQRTCYLSGPSFAREVIAGQPVAVAMAGADEAALAAMQALFFFPHFRTYSTSDVVGVELGGALKNIIAIAAGISDGLGYGAGARAALITRGLAEIARLGHIYGANPQTFAGLSGMGDLLMTASSTLSRNYTTGFRLGQGESLSHISGSSREVAEGVQTAASTWLLAQRHGVEMPITQAVHAILFEQVPPQQAVTQLLNRDMKREAV

SEQ ID NO: 58853 - DNA, 1026 bp, Mycobacterium avium 104
  CDS (1)..(1026): transl_table=11
atggcagctcagatgcgtgaacccaaagtcgttgtgctcggaggcggctcctggggcaccaccgtggcgtcgatctgtgcgcgccgcgggccgacgctgcagtgggtgcgctcgcgggagaccgccgacgacatcaacgagaaccaccgcaacagccgctatctgggcaacgacgtggtgctgagcgacacgctgcgcgccaccaccgatttctgcgaggcggccaacaccgccgacgtggtggtgatgggggtcccctcgcacggctttcgcggcgtactcaccgaactggcgcgggaattgcggccgtgggtgccggtggtgtccttggtcaaagggctcgagcagggcaccaacatgcggatgtcgcagatcgtcgaggaggtgctgcccggtcatccggcgggcatcctggccgggccgaacatcgcgcgcgaggtggccgagggctacgccgccgcggcggtgctggcgatgcccgaccagcatctggcgacccggctgtccgggctgttccgcacccggcggttccgcgtctacaccaccgacgacgtcgtcggggcggagatggccggggcgctgaagaacgtgttcgccatcgccgtgggcatggggtattcgctgggcatcggcgagaacacccgcgcgctggtgatcgcccgcgcgctgcgcgagatgaccaagctgggggtggcgatgggcggcagccccgacaccttcccgggactggccggactcggcgacctcatcgtcacctgcaccagccagcgcagccgcaaccggcacgtcggcgaacaactgggcgccggcaaaccgatcgacgagatcatcgcgtcgatgaaccaggtcgccgagggcgtcaaagcggccagcgtgatcatggagttcgccaacgagttcggcctgaccatgccgatcgcccgcgaagtcgatgcggtgatcaaccacggctcgacggtcgagcaggcctatcgggggctgatcgccgaggttcccggccacgaggtgcacggctccggcttctga

SEQ ID NO: 58854 - protein, 341 aa, Mycobacterium avium 104
MAAQMREPKVVVLGGGSWGTTVASICARRGPTLQWVRSRETADDINENHRNSRYLGNDVVLSDTLRATTDFCEAANTADVVVMGVPSHGFRGVLTELARELRPWVPVVSLVKGLEQGTNMRMSQIVEEVLPGHPAGILAGPNIAREVAEGYAAAAVLAMPDQHLATRLSGLFRTRRFRVYTTDDVVGAEMAGALKNVFAIAVGMGYSLGIGENTRALVIARALREMTKLGVAMGGSPDTFPGLAGLGDLIVTCTSQRSRNRHVGEQLGAGKPIDEIIASMNQVAEGVKAASVIMEFANEFGLTMPIAREVDAVINHGSTVEQAYRGLIAEVPGHEVHGSGF

SEQ ID NO: 58855 - DNA, 996 bp, Mycobacterium smegmatis str. MC2 155
  CDS (1)..(996): transl_table=11
gtggaggctgcggtcatgggttgcggtgcctgggggacggcactcgcgaaggtcctcgcggacgcgggtaatccggtgacgatgtgggccaggcggcccgaggtcgccgacgagatcaactccgagcatcgaaacagcgaatatctcggcgatgtcgtgttgcccgcgtcgatccgggccacgagcgatcccgaggaggcgctgcgtggcgcatgcaccgtgatgttggccgtgccctcccagaagttgcgggccaacctcgacaactggaagcacctgatcgaagacgacgtcacgctggtgagtctcgccaaaggcatcgaactcggcacgttgatgcgcatgagccaggtcatcgtccaggtgacgggggccgatccgtcgcgggtcggtgtcgtcagcggccccaacctggccagcgagatcgccgacgagcagccggccgcgaccgtgatcgcgtgcagcgattccgggcgcgcggtcaccctgcagcgggcgatggccaccgggtacttccgcccgtacaccaatcccgacgtcatcggggccgaggtcggcggtgcctgcaagaacgtcatagcgctcgcgtgcggcatggccgtcggtgtggggctgggggagaacaccgtcgcggccctcatcacgcgcggtctcgccgagatcatgcggctcggtatcgcactcggcgccaccccggccacactcgccggactggccggggtcggcgatctggtcgccacgtgcacgtcaccgcattcccgcaaccgcaccttcggtgagcggctcggcaagggcggaaccatggagtccgcactcgcggccgcgggcgggcatgtcgccgaaggtgtcgcatcgtgcgagtcggtgctggcgctggcgtcgagctacggcgtcgagatgccgttgaccgacgcggtacaccgggtgtgccacaagggattgtcagttcacgaggccgtcgcactgctgctcggccgcagtaccaaaccggagtag

SEQ ID NO: 58856 - protein, 331 aa, Mycobacterium smegmatis str. MC2 155
MEAAVMGCGAWGTALAKVLADAGNPVTMWARRPEVADEINSEHRNSEYLGDVVLPASIRATSDPEEALRGACTVMLAVPSQKLRANLDNWKHLIEDDVTLVSLAKGIELGTLMRMSQVIVQVTGADPSRVGVVSGPNLASEIADEQPAATVIACSDSGRAVTLQRAMATGYFRPYTNPDVIGAEVGGACKNVIALACGMAVGVGLGENTVAALITRGLAEIMRLGIALGATPATLAGLAGVGDLVATCTSPHSRNRTFGERLGKGGTMESALAAAGGHVAEGVASCESVLALASSYGVEMPLTDAVHRVCHKGLSVHEAVALLLGRSTKPE

SEQ ID NO: 58857 - DNA, 990 bp, Azoarcus sp. BH72
  CDS (1)..(990): transl_table=11
ttgaagcggctgaagatcgcggtccttggcgccggcgcctggggcacggcactcgcccaggccttcgccgatacgcacgaggcggtgctgtgggggcgtgacgcggcgcatatcgacgccacccggcatgcggcggaaaacacccgctacctgcccggtgtcgcactgcatccgcaactcgccctcaccgccgacttgcccgcggcggcgctcggtgccgacctgcacctggtggtcacgccgctggccggcctgcgcgacacgctgcggctgctcaacgacatccagccggataccccggtcatctgggcctgcaagggcctcgaagcgggcagcggcaagctcccgcacgaaatcgtcgccgacgagctgggcgccacgccctgcggcgtcctcaccggtccgagtttcgcagccgaagtggcccgtggcctgccggccgcgatcacccttgccgccagcgacgtcgagttcgcgcgccactgggtgcatgcgctgcaccgtccgcgcctgcggctgtacgccaacgccgacgtggtcggatgcgaaatcggcggtgcgctcaagaacgtcatggcgattgccgccggcgtttcggacggcatgggcttcggcctcaacgcacgcgcggccctgatcacccgcggcctggcggaaatcgcccgtctcgccaccgccatgggcggacacgccgagaccctgatgggactcgccggcatgggcgacctgatcctcacctgcaccggcgacctctcacgcaaccggcgggtgggtctggcactggccgccggaaacacgctgtccgacatcctgcgcgacctcggtcatgtcgccgaaggcgtctccaccgcgcacgaggctgtccgtctcgcccgccgccacggtgtggaaatgccgatctgcgaagccgtggatgcgctgctgcatggcggcctggccgcgcgcgacgcggtcgagcgcctgctcgcacgcgaccccaagcgggaataa

SEQ ID NO: 58858 - protein, 329 aa, Azoarcus sp. BH72
MKRLKIAVLGAGAWGTALAQAFADTHEAVLWGRDAAHIDATRHAAENTRYLPGVALHPQLALTADLPAAALGADLHLVVTPLAGLRDTLRLLNDIQPDTPVIWACKGLEAGSGKLPHEIVADELGATPCGVLTGPSFAAEVARGLPAAITLAASDVEFARHWVHALHRPRLRLYANADVVGCEIGGALKNVMAIAAGVSDGMGFGLNARAALITRGLAEIARLATAMGGHAETLMGLAGMGDLILTCTGDLSRNRRVGLALAAGNTLSDILRDLGHVAEGVSTAHEAVRLARRHGVEMPICEAVDALLHGGLAARDAVERLLARDPKRE

SEQ ID NO: 58859 - DNA, 930 bp, Nostoc punctiforme PCC 73102
  CDS (1)..(930): transl_table=11
atgactaattcaaaatctgtagcaattcttggtgcgggtgcttggggtgcatctctggcaaatctcgccgcagcgaatggtcatcaggtgcgcgtgtggtcgcgtcaaggttcccaaactctccaaacagtgttagaagatgcccaaataatcctatccgctatctcaatgattggtgtgagagatgttgcttcccaaatccagtctttctccctttctccagagacgatttttgtgacggcgaccaaaggcttggatccccaaaccacttgcacgccgtcgcaaatttggcaaacagtattcgctaaccatgcagtggttgttttgtctgggcctaatttatctaaagaaattcaactagagttaccagcagcaacagtggtagccagtaatattcccacagctgcggaagtagtgcagttagtattttcttctcatcgtttccgggtatataccaatcccgaccccttgggggtggaactagggggaacgctaaaaaatgtgattgcgatcgcagctggtgtgtgcgatggtttacatctaggaaccaatgccaaagctgctttagtcacccgtggacttacagaaatggttcgcatcggtaacgactggggtgcaaagacggaaacattttatggattatcgggtcttggagacttgttagcaacctgcaatagtcccttaagccgcaattaccaagtcggctaccagctagctggtggtaagacacttaaagaaactcttgcaaatttacaaggaacagccgaaggagtgaacacttgccaggttttgatgcaacgagccaagcaacaaaacattccagttccaattactgagcaagtttatcgattacttcaaggagaagtcacaccccgacaagcgcttgatgaactgatgctgcgagatataaagccagagtacaactactag

SEQ ID NO: 58860 - protein, 309 aa, Nostoc punctiforme PCC 73102
MTNSKSVAILGAGAWGASLANLAAANGHQVRVWSRQGSQTLQTVLEDAQIILSAISMIGVRDVASQIQSFSLSPETIFVTATKGLDPQTTCTPSQIWQTVFANHAVVVLSGPNLSKEIQLELPAATVVASNIPTAAEVVQLVFSSHRFRVYTNPDPLGVELGGTLKNVIAIAAGVCDGLHLGTNAKAALVTRGLTEMVRIGNDWGAKTETFYGLSGLGDLLATCNSPLSRNYQVGYQLAGGKTLKETLANLQGTAEGVNTCQVLMQRAKQQNIPVPITEQVYRLLQGEVTPRQALDELMLRDIKPEYNY

SEQ ID NO: 58861 - DNA, 1011 bp, Actinobacillus pleuropneumoniae serovar 1 str. 4074
  CDS (1)..(1011): transl_table=11
atgagtgaaatgtattcggcacccgttacggttttaggtgccggttcttacggtaccgctttggcaatcgcacttgcacgtaacggacataaaacctacctatggggacatcaaccggaaaaaatggcggtgttggcaaccgagcgaatgaataacgcttttttaccggatattgcttttcccgatgccttagagattgaaagtgacttagttcaagccattgctaaagccaaagacattttaatcgttgtaccaagccatgtatttgccgatgtgctaaaacaaataaagcctctgttaagtgcccatcatcgtattatgtgggcaacgaaaggactggaacgtaataccggacgactattacaaaccgtagcacaagaaattcttggtaatcaatacccgttagcggtactatccgggccgacatttgccaaagaactcgctcaaggtttaccgacagctatcgcactatcctcaacagacagccaatttgccgatgaaatgcagcaacgtattcactgtgctaaagcgtttcgagtctatttgaacaacgatatgataggtgtgcaattaggcggtgcgattaagaatgtcattgcaatcggggctggtatttccgatggaatgggctttggtgctaatgcaagaacggcacttattacgcgcggtttagctgagatcagccgtttaggcgcatcactcggtgcaaatgccaatacttttatgggtatggcgggacttggcgatttggtactaacttgtaccgataaccaatcgcgtaaccgtcgtttcggtttaatgctcggacaaggaaaatccgctgaggaagctatggcggaaatcgggcaagtggtggaaggtttctacaataccaaagaagcgtatttattggctcagacccaaggtgtcgaaatgccgattgtcgaacaaatctatcaaatgctattctgcggtaagaatgcgcatgatgttgctacgagcctattagggcgtgaacgcaaaggcgaataa

SEQ ID NO: 58862 - protein, 336 aa, Actinobacillus pleuropneumoniae serovar 1 str. 4074
MSEMYSAPVTVLGAGSYGTALAIALARNGHKTYLWGHQPEKMAVLATERMNNAFLPDIAFPDALEIESDLVQAIAKAKDILIVVPSHVFADVLKQIKPLLSAHHRIMWATKGLERNTGRLLQTVAQEILGNQYPLAVLSGPTFAKELAQGLPTAIALSSTDSQFADEMQQRIHCAKAFRVYLNNDMIGVQLGGAIKNVIAIGAGISDGMGFGANARTALITRGLAEISRLGASLGANANTFMGMAGLGDLVLTCTDNQSRNRRFGLMLGQGKSAEEAMAEIGQVVEGFYNTKEAYLLAQTQGVEMPIVEQIYQMLFCGKNAHDVATSLLGRERKGE

SEQ ID NO: 58863 - DNA, 1023 bp, Bacillus cereus G9241
  CDS (1)..(1023): transl_table=11
atgacaaaaatcacagtagttggagcaggtagctggggaacagcgttagcgatggtattagctgacaatgggcatgatgtacgtatttggggaaatcgttctgaacttatggatgagattaatacaaaacatgagaatagtcgataccttccaggaattacattgccaagcacaatcgtagcctactcttctttagaagaagcattagtagatgtaaatgtagtacttcttgtagtaccgacgaaagcgtatagagaagtactgcaagatatgaagaaatatgtaccgggtccgactacttggattcatgcgagtaaagggattgaacctggtacgtcaaaacgtatttcggaagtaattgaggaagaaattccagagaacttgattaaagatgttgttgtactgtctggaccgagccatgctgaagaagttgggttacgtcaagcgacaactgttacgtctgcagcaaagcgtatggaagcggctgaagaagtacaagatttgtttatgaatagttacttccgtgtatacacaaatccagatatcgttggtgttgaacttggtggtgcgttaaaaaatattatcgcattagctgctgggataactgatggtcttggattaggtgataatgcgaaagcggcattaatgacacgtggtttaacggagattgctcgtttaggaagaaaaatgggtggaaatccgttaacgtttgctggtctaactggtatgggagacttaattgtaacttgtacaagtgttcatagccggaattggcgtgctgggaatttgcttggaaaaggacactctttagaagaagtgttagaaagcatgggtatggttgtggaaggtgtaagaacaacgaaagctgctcacgaattggcagagaaaatggaagttgaaatgccgattacagctgctttatatgacgtcttattcaatgggaataatgtaaaagatgcagtaggctcattaatggggcgtgttcgaaaacacgaagtggaagctatacctgacttactttaa

SEQ ID NO: 58864 - protein, 340 aa, Bacillus cereus G9241
MTKITVVGAGSWGTALAMVLADNGHDVRIWGNRSELMDEINTKHENSRYLPGITLPSTIVAYSSLEEALVDVNVVLLVVPTKAYREVLQDMKKYVPGPTTWIHASKGIEPGTSKRISEVIEEEIPENLIKDVVVLSGPSHAEEVGLRQATTVTSAAKRMEAAEEVQDLFMNSYFRVYTNPDIVGVELGGALKNIIALAAGITDGLGLGDNAKAALMTRGLTEIARLGRKMGGNPLTFAGLTGMGDLIVTCTSVHSRNWRAGNLLGKGHSLEEVLESMGMVVEGVRTTKAAHELAEKMEVEMPITAALYDVLFNGNNVKDAVGSLMGRVRKHEVEAIPDLL

SEQ ID NO: 58865 - DNA, 999 bp, Burkholderia vietnamiensis G4
  CDS (1)..(999): transl_table=11
atgaaagtagccgttctcggcgccggtgcctggggcaccgcgctcgcgggccatctggccgcgcggcacgatacgcttctctgggcgcgcgacgccgcgctgatcgccgggctacaggcccggcacgaaaattcccgctatctggaaggcatcgcgctgcccgatgcgctgcgctacgacgccgatctcgacgccgcgctcgcgcacggcgccgctgacgacgcgttgtgcgtgatcggcgcgccggtggccgggctgcgcacgctgttgcgcgcaatgcgcgacgcgcgctgcgtaccggcgcacgtggtgtgggtgtgcaagggcttcgaggccgacacgcatctgctgccgcaccaggtgatcgcggccgagctgcccgagcagcgcagcaacggcgtgctgtcggggccgagcttcgcccgcgaggtcgggctcgggctgccggtcgcgttgacggtcgccagcgcgtcggccgcgtgccgcgagcgcacgcttgcggcgttccatcacggcgcgatgcggatctatacgggcgacgacgtggtcggcgtcgaggtcggcggcgcggtgaagaacgtgctggcgatcgccaccggcatcgccgacggcctcgggctcgggctcaatgcgcgcgccgcgctgatcacgcgcggtctcgccgaaatgtcgcgcctcggcgtggcgctcggcggccgggcggaaaccttcacgggcctcacgggcctcggcgacctgatcctcaccgcgacgggcgacctgtcgcgcaatcgcacggtcgggctgcaactggcgtccggccgctcgctggccgacatcctcggcgcgctcggccacgtggccgaaggcgtgcgctgcgcgcaggcggtgctcgcactcgcgcacgcacacgcgatcgaaatgccgatcaccgaggccgtgtgcggcgtgctgttcgacggcgtcgcaccgcgcgatgcggtgagcgggctgctgcgccgcgacgcgcgcgccgaatga

SEQ ID NO: 58866 - protein, 332 aa, Burkholderia vietnamiensis G4
MKVAVLGAGAWGTALAGHLAARHDTLLWARDAALIAGLQARHENSRYLEGIALPDALRYDADLDAALAHGAADDALCVIGAPVAGLRTLLRAMRDARCVPAHVVWVCKGFEADTHLLPHQVIAAELPEQRSNGVLSGPSFAREVGLGLPVALTVASASAACRERTLAAFHHGAMRIYTGDDVVGVEVGGAVKNVLAIATGIADGLGLGLNARAALITRGLAEMSRLGVALGGRAETFTGLTGLGDLILTATGDLSRNRTVGLQLASGRSLADILGALGHVAEGVRCAQAVLALAHAHAIEMPITEAVCGVLFDGVAPRDAVSGLLRRDARAE

SEQ ID NO: 58867 - DNA, 942 bp, Crocosphaera watsonii WH 8501
  CDS (1)..(942): transl_table=11
atgagtaataccaagaaaaaattaacaattattggcgcaggattgtggggacaagcactagcaaaattagctcaatataatgaccagaataatgtaaaaatttggtcacgaacaagtagtgaatctctagcttcagttgttcaagaagcagatgtaattctctctgctgtttctatgaaaggagtcagactcactgtagaaaaattaacagctttaactattcctgaagagactatttttattagtgccaccaaagggttagaaacaaaaacccttcttaccccttcacaaatctggcaaaaaagctttccttctcatcctgttgttgttttatcggggcctaatttatcaaaagaaatacaacaaagattacctgctgctactgtggtagctagtgaggatgttgtcgctgctgctaaagttcaagaaatcttttcttctgatatttttcgggtttattctaatcaagatcccatcggaacagaattaggaggaactctaaaaaatgttatggcgatcgcttctggtgtttgcgatggtttacagttaggaaccaatgctaaatctgctctcttaacccgtgctttaccagaaatgattcgcattggaaccgagttaggagcatcaagagaaaccttttttggactatcaggattgggggatttaatcgctacttgctatagtcctttatcccgtaactatcgggtaggttatggtttatcagaaggaaaaactttagaacagattttaatagaattaggcagtaccgcagagggtattaatacagctaatgtcctaatagaattagcccaaaaacatagaatagctatccctatttctcgtcaagtttatcaactcatcaacggcgaaacaaccccccaagaagcggtaaaagagttaatggcgagagatttaaaagcagagtttgatgttttatcgtga

SEQ ID NO: 58868 - protein, 313 aa, Crocosphaera watsonii WH 8501
MSNTKKKLTIIGAGLWGQALAKLAQYNDQNNVKIWSRTSSESLASVVQEADVILSAVSMKGVRLTVEKLTALTIPEETIFISATKGLETKTLLTPSQIWQKSFPSHPVVVLSGPNLSKEIQQRLPAATVVASEDVVAAAKVQEIFSSDIFRVYSNQDPIGTELGGTLKNVMAIASGVCDGLQLGTNAKSALLTRALPEMIRIGTELGASRETFFGLSGLGDLIATCYSPLSRNYRVGYGLSEGKTLEQILIELGSTAEGINTANVLIELAQKHRIAIPISRQVYQLINGETTPQEAVKELMARDLKAEFDVLS

SEQ ID NO: 58869 - DNA, 1029 bp, Exiguobacterium sibiricum 255-15
  CDS (1)..(1029): transl_table=11
atgatgaaaaaaattgcagtcattggagccgggagttggggaaccgcactctcgctcgttttagccgataacggtcatgaggtcattctttatggtcgggatcaaaaaaatgttgatgccattaatcaaaatcatgaaaatacgcagttcttaccaggtgtgacgttgccggaatcacttcgggcaactactgttttaagcgaagctgtcgaaggggtatcccatatcttgattgtgacgccttcttctgcgattcgttctgtatcgcgtcaattaaacgaattgttgacggaaccggtcgtgctgattcatgcctcaaaagggattgaaccgaaaacacacttacggttgtcagaattgatggagcaggaaatcgatgcctccaaacgttcggcgatttgtgtgttgaccggtccatcccatgcggaagaagtcgcattacgtaagccgacgaccgtaacggttgcttccactgacatggaagaggcaggacgagtacaggaattgtttacgaatgataacttccgtgtctatttaaacgccgatattatcggagcagaactgggcggagcgttcaaaaacatcattgccttagcagccggaatggctgatggattagggtacggtgataatgccaaagcagccttgatcacccgcgggatggtcgaaattgcccgactaggcacattgttcggtgcaaatccgatgacgttcaccggtttaacgggaatgggcgacttaatcgtgacctgtacatcggtccacagtcggaactggcgcgccggaaatgcgatcggccggggcgaaaaacttgaaaccgttcttgagaacatgggaatggtcgtcgagggcgtccgggcgacacaagccgcttacgatttagcagaaacgaaacaatgtgagttacccatcacgacagcgctctatcatgtcttattcgacggacatactccggcagaagaagtacagaaattgatgcgccgtccgcagaaaaatgagattgaacatctgtttacgatgaaagattaa

SEQ ID NO: 58870 - protein, 342 aa, Exiguobacterium sibiricum 255-15
MMKKIAVIGAGSWGTALSLVLADNGHEVILYGRDQKNVDAINQNHENTQFLPGVTLPESLRATTVLSEAVEGVSHILIVTPSSAIRSVSRQLNELLTEPVVLIHASKGIEPKTHLRLSELMEQEIDASKRSAICVLTGPSHAEEVALRKPTTVTVASTDMEEAGRVQELFTNDNFRVYLNADIIGAELGGAFKNIIALAAGMADGLGYGDNAKAALITRGMVEIARLGTLFGANPMTFTGLTGMGDLIVTCTSVHSRNWRAGNAIGRGEKLETVLENMGMVVEGVRATQAAYDLAETKQCELPITTALYHVLFDGHTPAEEVQKLMRRPQKNEIEHLFTMKD

SEQ ID NO: 58871 - DNA, 969 bp, Kineococcus radiotolerans SRS30216
  CDS (1)..(969): transl_table=11
gtggcgggtgtgcacgtcgccgtcctcgggtccggagcgtggggaacggccgtcgccgggctcctcgccgccaacgccagcagcgtcgggctgtggtgccgccggcccgagctcgccgagcgcatccgggtctcggggcgcaacgagcagtacctgccggggatcgacctgcccgcccgcgtccacgcggggtcccgcgtcgaggacgtcgtggagggcgcggagctggtggtcctcgcggtgccgctgcagcggctgcggtccctgctcctgcgctggcgggaggtgctgcccgccgtcccggtggtgaacctggccaagggcgtggagacctcgacggggctgttcggctccgaggtcgtcgccgacgtcctggacggccggcccgtcctggcgctgtcggggcccaacctcgccctggagatcgcccgcggtcagcccgccgccaccgtcgtggcctgcgtggacgcggaggtggccgggcgggtcgcgacctggtgcagcacaccggacttccacgcccacccgctgaccgacgtcgtcggcgtcgacgtcgcgggggcggtgaagaacgtcgtcgcgctggccgtggggatggtggagggcgcgggtctgggcgcgaacgcgcgggccgcggtgacgaccctggggctcaccgagaccgcggagctgggccggcgcctcggggcgcggctggagacgttcctgggcctggccggcgccggggacctcgtcgccaccagcacctccacgctctcgcgcaaccaccgcgtcggggtggcgctgggggaggggctgccgctggccgaggcgctggtccgcgcgggcggcaccgcggagggcgtcgcgacggccccggcgctgctgcggcgcgacccggacctgccgttcgtgcgcgacgtcgtggccgtcctcgacgggcagcgctcacccgtcgaggcggtcacccggctgctgacggtggcctga

SEQ ID NO: 58872 - protein, 322 aa, Kineococcus radiotolerans SRS30216
MAGVHVAVLGSGAWGTAVAGLLAANASSVGLWCRRPELAERIRVSGRNEQYLPGIDLPARVHAGSRVEDVVEGAELVVLAVPLQRLRSLLLRWREVLPAVPVVNLAKGVETSTGLFGSEVVADVLDGRPVLALSGPNLALEIARGQPAATVVACVDAEVAGRVATWCSTPDFHAHPLTDVVGVDVAGAVKNVVALAVGMVEGAGLGANARAAVTTLGLTETAELGRRLGARLETFLGLAGAGDLVATSTSTLSRNHRVGVALGEGLPLAEALVRAGGTAEGVATAPALLRRDPDLPFVRDVVAVLDGQRSPVEAVTRLLTVA

SEQ ID NO: 58873 - DNA, 1041 bp, Xylella fastidiosa Dixon
  CDS (1)..(1041): transl_table=11
atgatcgattctaagcagaaaattgctgttcttggtgccggctcttggggaactgctcttgcggcattggttgcaaggcatgactatccgaccatattgtggggtcgtgatgtgcgagtgatacagagcatagatatccagcaccagaactttcgttatttacctagcattatgcttcctcagacgctgcgtgccactaccgatttggctgcagcggtctcaggtgccgactggattttggtggcggttccctcttacgccttcactgaaactctatgtcgattggctccattgctgtcaatcggcgttggtgttgcttgggcaaccaaaggatttgaaccggggtctggtcgtttcttacacgaggtggctcgtgaaattctgggaggtgatgtaccattggcagtggtgacggggccttcttttgctaaagaagtgactctgggcctgcctacagcggtcaccgtacatggtgaagatgtgtgttttactcagatggtggccaatgcgatgcatggcccgatgttccgtgcctataccggcaacgacgtgattggtgctgagcttggtggggcaatgaagaacgtactggcagtggctattggcgtggctgatggcatgcagttaggcatgaacgcgcgtgctggtttaattactcgtggactgaatgaaatgttacgtttgtctgcggttatcggtgctcggccggaaacgctaatggggttggctggtctcggcgatctagtattgacttgtactggtgacttgtcgcgtaatcgtcgcctaggctttgctctggggcgaggacagagtttgtcggatgcaatacgtgagattggtcaagtcgttgagtctgtacaaacttccgacgaggtaatgcgccaagctgaacagaatggtgtcgagttgccgatttccgaagctgtgcgtgctgttctacgtgaagagataactccatatgctgggatgaaagccttgcttgcacgagagcaaaagcctgaatatcttgatattctgtttaaggcaaactgttctttataa

SEQ ID NO: 58874 - protein, 346 aa, Xylella fastidiosa Dixon
MIDSKQKIAVLGAGSWGTALAALVARHDYPTILWGRDVRVIQSIDIQHQNFRYLPSIMLPQTLRATTDLAAAVSGADWILVAVPSYAFTETLCRLAPLLSIGVGVAWATKGFEPGSGRFLHEVAREILGGDVPLAVVTGPSFAKEVTLGLPTAVTVHGEDVCFTQMVANAMHGPMFRAYTGNDVIGAELGGAMKNVLAVAIGVADGMQLGMNARAGLITRGLNEMLRLSAVIGARPETLMGLAGLGDLVLTCTGDLSRNRRLGFALGRGQSLSDAIREIGQVVESVQTSDEVMRQAEQNGVELPISEAVRAVLREEITPYAGMKALLAREQKPEYLDILFKANCSL

SEQ ID NO: 58875 - DNA, 1080 bp, Dehalococcoides sp. BAV1
  CDS (1)..(1080): transl_table=11
atgtctaaagtttgtattataggcactactacctggggtattactctgggtacaattatagcccacaaagggcgtgaagtaatgctctgggcacgcaccgaggacgaagctgtgcttctttccactcagcgccgtccggctgactttttgccggaaaactatcatttccccgaattcatgaatgtaactgccagtttggaagaagctatagccggggcagacatggttttgctagctgtaccttcccagcggatgcgccccaatatacggctggttgcacccctgctgactaaaagcatgctgatttgcagtgccgccaaggggctggaaataggcactgccaaacgtatgagccaagtaattaccgacgagatttcccctgatttcgcaaagaatatctgcgttctttcaggcccgaatctggcaatggagatattaaaagggttgccggctgtaactgtgctggctgccgatactgaaaagacagctaaaaaagccgccaaactgataaccgccgccaatttttctgcctataccaatacagatattataggggtggaactgggcggctcactcaaaaacattatcgctctgggggcaggcatagtagacgggctgaatttgggcaacaacgccaagagcgcccttattacccgtggcctgactgaaatttccgcacttggggcagctttgggggctaaccccctgaccctatccggtctggctggtctgggtgatttgattgccacctgctcaagcaatctctcacgcaaccattttgtgggagtggaactgaccaaaggccgaagcctgaatgatatcatgtacaatatgagcaatgtagccgaaggtgtatctactactgcggtagcttatgaaatggcccgctccatggatttggaaatgccggtaactgaaaacatctataatgtgctttacaataatgcagacccgaaagaagccgccagaatacttatggatgcccaagctacccatgagctggcagggcgtaaatggaatctgtttaaaatgttcagaaaacgcaaagcccgcaaaacacccgaacttaaccctgattaa

SEQ ID NO: 58876 - protein, 359 aa, Dehalococcoides sp. BAV1
MSKVCIIGTTTWGITLGTIIAHKGREVMLWARTEDEAVLLSTQRRPADFLPENYHFPEFMNVTASLEEAIAGADMVLLAVPSQRMRPNIRLVAPLLTKSMLICSAAKGLEIGTAKRMSQVITDEISPDFAKNICVLSGPNLAMEILKGLPAVTVLAADTEKTAKKAAKLITAANFSAYTNTDIIGVELGGSLKNIIALGAGIVDGLNLGNNAKSALITRGLTEISALGAALGANPLTLSGLAGLGDLIATCSSNLSRNHFVGVELTKGRSLNDIMYNMSNVAEGVSTTAVAYEMARSMDLEMPVTENIYNVLYNNADPKEAARILMDAQATHELAGRKWNLFKMFRKRKARKTPELNPD

SEQ ID NO: 58877 - DNA, 1017 bp, Photobacterium sp. SKA34
  CDS (1)..(1017): transl_table=11
atgactaagaacgcaaataatacgatttcaatggcagtattaggcgctggctcttacggcacagcacttgctattgcgttatccagaaatggtgccaatgttattttatggggccatgacccagaacatattgcacaattggaaattgatcgtgccaatgaagcgtttcttcctagtgtacgctttcctgaatcgttaattgtaacgtcaaacttacaagatgctgttgaaggtagccgcgatttacttgttgttgtaccaagtcatgtatttggtcaagtattatcacaagtaaaacctttcttacgctcagattcacgtgtctgttgggcgaccaaagggttagaaccagaaactggacgtctgttaaaagatgtcgcagtagatgctttaggtagtgatattccacttgcagtattatcaggccctacctttgctcaagaactggcagcgggtttaccgacggctatttctgttgcatcaccggatgcggaatttgttgctgatcttcaagaaaaaattcattgtgataaaacgtttagagtttatagcaataatgatttcacggggatgcaattaggcggcgctgtaaaaaatgtgattgcaataggtgcgggtatgtctgacggtattggctttggtgccaatgcacgtacagcgttgatcacccgtggtcttgctgaaatgtgccgtcttggcgcggcattaggtgcacagcctgaaacctttatgggtatggcagggttgggtgatttagtactaacatgtaccgataaccaatcccgtaaccgtcgttttggtttagcgttaggcgcaggtaaaagtgtagagcaagcacaacaggaaattggtcaaattgttgaaggttatcgtaataccaaagaagtttggcaattggcgaagcgttatggtgttgagatgccgatctctgagcaaatttatcaagtactttatcaaggtaaagatgctcgtgaggctgctaaagaattactcgcacgcgagaaaaaatatgaataa

SEQ ID NO: 58878 - protein, 338 aa, Photobacterium sp. SKA34
MTKNANNTISMAVLGAGSYGTALAIALSRNGANVILWGHDPEHIAQLEIDRANEAFLPSVRFPESLIVTSNLQDAVEGSRDLLVVVPSHVFGQVLSQVKPFLRSDSRVCWATKGLEPETGRLLKDVAVDALGSDIPLAVLSGPTFAQELAAGLPTAISVASPDAEFVADLQEKIHCDKTFRVYSNNDFTGMQLGGAVKNVIAIGAGMSDGIGFGANARTALITRGLAEMCRLGAALGAQPETFMGMAGLGDLVLTCTDNQSRNRRFGLALGAGKSVEQAQQEIGQIVEGYRNTKEVWQLAKRYGVEMPISEQIYQVLYQGKDAREAAKELLAREKKYE

SEQ ID NO: 58879 - DNA, 1023 bp, delta proteobacterium MLMS-1
  CDS (1)..(1023): transl_table=11
atggccggcgggttaacggtcctgggggcgggaagttggggcaccgccctggccggggtgctggccggcaaggggttaccggtttacctctgctgtcgtgatccccaacacgccgcccggatggccgccgaacgggaaaacagcgcctatctgcccggctttaagctggcccccgggatccagcccaccaccgatctgggcgtggtggccgcttgccgggcggtggtgatggcggttccctcccatggtttcagaagcgtttttaagcgcgttatcccccacctggcgccggataccgccattatctcggccaccaaggggatcgaaaacgattccctgttgaccatgaccgcggtgatggccgaagaactggccgccgccgacccctccccggcctgccacctggggtgcctggccggccccagctttgcccgggaagtggccgaggggctgcccaccgccgtcaccgtggccgccgccagcagggaggaggccctctttttccaggagctgtttttcacccagcgcttccgggtctatattggcaccgacctgatcggccaggaactgggcggggccttaaagaatatcatcgccatcgccgccggcatcagcgacggcctgggctatggcaccaactcccgggccgccctgatcacccgggggttggccgaaattacccgcctgggggtggccatgggcgccaatcccctgaccttctccgggctggccggcctgggggatctggtgttgacctgtaccggcgatttaagccgtaaccgcagcgtcggcctcaagctgggccaggggatgtcgcttgccgagattctagccgagatgcggatggtggccgaaggggtcaagaccacccgctcggcccgtgccctggcccatcgccagggagtggagatgccgattttagaagaggtttatctggtactctacgaagataaaccctgccggcaggcggtgtatgacctgctggcccgggaaggcaaggaagaactggagtttggtggataa

SEQ ID NO: 58880 - protein, 340 aa, delta proteobacterium MLMS-1
MAGGLTVLGAGSWGTALAGVLAGKGLPVYLCCRDPQHAARMAAERENSAYLPGFKLAPGIQPTTDLGVVAACRAVVMAVPSHGFRSVFKRVIPHLAPDTAIISATKGIENDSLLTMTAVMAEELAAADPSPACHLGCLAGPSFAREVAEGLPTAVTVAAASREEALFFQELFFTQRFRVYIGTDLIGQELGGALKNIIAIAAGISDGLGYGTNSRAALITRGLAEITRLGVAMGANPLTFSGLAGLGDLVLTCTGDLSRNRSVGLKLGQGMSLAEILAEMRMVAEGVKTTRSARALAHRQGVEMPILEEVYLVLYEDKPCRQAVYDLLAREGKEELEFGG

SEQ ID NO: 58881 - DNA, 1023 bp, delta proteobacterium MLMS-1
  CDS (1)..(1023): transl_table=11
atggccggcggggtaacggtcctgggggcgggaagttggggcaccgccctggccggggtgctggccggcaaggggttaccggtttacctctgctgtcgtgatccccaacacgccgcccggatggccgccgaacgggaaaacagcgcctatctgcccggctttaagctgccccccgggatccagcccaccaccgatctgggcgtggtggccgattgccgggcggtggtgatggcggttccctcccatggtttcagaagcgtttttaagcgcgttatcccccacctggcaccggataccgccattgtctcggccaccaaagggatcgaaaacgattccctgctgaccatgaccgcggtgatggccgaagaactggccgccgccgacccctccccggcctgccatctggggtgcctggccggccccagctttgcccgggaagtggccgaggggctgcccaccgccgtcaccgtggccgccgccagcagggaggaggccctctttttccaggagctgtttttcacccagcgcttccgggtctatattggcaccgacctgatcggccaggaactgggcggggccttgaagaatatcatcgccatcgccgccggcatcagcgacggcctgggctatggcaccaactcccgggccgccctgattacccgggggttggccgaaattacccgcctgggggtggccatgggcgccaatcccctgaccttctccgggctggccggcctgggggatctggtgttgacctgtaccggcgatttaagccgtaaccgcagcgtcggcctcaagctgggccaggggatgtcgcttgccgatattctagccgagatgcggatggtggccgaaggggtcaagaccacccgctcggcccgtgccctggcccatcgccagggagtggagatgccgattttagaagaggtttatctggtactctacgaagataaaccctgccggcaggcggtgtatgacctgctggcccgggaaggcaaggaagaattggagtttggtggatga

SEQ ID NO: 58882 - protein, 340 aa, delta proteobacterium MLMS-1
MAGGVTVLGAGSWGTALAGVLAGKGLPVYLCCRDPQHAARMAAERENSAYLPGFKLPPGIQPTTDLGVVADCRAVVMAVPSHGFRSVFKRVIPHLAPDTAIVSATKGIENDSLLTMTAVMAEELAAADPSPACHLGCLAGPSFAREVAEGLPTAVTVAAASREEALFFQELFFTQRFRVYIGTDLIGQELGGALKNIIAIAAGISDGLGYGTNSRAALITRGLAEITRLGVAMGANPLTFSGLAGLGDLVLTCTGDLSRNRSVGLKLGQGMSLADILAEMRMVAEGVKTTRSARALAHRQGVEMPILEEVYLVLYEDKPCRQAVYDLLAREGKEELEFGG

SEQ ID NO: 58883 - DNA, 1032 bp, Oceanobacter sp. RED65
  CDS (1)..(1032): transl_table=11
atgacagatttaaacagtaacaaagctgcggttcttggtggtggtagctttggaacagcggttgcgaatattttagccgctaatggttttcaagttgatttatggatgcgcaatgaaaagaccattgaagacatcaaacaggaacgtgagaacaaacaatatctccctggcgtaaagttgcatgacaatattcaagcaacgggagatcttgagtctgcgatcaaggacagccaggttttattttatgcagttccctctaagtcttttagagagttagttgagcgtacccaaggcttagtagtgcccgagcagatgttgattagcactactaaaggtattgaaccagaagggttcaatttgatgagtgatatcttgaaggggacttttcctagtaaccctattggggtcattagcggccccaatttagcgaaagaaattggccaaggtcagcctgcggctacggttattgggagtaaagataagcgggtacgtgatttcattcagaaaagtttgagttgtaacttcttccgggtatacgcgaatgccgatatgtatggcgtcgaacttggcggtgccctaaaaaatatttatgcggttatcactggtatggctgctgcattaggtttcggtgaaaacaccaaagcgacattgattactcgtagtctcgcagaaatgagccgttttgcggtttcgcaaggggcaaatcctatgacatttttaggcttagccggtgtgggagatttggttgctacatgtgtgtccccattaagtcggaactatcgggtgggctatgccgtaggtaagggtgaaacgttagaacaagcggttgaagctttgggtgaagtcgcagagggtgttaatacggtacggtacatatatcatgaagccaacgagcaaggtatttatatgccacttgctagtgctttatatgcggtattgttcgaaggtgctgaggtgagtcagctggccaactcactcatgacaggcgaatacaatactgacgtggagttttcactgcctagaggagcctaa

SEQ ID NO: 58884 - protein, 343 aa, Oceanobacter sp. RED65
MTDLNSNKAAVLGGGSFGTAVANILAANGFQVDLWMRNEKTIEDIKQERENKQYLPGVKLHDNIQATGDLESAIKDSQVLFYAVPSKSFRELVERTQGLVVPEQMLISTTKGIEPEGFNLMSDILKGTFPSNPIGVISGPNLAKEIGQGQPAATVIGSKDKRVRDFIQKSLSCNFFRVYANADMYGVELGGALKNIYAVITGMAAALGFGENTKATLITRSLAEMSRFAVSQGANPMTFLGLAGVGDLVATCVSPLSRNYRVGYAVGKGETLEQAVEALGEVAEGVNTVRYIYHEANEQGIYMPLASALYAVLFEGAEVSQLANSLMTGEYNTDVEFSLPRGA

SEQ ID NO: 58885 - DNA, 1059 bp, Desulfitobacterium hafniense DCB-2
  CDS (1)..(1059): transl_table=11
ttggctaaaatagctgtctatggcgcaggcagttggggaacagccctggccgtttccatgggtaaagcaggtcatgaggttgccttagtagggcgaaacctcagcgagatggatctcatggagcagagacgcgaaaaccgtccttatctgccgggggtggtgctgcccccaacagtgcgccccacaggggacgcaggggcgcttgaggaagcggaaatgctggtgctcagtgtgccctcccatagcgtacgggagacggcccaaaagatcagggcctatctccaaccgggaaccatcgttgtgaacacggccaaagggctggaggagggaagtcacaagcggctttctcaggtcttgactgaagaacttccccatcatcccatcgtggttttgtccggtcccagccacgctgaggaagtaggcaaggatatgccgaccacggttgtggtggcttctcaaaacagtcaggctgcggaagctgttcaggatatgctgatgactcctaaattccgcgtctacaccaatccggataccatcggtgtagaattgggaggagcttttaaaaatattattgctctgtgtgccggctttgccgacggcttaggctttggggataataccaaggctgccctgatgacccgggggattgctgagattacccgcttaggtgcggccatgggagggaacccgctgacctttgccggcctggccggagtgggggatcttattgtaacctgcaccagccggcatagccgcaatcaccgggctggggttgctttgggcgagggtaagcctttggagcaagtcctcaaagaggtgggtatggtggtggagggcgttcgcaccacccgcgttgcctacgagctgagccgtcagtatgaaatctccatgcccatcacagaacaggcttaccaggttctttttcagggtgccgatcccagggcggcagtatctgctctgatgatgagaggcaaaaagcacgagattgaggaagtggctctgattgccatggaacagggttcttatcaggagaatggcccggatgatcatggtgagtaa

SEQ ID NO: 58886 - protein, 352 aa, Desulfitobacterium hafniense DCB-2
MAKIAVYGAGSWGTALAVSMGKAGHEVALVGRNLSEMDLMEQRRENRPYLPGVVLPPTVRPTGDAGALEEAEMLVLSVPSHSVRETAQKIRAYLQPGTIVVNTAKGLEEGSHKRLSQVLTEELPHHPIVVLSGPSHAEEVGKDMPTTVVVASQNSQAAEAVQDMLMTPKFRVYTNPDTIGVELGGAFKNIIALCAGFADGLGFGDNTKAALMTRGIAEITRLGAAMGGNPLTFAGLAGVGDLIVTCTSRHSRNHRAGVALGEGKPLEQVLKEVGMVVEGVRTTRVAYELSRQYEISMPITEQAYQVLFQGADPRAAVSALMMRGKKHEIEEVALIAMEQGSYQENGPDDHGE

SEQ ID NO: 58887 - DNA, 1008 bp, Alteromonadales bacterium TW-7
  CDS (1)..(1008): transl_table=11
atgagtacagcaacttcagctgttactgtattgggggcggggtcttatggcaccgcccttgctatttgtttagcccgaaatggtcataaagtgacgctttggggacgcaatagcgacgacgttgctacgcttgcagctgagcggaaaaatcaacgttacttaccagatgcatccttcccagacactctagtactagaagacgatttacaacgcgcagttgcatgtagtgctattgtgcttgttgttgtgccaagccatgcatttggcgacacacttgcgcaaataaaacctgcattgcaaatcgatgctaaagtcgcgtgggcgactaaaggccttgagccaaatacagggcgtttattacaagaagttgcgcagcaagagttgggtgatgaaatcgcacttgcggtactttcgggtcctacatttgcgaaagaaatggcaatgggttcaccaacagctatttctgtttcgtctacctcacctgagtttgcacaacaattggctgatttactgcattgtggtcgttcatttcgtgtgtataacaatgacgactttattggcatacagctaggtggtgcggttaaaaacgtaattgctattggcgcgggtatttctgatggtgtaggttttggagccaatgctcgcacagctttgatcacacgaggtcttgcagaactgactcggttaggttgcgctctaggcgcaaagccagaaacctttatgggaatggcaggccttggcgatttaattttaacctgtactgacaaccaatcacgcaatcgtcgttttggtttagcacttggtaaaggtgaaagtgttgaaactgcaattgagtcgataggccaagtagtcgagggctttagaaacaccaaagaggtgtatttacttgcccagcgtgcaggcgttgaaatgcctatcactgaacagatttacaaagtactttatgaaaataaagatatgaaagccgctgctatggcattgttaggtagagagcaacgctcagaatag

SEQ ID NO: 58888 - protein, 335 aa, Alteromonadales bacterium TW-7
MSTATSAVTVLGAGSYGTALAICLARNGHKVTLWGRNSDDVATLAAERKNQRYLPDASFPDTLVLEDDLQRAVACSAIVLVVVPSHAFGDTLAQIKPALQIDAKVAWATKGLEPNTGRLLQEVAQQELGDEIALAVLSGPTFAKEMAMGSPTAISVSSTSPEFAQQLADLLHCGRSFRVYNNDDFIGIQLGGAVKNVIAIGAGISDGVGFGANARTALITRGLAELTRLGCALGAKPETFMGMAGLGDLILTCTDNQSRNRRFGLALGKGESVETAIESIGQVVEGFRNTKEVYLLAQRAGVEMPITEQIYKVLYENKDMKAAAMALLGREQRSE

SEQ ID NO: 58889 - DNA, 1017 bp, marine gamma proteobacterium HTCC2143
  CDS (1)..(1017): transl_table=11
gtgactcaatatcatcagattaccgtgcttggtggaggcagttttgggactactattgccaacattatggcggacaacggccatcgggtgtgtttgtggttgcgcaatcaagctcgggctgatgaaattaattgtgaccatgtaaatagcgcctatttacctgactatcacctcaatcatgctctcaaagctagtaccgacctgaaagctgcggtcactggctgcgacattatttttatggcggtccccagtaaatcctccagagcagtcgctgctgaagtgtcggcgtatcttgcagataatgtcattgtggtaagtacgacaaaaggaatagagcacgatagttttaaaatgatgagcgaggtcttggcagaagaaattcccggcgcccgaataggcgttcttagtggaccgaatctagccagtgagattgctgctaaacagctgactgcgactgtcatcgccagctgtgatgaagatctaaacacaacgatacaagccttattacattccggaactttccgcgtttatgccagtgctgatgtattaggtgtagagcttggcggtgcgctaaaaaatgtttacgcgatcatggcaggtatggctgcagcgatgggtatcggacaaaataccatcagtatgttgatgacgcggagtctggctgaaatgagtcgctttgcggttcagaaaggtgctgacccgatgacttttttaggcctgtcaggcgttggagatcttatcgctacctgcatgtctcctctcagtagaaattatcaggtcggttttgagctgggcaacggcaaagagttagaagatattatcgctgatcttgggcaggttgcagagggcgtcaatacgctacagatactaaagcgacaagctgacgagctgggtgtatacatgcctctggtcaatggcctctatgacatcatttacacccctaagtcgatcacggaggttattggtagtctgatgttcgcagagcaaagtagggatgttgaatttacgattaaataa

SEQ ID NO: 58890 - protein, 338 aa, marine gamma proteobacterium HTCC2143
MTQYHQITVLGGGSFGTTIANIMADNGHRVCLWLRNQARADEINCDHVNSAYLPDYHLNHALKASTDLKAAVTGCDIIFMAVPSKSSRAVAAEVSAYLADNVIVVSTTKGIEHDSFKMMSEVLAEEIPGARIGVLSGPNLASEIAAKQLTATVIASCDEDLNTTIQALLHSGTFRVYASADVLGVELGGALKNVYAIMAGMAAAMGIGQNTISMLMTRSLAEMSRFAVQKGADPMTFLGLSGVGDLIATCMSPLSRNYQVGFELGNGKELEDIIADLGQVAEGVNTLQILKRQADELGVYMPLVNGLYDIIYTPKSITEVIGSLMFAEQSRDVEFTIK

SEQ ID NO: 58891 - DNA, 1080 bp, Locusta migratoria
  CDS (1)..(1080)
atgccgaagccaaagaaagtttgtatcattggctccggtaactggggctctgcaattgccaaaatcgtaggaagcaatgcggaacgactggactatgtcgacaacaggatcactatgtacgtgtatgaagaaatggtggagggacgcaagctgacggagatcataaatgaaacccacgaaaatgtgaagtacctacctggacacaaactgcctcctaatgtggtggcgatacccgacgtggttgaggcggcagatggagcggacatcctcatcttcgtgattccccaccagttcatccgcaacatctgcgcagcactcatcggccgcatcaagccggatgctgtcggcctttccctcataaagggtttcgaccgcgtcgagggtggagctatcgacttgatctcgaatacgatcagccgcttactgaagattcaagtttgcgtcctcatgggagccaacctggccaacgaggtggctgccggaatgttctgtgaaaccaccatcgggtgcaaagataagcgtgtggctcctctcttgagggatctgattcagacggagaacttcaaagtcgtcgtcgtggacgacgtgaatgccgtcgaggcctgtggagccctcaagaacataattgcagtcggcgtgggttttgtggatggtctgggctacggggacaacacgaaagcggccgtcatcaggctgggcctcatggagatgataaagttcgtcgacatcttcttccccggctcccggctgtccacgttcttcgagagctgtggcgtggccgacctcatcacgacctgttttggcggcaggaacaggcgcgtcggagaagcgtttatcaagactggaaagtcaattgaagtcctggagaaagagttgctaaatgggcagaagctgcagggacccattactgcagcagaagtgaatttcatgctcaagaacagaggcatggaggcgagattccctctgatgacggcagtgcacagaatctgcactggcgagatgaaggcggcggaccttctggatcacgtgcggaaccacccggaacacatgcaaactacatttggacggtgttcgctttag

SEQ ID NO: 58892 - protein, 359 aa, Locusta migratoria
MPKPKKVCIIGSGNWGSAIAKIVGSNAERLDYVDNRITMYVYEEMVEGRKLTEIINETHENVKYLPGHKLPPNVVAIPDVVEAADGADILIFVIPHQFIRNICAALIGRIKPDAVGLSLIKGFDRVEGGAIDLISNTISRLLKIQVCVLMGANLANEVAAGMFCETTIGCKDKRVAPLLRDLIQTENFKVVVVDDVNAVEACGALKNIIAVGVGFVDGLGYGDNTKAAVIRLGLMEMIKFVDIFFPGSRLSTFFESCGVADLITTCFGGRNRRVGEAFIKTGKSIEVLEKELLNGQKLQGPITAAEVNFMLKNRGMEARFPLMTAVHRICTGEMKAADLLDHVRNHPEHMQTTFGRCSL

SEQ ID NO: 58893 - DNA, 1083 bp, Drosophila flavomontana
  CDS (1)..(1083)
atggcggaaaaagtaaatgtttgcatcgttggatccggcaactggggttcggccatagcgaaaatcgtgggcgccaatgcgtccgctctgcccgagtttgaggagcgcgtcacaatgtttgtctacgaggagatgattgatggcaagaagttaacggaaattatcaatgaaacgcacgagaatgttaaatacctgaagggacacaaactgccaaacaatgtggttgctgtacctgatctggttgaggctgccaagaatgccgacatactaatctttgtggtgcctcatcagtttataccaaatttctgcaaacaattgctgggcaagatcaagccaaatgccattgccatatccctgatcaagggcttcgataaggccgagggcggcggcattgatctgatatcgcacattattacccgccatttgaagataccatgcgccgtgctgatgggcgctaatctggccaacgaggtggccgagggcaacttttgcgagacgacaatcggctgcacggacaaaaagtacggcaaggtgctgcgtgatctcttccaggccaatcattttcgtgtcgtggtcgttgaggatgccgatgccgttgaggtatgcggtgccctgaagaacattgttgcctgtggtgcgggctttgtcgatggactcaagctgggcgataatactaaggcagcggtcattcgtttgggtcttatggaaatgatacgctttgtcgatgtcttctatccgggcagcaaattgtccacattctttgagagctgcggtgttgcggatcttatcacgacgtgttacggtggtcgcaatcgtcgtgtctctgaggcttttgtcacatctggcaagacaattgaggaactggagaaggagatgctcaatggccagaaattgcagggcccgcccactgccgaggaggttaactatatgttgaaaaacaaaggcctggaggataaattcccattgttcaccgccatacacaaaatttgcacaaatcagcttaagcctaaagatttaatcgattgcatacgcaatcatcccgagcatatggatacgttcatcatgccgtcgccaaaactctaa

SEQ ID NO: 58894 - protein, 360 aa, Drosophila flavomontana
MAEKVNVCIVGSGNWGSAIAKIVGANASALPEFEERVTMFVYEEMIDGKKLTEIINETHENVKYLKGHKLPNNVVAVPDLVEAAKNADILIFVVPHQFIPNFCKQLLGKIKPNAIAISLIKGFDKAEGGGIDLISHIITRHLKIPCAVLMGANLANEVAEGNFCETTIGCTDKKYGKVLRDLFQANHFRVVVVEDADAVEVCGALKNIVACGAGFVDGLKLGDNTKAAVIRLGLMEMIRFVDVFYPGSKLSTFFESCGVADLITTCYGGRNRRVSEAFVTSGKTIEELEKEMLNGQKLQGPPTAEEVNYMLKNKGLEDKFPLFTAIHKICTNQLKPKDLIDCIRNHPEHMDTFIMPSPKL

SEQ ID NO: 58895 - DNA, 1053 bp, Drosophila americana
  CDS (1)..(1053)
atggcggaaaaggtaaatgtttgcatcgtgggctctggcaactggggttcggccatagcgaaaatcgtgggcgccaatgcggccgcgctgcccgagtttgaggagcgcgtcacaatgtttgtctacgaggagatgattgatggcaagaagttaacggaaattatcaatgaaacgcacgagaatgttaaatacctgaagggacacaaactgccaacaaatgtggttgccgtacctgatctggttgaggctgccaagaatgccgatatactgatctttgtggtgccacatcagtttataccaaatttctgcaaacaattgctgggcaagatcaagccaaatgccattgccatatccctgatcaagggcttcgataaggccgagggcggcggcattgatctgatatcgcacattattacccgccatttgaagataccatgcgccgtgctgatgggcgctaatctggccaacgaggtggccgagggcaacttttgcgagacgacaatcggctgcacggacaaaaagtacggcaaggtgctgcgtgatctcttccaggccaatcattttcgtgtcgtggtcgttgaggatgccgatgccgttgaggtttgcggtgccctgaagaacattgttgcctgtggtgcgggctttgtcgatggtctcaagctgggcgataatactaaggcagcggtcattcgtttgggtcttatggaaatgatacgctttgtcgatgtcttctatccgggcagcaaattgtccacattctttgagagctgcggtgttgcggatctcatcacgacgtgttacggtggtcgcaatcgtcgtgtctccgaggcttttgtcacatctggcaagacaattgaggatctggagaaggagatgctcaatggccagaaattgcagggcccgcccactgccgaggaggttaactatatgttgaaaaacaaaggcctggaggataaattcccattgttcaccgccatacacaaaatttgcacaaatcagcttaagcctaaagatttaatcgattgcatacgcaatcatcccgagcatatgtaa

SEQ ID NO: 58896 - protein, 350 aa, Drosophila americana
MAEKVNVCIVGSGNWGSAIAKIVGANAAALPEFEERVTMFVYEEMIDGKKLTEIINETHENVKYLKGHKLPTNVVAVPDLVEAAKNADILIFVVPHQFIPNFCKQLLGKIKPNAIAISLIKGFDKAEGGGIDLISHIITRHLKIPCAVLMGANLANEVAEGNFCETTIGCTDKKYGKVLRDLFQANHFRVVVVEDADAVEVCGALKNIVACGAGFVDGLKLGDNTKAAVIRLGLMEMIRFVDVFYPGSKLSTFFESCGVADLITTCYGGRNRRVSEAFVTSGKTIEDLEKEMLNGQKLQGPPTAEEVNYMLKNKGLEDKFPLFTAIHKICTNQLKPKDLIDCIRNHPEHM

SEQ ID NO: 58897 - DNA, 1083 bp, Drosophila novamexicana
  CDS (1)..(1083)
atggcggaaaaagtaaatgtttgcatcgtgggctctggcaactggggttcggccatagcgaaaatcgtgggcgccaatgcggccgcgctgcccgagtttgaggagcgcgtcacaatgtttgtctacgaggagatgattgatggcaagaagttaacggaaattatcaatgaaacgcacgagaatgttaaatacctgaagggacacaaactgccaacaaatgtggctgccgtacctgatctggttgaggctgccaagaatgccgatatactgatctttgtggtgccacatcagttcataccaaatttctgcaaacaattgctgggcaagatcaagccaaatgccattgccatatccctgatcaagggcttcgataaggccgagggcggcggcattgatctgatatcgcacattattacccgccatttgaagataccatgcgccgtgctgatgggcgctaatctggccaacgaggtggccgagggcaacttttgcgagacgacaatcggctgcacggacaaaaagtacggcaaggtgctgcgtgatctcttccaggccaatcattttcgtgtcgtggtcgttgaggatgccgatgccgttgaggtttgcggtgccctgaagaacattgttgcctgtggtgcgggctttgtcgatggtctcaagctgggcgataatactaaggcagcggtcattcgtttgggtcttatggaaatgatacgctttgtcgatgtcttctatccgggcagcaaactgtccacattctttgagagctgcggtgttgcggatctcatcacgacgtgttacggtggccgcaatcgtcgtgtctccgaggcttttgtcacatctggcaagacaattgaggatctggagaaggagatgctcaatggccagaaattgcagggcccgcccactgccgaggaggttaactatatgttgaaaaacaaaggcctggaggataaattcccattgttcaccgccatacacaaaatttgcacaaatcagcttaagcctaaagatttaatcgattgcatacgcaatcatcccgagcatatggatacgttcatcatgccgtcgccaaaactctaa

SEQ ID NO: 58898 - protein, 360 aa, Drosophila novamexicana
MAEKVNVCIVGSGNWGSAIAKIVGANAAALPEFEERVTMFVYEEMIDGKKLTEIINETHENVKYLKGHKLPTNVAAVPDLVEAAKNADILIFVVPHQFIPNFCKQLLGKIKPNAIAISLIKGFDKAEGGGIDLISHIITRHLKIPCAVLMGANLANEVAEGNFCETTIGCTDKKYGKVLRDLFQANHFRVVVVEDADAVEVCGALKNIVACGAGFVDGLKLGDNTKAAVIRLGLMEMIRFVDVFYPGSKLSTFFESCGVADLITTCYGGRNRRVSEAFVTSGKTIEDLEKEMLNGQKLQGPPTAEEVNYMLKNKGLEDKFPLFTAIHKICTNQLKPKDLIDCIRNHPEHMDTFIMPSPKL

SEQ ID NO: 58899 - DNA, 1053 bp, Locusta migratoria
  CDS (1)..(1053)
atgccgaagccaaagaaagtttgtatcattggctccggtaactggggctctgcaattgccaaaatcgtaggaagcaatgcggaacgactggactatgtcgacaacaggatcactatgtacgtgtatgaagaaatggtggagggacgcaagctgacggagatcataaatgaaacccacgaaaatgtgaagtacctacctggacacaaactgcctcctaatgtggtggcgatacccgacgtggttgaggcggcagatggagcggacatcctcatcttcgtgattccccaccagttcatccgcaacatctgcgcagcactcatcggccgcatcaagccggatgctgtcggcctttccctcataaagggtttcgaccgcgtcgagggtggagctatcgacttgatctcgaatacgatcagccgcttactgaagattcaagtttgcgtcctcatgggagccaacctggccaacgaggtggctgccggaatgttctgtgaaaccaccatcgggtgcaaagataagcgtgtggctcctctcttgagggatctgattcagacggagaacttcaaagtcgtcgtcgtggacgacgtgaatgccgtcgaggcctgtggagccctcaagaacataattgcagtcggcgtgggttttgtggatggtctgggctacggggacaacacgaaagcggccgtcatcaggctgggcctcatggagatgataaagttcgtcgacatcttcttccccggctcccggctgtccacgttcttcgagagctgtggcgtggccgacctcatcacgacctgttttggcggcaggaacaggcgcgtcggagaagcgtttatcaagactggaaagtcaattgaagtcctggagaaagagttgctaaatgggcagaagctgcagggacccattactgcagcagaagtgaatttcatgctcaagaacagaggcatggaggcgagattccctctgatgacggcagtgcacagaatctgcactggcgagatgaaggcggcggaccttctggatcacgtgcggaaccacccggaacacatgtaa

SEQ ID NO: 58900 - protein, 350 aa, Locusta migratoria
MPKPKKVCIIGSGNWGSAIAKIVGSNAERLDYVDNRITMYVYEEMVEGRKLTEIINETHENVKYLPGHKLPPNVVAIPDVVEAADGADILIFVIPHQFIRNICAALIGRIKPDAVGLSLIKGFDRVEGGAIDLISNTISRLLKIQVCVLMGANLANEVAAGMFCETTIGCKDKRVAPLLRDLIQTENFKVVVVDDVNAVEACGALKNIIAVGVGFVDGLGYGDNTKAAVIRLGLMEMIKFVDIFFPGSRLSTFFESCGVADLITTCFGGRNRRVGEAFIKTGKSIEVLEKELLNGQKLQGPITAAEVNFMLKNRGMEARFPLMTAVHRICTGEMKAADLLDHVRNHPEHM

SEQ ID NO: 58901 - DNA, 1062 bp, Drosophila borealis
  CDS (1)..(1062)
atggcggaaaaagtaaatgtttgcattgttggctccggcaactggggttcggccatagcgaaaatcgtgggcgccaatgcgtccgctctgcccgagtttgaggagcgcgtcacaatgtttgtctacgaggagatgattgatggcaagaagttaacggaaattatcaatgaaacgcacgagaatgttaaatacctgaagggacacaaactgccaaacaatgtggttgctgtacctgatctggttgaggctgccaagaatgccgatatactaatctttgtggtgccacatcagtttataccaaatttctgcaaacaattgctgggcaagatcaagccaaatgccattgccatatccctgatcaagggcttcgataaggccgagggcggcggcattgatctgatatcgcacattattacccgccatttgaagataccatgcgccgtgctgatgggcgctaatctggccaacgaagtggctgagggcaacttttgcgagacgacaatcggctgcacggacaaaaagtacggcaaggtgctgcgtgatctcttccaggccaatcattttcgtgtcgtggtcgttgaggatgccgatgccgttgaggtgtgcggtgccctgaagaacattgttgcctgtggtgcgggctttgtcgatggactcaagctaggcgataatactaaggcagcggtcattcgcttgggtcttatggaaatgatacgttttgtcgatgtcttctatccgggcagcaaattgtccacattctttgagagctgcggtgttgcggatctcatcacgacgtgctacggtggtcgcaatcgtcgtgtctcagaggcttttgtcacatctggcaagacaattgaggaactggagaaggagatgctcaatggccagaaattgcagggcccgcccactgccgaggaggttaactatatgttgaaaaacaagggcctggaggataaattcccgttgttcaccgccatacacaaaatttgcacaaatcagcttaagcctaaagatttaatcgattgcatacgcaatcatcccgagcatatgcaaactttgtaa

SEQ ID NO: 58902 - protein, 353 aa, Drosophila borealis
MAEKVNVCIVGSGNWGSAIAKIVGANASALPEFEERVTMFVYEEMIDGKKLTEIINETHENVKYLKGHKLPNNVVAVPDLVEAAKNADILIFVVPHQFIPNFCKQLLGKIKPNAIAISLIKGFDKAEGGGIDLISHIITRHLKIPCAVLMGANLANEVAEGNFCETTIGCTDKKYGKVLRDLFQANHFRVVVVEDADAVEVCGALKNIVACGAGFVDGLKLGDNTKAAVIRLGLMEMIRFVDVFYPGSKLSTFFESCGVADLITTCYGGRNRRVSEAFVTSGKTIEELEKEMLNGQKLQGPPTAEEVNYMLKNKGLEDKFPLFTAIHKICTNQLKPKDLIDCIRNHPEHMQTL

SEQ ID NO: 58903 - DNA, 1053 bp, Drosophila flavomontana
  CDS (1)..(1053)
atggcggaaaaagtaaatgtttgcatcgttggatccggcaactggggttcggccatagcgaaaatcgtgggcgccaatgcgtccgctctgcccgagtttgaggagcgcgtcacaatgtttgtctacgaggagatgattgatggcaagaagttaacggaaattatcaatgaaacgcacgagaatgttaaatacctgaagggacacaaactgccaaacaatgtggttgctgtacctgatctggttgaggctgccaagaatgccgacatactaatctttgtggtgcctcatcagtttataccaaatttctgcaaacaattgctgggcaagatcaagccaaatgccattgccatatccctgatcaagggcttcgataaggccgagggcggcggcattgatctgatatcgcacattattacccgccatttgaagataccatgcgccgtgctgatgggcgctaatctggccaacgaggtggccgagggcaacttttgcgagacgacaatcggctgcacggacaaaaagtacggcaaggtgctgcgtgatctcttccaggccaatcattttcgtgtcgtggtcgttgaggatgccgatgccgttgaggtatgcggtgccctgaagaacattgttgcctgtggtgcgggctttgtcgatggactcaagctgggcgataatactaaggcagcggtcattcgtttgggtcttatggaaatgatacgctttgtcgatgtcttctatccgggcagcaaattgtccacattctttgagagctgcggtgttgcggatcttatcacgacgtgttacggtggtcgcaatcgtcgtgtctctgaggcttttgtcacatctggcaagacaattgaggaactggagaaggagatgctcaatggccagaaattgcagggcccgcccactgccgaggaggttaactatatgttgaaaaacaaaggcctggaggataaattcccattgttcaccgccatacacaaaatttgcacaaatcagcttaagcctaaagatttaatcgattgcatacgcaatcatcccgagcatatgtaa

SEQ ID NO: 58904 - protein, 350 aa, Drosophila flavomontana
MAEKVNVCIVGSGNWGSAIAKIVGANASALPEFEERVTMFVYEEMIDGKKLTEIINETHENVKYLKGHKLPNNVVAVPDLVEAAKNADILIFVVPHQFIPNFCKQLLGKIKPNAIAISLIKGFDKAEGGGIDLISHIITRHLKIPCAVLMGANLANEVAEGNFCETTIGCTDKKYGKVLRDLFQANHFRVVVVEDADAVEVCGALKNIVACGAGFVDGLKLGDNTKAAVIRLGLMEMIRFVDVFYPGSKLSTFFESCGVADLITTCYGGRNRRVSEAFVTSGKTIEELEKEMLNGQKLQGPPTAEEVNYMLKNKGLEDKFPLFTAIHKICTNQLKPKDLIDCIRNHPEHM

SEQ ID NO: 58905 - DNA, 1083 bp, Drosophila ezoana
  CDS (1)..(1083)
atggcggaaaaagtaaatgtttgcatcgtgggctctggcaactggggttcggccatagcgaaaatcgtgggcgccaatgcttccgcgctgcccgagtttgaggagcgcgtcacaatgtttgtctacgaggagatgattgatggcaagaagttaacggaaatcatcaatgaaacgcacgagaatgttaaatacctgaagggacacaaactgccaacaaatgtggttgctgtacctgatctggttgaggctgccaagaatgccgatatactaatctttgtggtgccacatcagtttataccaaatttctgcaaacaattgctgggcaagatcaagccaaatgccattgccatatccctgatcaagggcttcgataaggccgagggcggcggcattgatctgatatcacacattattacccgccatttgaagataccgtgcgccgtgctgatgggcgctaatctcgccaacgaggtggccgagggcaacttttgcgagacgacaatcggctgcacggacaaaaagtacggcaaggtgctgcgtgatctcttccaggccaatcactttcgtgtcgtggtcgtcgaggatgccgatgccgttgaggtgtgcggtgccctaaagaacattgttgcctgtggtgcgggctttgtcgatggactcaagctgggcgataataccaaggcagcggtcattcgtttgggtcttatggaaatgatacgctttgtcgatgtcttctatccgggcagcaaattgtccacattcttcgagagctgcggtgttgcggatctcatcacgacgtgttacggtggtcgcaatcgtcgtgtctcagaggcttttgtcacgtctggcaagacaattgaggaactggaaaaggagatgctcaatggccagaaattgcagggcccgcccactgccgaggaggttaactatatgttgaaaaacaaaggcctggaggataaattcccattgttcaccgccatacacaaaatttgcacaaatcagcttaagcctaaagatttaatcgattgcatacgcaatcatcccgagcatatggatacgttcatcatgccgtcgccaaaactctaa

SEQ ID NO: 58906 - protein, 360 aa, Drosophila ezoana
MAEKVNVCIVGSGNWGSAIAKIVGANASALPEFEERVTMFVYEEMIDGKKLTEIINETHENVKYLKGHKLPTNVVAVPDLVEAAKNADILIFVVPHQFIPNFCKQLLGKIKPNAIAISLIKGFDKAEGGGIDLISHIITRHLKIPCAVLMGANLANEVAEGNFCETTIGCTDKKYGKVLRDLFQANHFRVVVVEDADAVEVCGALKNIVACGAGFVDGLKLGDNTKAAVIRLGLMEMIRFVDVFYPGSKLSTFFESCGVADLITTCYGGRNRRVSEAFVTSGKTIEELEKEMLNGQKLQGPPTAEEVNYMLKNKGLEDKFPLFTAIHKICTNQLKPKDLIDCIRNHPEHMDTFIMPSPKL

SEQ ID NO: 58907 - DNA, 1062 bp, Drosophila ezoana
  CDS (1)..(1062)
atggcggaaaaagtaaatgtttgcatcgtgggctctggcaactggggttcggccatagcgaaaatcgtgggcgccaatgcttccgcgctgcccgagtttgaggagcgcgtcacaatgtttgtctacgaggagatgattgatggcaagaagttaacggaaatcatcaatgaaacgcacgagaatgttaaatacctgaagggacacaaactgccaacaaatgtggttgctgtacctgatctggttgaggctgccaagaatgccgatatactaatctttgtggtgccacatcagtttataccaaatttctgcaaacaattgctgggcaagatcaagccaaatgccattgccatatccctgatcaagggcttcgataaggccgagggcggcggcattgatctgatatcacacattattacccgccatttgaagataccgtgcgccgtgctgatgggcgctaatctcgccaacgaggtggccgagggcaacttttgcgagacgacaatcggctgcacggacaaaaagtacggcaaggtgctgcgtgatctcttccaggccaatcactttcgtgtcgtggtcgtcgaggatgccgatgccgttgaggtgtgcggtgccctaaagaacattgttgcctgtggtgcgggctttgtcgatggactcaagctgggcgataataccaaggcagcggtcattcgtttgggtcttatggaaatgatacgctttgtcgatgtcttctatccgggcagcaaattgtccacattcttcgagagctgcggtgttgcggatctcatcacgacgtgttacggtggtcgcaatcgtcgtgtctcagaggcttttgtcacgtctggcaagacaattgaggaactggaaaaggagatgctcaatggccagaaattgcagggcccgcccactgccgaggaggttaactatatgttgaaaaacaaaggcctggaggataaattcccattgttcaccgccatacacaaaatttgcacaaatcagcttaagcctaaagatttaatcgattgcatacgcaatcatcccgagcatatgcaaactttgtaa

SEQ ID NO: 58908 - protein, 353 aa, Drosophila ezoana
MAEKVNVCIVGSGNWGSAIAKIVGANASALPEFEERVTMFVYEEMIDGKKLTEIINETHENVKYLKGHKLPTNVVAVPDLVEAAKNADILIFVVPHQFIPNFCKQLLGKIKPNAIAISLIKGFDKAEGGGIDLISHIITRHLKIPCAVLMGANLANEVAEGNFCETTIGCTDKKYGKVLRDLFQANHFRVVVVEDADAVEVCGALKNIVACGAGFVDGLKLGDNTKAAVIRLGLMEMIRFVDVFYPGSKLSTFFESCGVADLITTCYGGRNRRVSEAFVTSGKTIEELEKEMLNGQKLQGPPTAEEVNYMLKNKGLEDKFPLFTAIHKICTNQLKPKDLIDCIRNHPEHMQTL

SEQ ID NO: 58909 - DNA, 1062 bp, Drosophila americana
  CDS (1)..(1062)
atggcggaaaaggtaaatgtttgcatcgtgggctctggcaactggggttcggccatagcgaaaatcgtgggcgccaatgcggccgcgctgcccgagtttgaggagcgcgtcacaatgtttgtctacgaggagatgattgatggcaagaagttaacggaaattatcaatgaaacgcacgagaatgttaaatacctgaagggacacaaactgccaacaaatgtggttgccgtacctgatctggttgaggctgccaagaatgccgatatactgatctttgtggtgccacatcagttcataccaaatttctgcaaacaattgctgggcaagatcaagccaaatgccattgccatatccctgatcaagggcttcgataaggccgagggcggcggcattgatctgatatcgcacattattacccgccatttgaagataccatgcgccgtgctgatgggcgctaatctggccaacgaggtggccgagggcaacttttgcgagacgacaatcggctgcacggacaaaaagtacggcaaggtgctgcgtgatctcttccaggccaatcattttcgtgtcgtggtcgttgaggatgccgaagccgttgaggtttgcggtgccctgaagaacattgttgcctgtggtgcgggctttgtcgatggtctcaagctgggcgataatactaaggcagcggtcattcgtttgggtcttatggaaatgatacgctttgtcgatgtcttctatccgggcagcaaattgtccacattctttgagagctgcggtgttgcggatctcatcacgacgtgttacggtggccgcaatcgtcgtgtctccgaggcttttgtcacatctggcaagacaattgaggatctggagaaggagatgctcaatggccagaaattgcagggcccgcccactgccgaggaggttaactatatgttgaaaaacaaaggcctggaggataaattcccattgttcaccgccatacacaaaatttgcacaaatcagcttaagcctaaagatttaatcgattgcatacgcaatcatcccgagcatatgcaaactttgtaa

SEQ ID NO: 58910 - protein, 353 aa, Drosophila americana
MAEKVNVCIVGSGNWGSAIAKIVGANAAALPEFEERVTMFVYEEMIDGKKLTEIINETHENVKYLKGHKLPTNVVAVPDLVEAAKNADILIFVVPHQFIPNFCKQLLGKIKPNAIAISLIKGFDKAEGGGIDLISHIITRHLKIPCAVLMGANLANEVAEGNFCETTIGCTDKKYGKVLRDLFQANHFRVVVVEDAEAVEVCGALKNIVACGAGFVDGLKLGDNTKAAVIRLGLMEMIRFVDVFYPGSKLSTFFESCGVADLITTCYGGRNRRVSEAFVTSGKTIEDLEKEMLNGQKLQGPPTAEEVNYMLKNKGLEDKFPLFTAIHKICTNQLKPKDLIDCIRNHPEHMQTL

SEQ ID NO: 58911 - DNA, 1083 bp, Drosophila lummei
  CDS (1)..(1083)
atggcggaaaaagtaaatgtttgcatcgtgggctctggcaactggggttcggccatagcgaaaatcgtgggcgccaatgcggccgcgctgcccgagtttgaggagcgcgtcacaatgtttgtctacgaggagatgattgatggcaagaagttaacggaaattatcaatgaaacgcacgagaatgttaaatacctgaagggacacaaactgccaacaaatgtggttgccgtacctgatctggttgaggctgccaagaatgccgatatactgatctttgtggtgccacatcagtttataccaaacttctgcaaacaattgctgggcaagatcaagccaaatgccattgccatatccctgatcaagggcttcgataaggccgagggcggcggcattgatctgatatcgcacattattacccgccatttgaagataccatgcgccgtgctgatgggcgctaatctggccaacgaggtggccgagggcaacttttgcgagacgacaatcggctgcacggacaaaaagtacggcaaggtgctgcgtgatctcttccaggccaatcattttcgtgtcgtggtcgttgaggatgccgatgccgttgaggtttgcggtgccctgaagaacattgttgcctgtggtgcgggctttgtcgatggtctcaagctgggcgataatactaaggcagcggtcattcgtttgggtcttatggaaatgatacgttttgtcgatgtcttctatccgggcagcaaattgtccacattctttgagagctgcggtgttgcggatctcatcacgacgtgttatggtggtcgcaatcgtcgtgtctcagaggcttttgtcacatctggcaagacaattgaggatctggagaaggagatgctcaatggccagaaattgcagggcccgcccactgccgaggaggttaactatatgttgaaaaacaaaggcctggaggataaattcccattgttcaccgccatacacaaaatttgcacaaatcagcttaagcctaaagatttaatcgattgcatacgcaatcatcccgagcatatggatacgttcatcatgccgtcgccaaaactctaa

SEQ ID NO: 58912 - protein, 360 aa, Drosophila lummei
MAEKVNVCIVGSGNWGSAIAKIVGANAAALPEFEERVTMFVYEEMIDGKKLTEIINETHENVKYLKGHKLPTNVVAVPDLVEAAKNADILIFVVPHQFIPNFCKQLLGKIKPNAIAISLIKGFDKAEGGGIDLISHIITRHLKIPCAVLMGANLANEVAEGNFCETTIGCTDKKYGKVLRDLFQANHFRVVVVEDADAVEVCGALKNIVACGAGFVDGLKLGDNTKAAVIRLGLMEMIRFVDVFYPGSKLSTFFESCGVADLITTCYGGRNRRVSEAFVTSGKTIEDLEKEMLNGQKLQGPPTAEEVNYMLKNKGLEDKFPLFTAIHKICTNQLKPKDLIDCIRNHPEHMDTFIMPSPKL

SEQ ID NO: 58913 - DNA, 1203 bp, Candida glabrata
  CDS (1)..(1203)
atgtctaactccgctgctggcaggttgaaccagacctctcatatcttgaatgagtctataaagaacgacgacatctcgctgcgccgctctcagccatccaccacgtctttgcaagcccttgagcacccattcaaggtcaccgtgattggttccggtaactggggtaccactattgccaaagttgttgctgagaacactgctttgaacccacacctgtttgtgtcccgtgtggacatgtgggtgttcgaagagaagatcgacggcaagaacctgactgagattatcaatgagcagcacgagaacgtcaagtacttgcctgacatcaagctgcctgagaacctggtcgctaacccaaacctgatcgactcagtgaaaggtgccgacatactgatcttcaacatccctcaccagttcttgccccgtattgtgtcaaacttgaagaaccacgtcgggccacacgtcagagccatctcttgtctgaaaggttttgaagttggcaagaaaggtgtacagcttttgtcctcttatgtgaccgatgagttgggaatacagtgtggtgcactatccggtgctaacttggccccagaagtcgcaaaggagcactggtctgagactaccgttgcttaccacattccaaaggacttcagaggtgaaggaaaggacgttgaccacaagttgctaaaggctctgttccacagaccatacttccatgtcaatgttatcgaagatgttgcaggtatctccattgcaggtgctctaaagaacgttgttgctctgggttgtgggtttgttgagggtctaggctggggtaacaacgctgctgccgcaattcaaagagtcggtctaggtgaaatcatcaagttcggccaaatgttcttcccagaatccagagttcaaacttactaccaagaatctgcaggtgtcgctgatctaattaccacttgctccggtggtagaaacgtcagagttgctaagcatatggccaagaccggtaagtctgctctcgatgccgaaaaggaactactaaatggccagtccgcacagggtatcattacttgtaaagaagtccacgaatggttggagacttgtgagatgactcatgagttcccattgttcgaagcagtctaccaaattgtttacaacaacgtcccaatgaagaacttgccagatatgatcgaagaattggaatgcatcgctgattga

SEQ ID NO: 58914 - protein, 400 aa, Candida glabrata
MSNSAAGRLNQTSHILNESIKNDDISLRRSQPSTTSLQALEHPFKVTVIGSGNWGTTIAKVVAENTALNPHLFVSRVDMWVFEEKIDGKNLTEIINEQHENVKYLPDIKLPENLVANPNLIDSVKGADILIFNIPHQFLPRIVSNLKNHVGPHVRAISCLKGFEVGKKGVQLLSSYVTDELGIQCGALSGANLAPEVAKEHWSETTVAYHIPKDFRGEGKDVDHKLLKALFHRPYFHVNVIEDVAGISIAGALKNVVALGCGFVEGLGWGNNAAAAIQRVGLGEIIKFGQMFFPESRVQTYYQESAGVADLITTCSGGRNVRVAKHMAKTGKSALDAEKELLNGQSAQGIITCKEVHEWLETCEMTHEFPLFEAVYQIVYNNVPMKNLPDMIEELECIAD

SEQ ID NO: 58915 - DNA, 1182 bp, Pichia jadinii
  CDS (1)..(1182)
atgttaaggattggaaagctgaatttgtccacaatgtcctctgctcaacaaagattggcccaagtcggctcacacctcactgctcaaaagcaatcgcttgctccacagcgtccttacaagatcaccgttatcggctctggtaactggggtaccacgattgccaaagttttggctgagaatgccggcttgagacctcacctgttccagcaccaagttgacatgtgggtctttgaagagaagatcaacggcgtgaacttgacggagatcatcaacacacagcatgagaatgtcaagtacttgccgggtattaagcttccaaagaacttgcacgccgagccttccatcgtcaaggctgctgaaggtgccgatttgttggtgttcaacattccacatcaattcttgccaggtatctgcaaacagttgtccaaggcaaccctcaagccacacgtgagagccatctcttgtttgaagggtttggaagtcactccaaacggctgcaagctgctttctacctatatcactgagcacttgggtgtccactgtggtgccctttcaggtgctaacttggctccagaagttgcaaaggagaagtggtctgagaccacagttgcctacagattgccaaatgacttccaaggccacgggaaagatattgaccgttacgtactaagagctgctttccacagaccttacttccatgttcgtgtcattgaagatgttgccggtgtctcacttgctggtgcattgaaaaacgttgttgctctcggtgtcggtttcgtccatggtttgaactggggtgataacgctgcttctgccattcagagatttggtttgaacgagaccatcaagttcgcagaagtcttcttcccaggtgaaaccaaccaggatacctttaccaaggaatctgctggtgttgctgatttgatcacaacctgttctggaggtagaaacgtcagagttgccaaggccatggcaatcactggtaaatctgcagttgaagttgaaagggagttgcttaacggtcaatcagcccaaggtatcatcacctctaaagaagttcacgagttgttggctgcaaagaatttgacaaaggagttcccattgttcgaggccatctaccaaatcgtctatggtactgaatccatcgagagattaccagagttgatcgaagaggatgaatag

SEQ ID NO: 58916 - protein, 393 aa, Pichia jadinii
MLRIGKLNLSTMSSAQQRLAQVGSHLTAQKQSLAPQRPYKITVIGSGNWGTTIAKVLAENAGLRPHLFQHQVDMWVFEEKINGVNLTEIINTQHENVKYLPGIKLPKNLHAEPSIVKAAEGADLLVFNIPHQFLPGICKQLSKATLKPHVRAISCLKGLEVTPNGCKLLSTYITEHLGVHCGALSGANLAPEVAKEKWSETTVAYRLPNDFQGHGKDIDRYVLRAAFHRPYFHVRVIEDVAGVSLAGALKNVVALGVGFVHGLNWGDNAASAIQRFGLNETIKFAEVFFPGETNQDTFTKESAGVADLITTCSGGRNVRVAKAMAITGKSAVEVERELLNGQSAQGIITSKEVHELLAAKNLTKEFPLFEAIYQIVYGTESIERLPELIEEDE

SEQ ID NO: 58917 - DNA, 1197 bp, Yarrowia lipolytica
  CDS (1)..(1197)
atgagcgctctacttagatcgtccctgcgttttaaacacatgtccgccgtcaaccgtctcacacaacagcttcgactgctgaccgcctccgcgcctctcagcgcagccaacaccgccggcaaggctcctttcaaggtcgccgttgttggttctggtaactggggaaccaccgtcgccaagattgtcgccgagaactgcactgctcaccccgagctctttgagcccgaggttcgagtctgggttcgagaagagaaggtcaacggcaagaacctgaccgacattttcaacgctgagcacgagaacgtgcgatacctccctaaaatcaaacttcctcacaacctgatcgccgagccggatctgctcaaggccgtcgagggtgccaacatcatcgtcttcaacctgccccatcagttcctggctggtgtctgcaagcagctcaagggccacgtcaaccccaaggctagagccatctcctgcctcaagggtctagatgtcaccccccagggtgtttacctgctctccgacgttatcgagaacgagaccggtctccactgcggtgttctgtccggggctaacctcgccaccgagatcgctctggagaagtactccgagactaccgttgcttacaaccgacccaaggacttctttggcgagggtgatgtgaccaacgatgtgctcaaggctctgttccaccgaccctacttccatgtgcgatgcgttcaggacgtcgccggtgtctccatcggaggtgcccttaagaacgttgttgccctttgcgccggtttcgtcgagggcaagaactggggagacaacgccaaggccgcaattatgcgacgaggcatgcttgagatgatcaacttctccaagcgattcttccccgaaactgatattaacactcttacagtcgagtctgccggtgtggccgatctcatcacctcgtgcgctggaggccgaaacttcaaggtcggccgagcattcggaaaggagagcggctccggcaagaccatccaggacgtggagaaggagcttctcaacggccagtccgcccagggcgtcatcacatgtaacgaggtccacgagctgctcaagaacaagaacatgcagaaggacttccctctgttcgagtccacctggggcattatccacggtgagctcaagattgatgatctccccgagattctttaccacgccaactag

SEQ ID NO: 58918 - protein, 398 aa, Yarrowia lipolytica
MSALLRSSLRFKHMSAVNRLTQQLRLLTASAPLSAANTAGKAPFKVAVVGSGNWGTTVAKIVAENCTAHPELFEPEVRVWVREEKVNGKNLTDIFNAEHENVRYLPKIKLPHNLIAEPDLLKAVEGANIIVFNLPHQFLAGVCKQLKGHVNPKARAISCLKGLDVTPQGVYLLSDVIENETGLHCGVLSGANLATEIALEKYSETTVAYNRPKDFFGEGDVTNDVLKALFHRPYFHVRCVQDVAGVSIGGALKNVVALCAGFVEGKNWGDNAKAAIMRRGMLEMINFSKRFFPETDINTLTVESAGVADLITSCAGGRNFKVGRAFGKESGSGKTIQDVEKELLNGQSAQGVITCNEVHELLKNKNMQKDFPLFESTWGIIHGELKIDDLPEILYHAN

SEQ ID NO: 58919 - DNA, 1206 bp, Zygosaccharomyces rouxii
  CDS (1)..(1206)
atggccgctactgacagattaaaccaaacctctgatatcctatcgcaatctatgaagaagaccgactcatcaatgtcagtcgttaccgctgagaatccatacaaagtttccgtcgtcggctctggtaactggggtaccaccatcgccaaggtcgttgccgaaaacaccaaggaaaagccagaattgttccaagaacgtgtggacatgtgggtgtttgaagaacagatcgacggtactccattggcccaaatcatcaacaccaagcaccagaacgtgaaatacttgccaaacatcgaccttccggacaatttggtcgctaacccagacttgattgccaccacgaaggacgccgatgtgattgttttcaacgttccccatcaatttttgggccgtatcgttgctcaaatgaagggtcaaatcaaaccaactgcacgtgcggtctcctgtctaaagggtttcgaagttggtccaaagggtgtgcagcttctatctgactacgtcactcaagaattgggtatcgaatgtggtgctctatctggtgctaacttggccccagaagtcgccaaggaacactggtccgagaccaccgtcgcttaccacatcccagacgacttcaagggtgacggtaaggacatcgaccaccgtgtcttgaagcagttgttccacagaccatacttccacgtgaatgtgattgacgatgttgctggtatctccatcgcaggtgcattgaagaacgtggtcgccttgggttgcggtttcgttaccggtctaggttggggtaacaacgccgccgccgccatccaacgtgtcggtttgggtgaaatcatcaagttcggtaggatgttcttcccagaatccaaggtggagacttactaccaagaatccgcaggtgttgctgacttgatcaccacctgttccggtggtagaaacgtccgtgttgccaccgaaatggccaagactggtaagagcggtgagcaagtcgaaaaagacatcttgaacggtcaatccgctcaaggtttggtcacctgtaaggaagttcaccagtggttagaatctagtggaaacaccgaagacttcccattgttcgaggctgtctaccagatcacttacgaaaacgtgcccatgaaggagttgccatctatgatcgaagaattggatatcgatagcacatcgaagtgcgtattgagttacaagatgggtctctag

SEQ ID NO: 58920 - protein, 401 aa, Zygosaccharomyces rouxii
MAATDRLNQTSDILSQSMKKTDSSMSVVTAENPYKVSVVGSGNWGTTIAKVVAENTKEKPELFQERVDMWVFEEQIDGTPLAQIINTKHQNVKYLPNIDLPDNLVANPDLIATTKDADVIVFNVPHQFLGRIVAQMKGQIKPTARAVSCLKGFEVGPKGVQLLSDYVTQELGIECGALSGANLAPEVAKEHWSETTVAYHIPDDFKGDGKDIDHRVLKQLFHRPYFHVNVIDDVAGISIAGALKNVVALGCGFVTGLGWGNNAAAAIQRVGLGEIIKFGRMFFPESKVETYYQESAGVADLITTCSGGRNVRVATEMAKTGKSGEQVEKDILNGQSAQGLVTCKEVHQWLESSGNTEDFPLFEAVYQITYENVPMKELPSMIEELDIDSTSKCVLSYKMGL

SEQ ID NO: 58921 - DNA, 1269 bp, Candida glabrata
  CDS (1)..(1269)
atgtttgttcggttagccaggatacccaggatcacacgccactatcgcttaggattattttcgacacagccgaaacctaaacctaacgagtatctgtactatcgaaacaaacacaagtctaaaatggaagctccaatcaagagatcaagctctgctgtctccctagttgaactagagagagagccattcaaggtcactgttatcggttctggtaactggggtaccaccatcgccaaggttgtcgctgagaacaccaaggccaaccctcaggtcttccaggaaagagtcgacatgtgggtcttcgacgagaacatcgacggcaccatgctgaccgagatcatcaacaccaagcaccagaacgtcaagtacttgccaaacattgacctgccagagaacctggtcgccaatccagacttgctgaagtctgtcgagggcgccgacatcctggtcttcaacatcccacatcagttcttgcctaagatcgtcgaccaactgcgtggtcacgtcgaacctcacgtcagagccatctcctgtctaaagggtttcgaggtcggcaagaagggtgtccaattgctaagcacatacatcaccgaagagctaggcatcgagtgtggtgccctatcgggtgctaacctggccccagaggtcgccaaggagcactggtccgaaaccaccgtcgcttaccacattccaaaggactaccaaggtgacggtatggacgtcgaccacaaggtcctaaagctgctgttccacagaccatacttccacgtcagtgtcatcgacgatgtcgccggtatctccatcgccggtgccctaaagaacgtcgtcgccctaggttgtggtttcgtcgagggtctaggctggggtaacaacgccgccgccgccatccaaagagtcggtctaggtgagatcatcaagttcggtcaaatgttcttccctgaatccagagtcgaaacctactaccaagagtccgccggtgtcgccgacttgatcaccacctgttccggtggtagaaacgttagagtcgccacccacatggccaagaccggtaagtctgccgaggactccgaaaaggaattgctaaacggccaatccgctcaaggtgtcatcacatgtaaggaagtccacgaatggttgtccacttgtgaaatgattgaagagttcccattgttcgaagccgtctacaagattgtttacgaggatgtcccaatgcacaagctaccagaaatgatcgaagaattggatgacattgttgttgctggccaataa

SEQ ID NO: 58922 - protein, 422 aa, Candida glabrata
MFVRLARIPRITRHYRLGLFSTQPKPKPNEYLYYRNKHKSKMEAPIKRSSSAVSLVELEREPFKVTVIGSGNWGTTIAKVVAENTKANPQVFQERVDMWVFDENIDGTMLTEIINTKHQNVKYLPNIDLPENLVANPDLLKSVEGADILVFNIPHQFLPKIVDQLRGHVEPHVRAISCLKGFEVGKKGVQLLSTYITEELGIECGALSGANLAPEVAKEHWSETTVAYHIPKDYQGDGMDVDHKVLKLLFHRPYFHVSVIDDVAGISIAGALKNVVALGCGFVEGLGWGNNAAAAIQRVGLGEIIKFGQMFFPESRVETYYQESAGVADLITTCSGGRNVRVATHMAKTGKSAEDSEKELLNGQSAQGVITCKEVHEWLSTCEMIEEFPLFEAVYKIVYEDVPMHKLPEMIEELDDIVVAGQ

SEQ ID NO: 58923 - DNA, 1185 bp, Pichia jadinii
  CDS (1)..(1185)
atgactgatatcggagaatccgagagtgacatatcaacagacgtttccgcattgccaatgcttagccatagtgtgtcatacacgtcgattcagaagcctccgtttgttgtctcggtcattgggtctggtaactggggtaccacagtggccaagatcattgccgagaacacaagggagaacccgttgctgtttgagcagaaggtgagaatgtgggtgtacgaggaggagttcgaaggctccaacctttccgacatcatcaacactgagcacgtgaacaagaagtaccttcctggtatcaagttgccggataacttggttgcggtgcctgacctgttggaggctgtccagtactccaacatcctgatcttcaacatcccacaccagcatctggagaagatcctgagccagcttcgtggtaacattgatccacgagcacgtgcgatctcctgtcttaaggggcttcgtgtcaatttagatggtgttgagctactaccagatatcatccaagatgcactgggtatccactgtggtgttcttgccggagccaacttggcacaagaggtggcagaacagagattcagtgagaccaccgttggatatccattgccggcagattataagcctggtgatgttgaccataccgttctctatacgctgtttcacagaccttacttccatgtccatgtcattgaggatattgccggtatctcttgcgcgggggccttgaagaacatcattgccatctctgtcggattcgtcgaaggtttggagtggggtgataatgcgaaggctgcgatgctgagacgtggattgttagaaatgatcaaattcggtcgtaagttcttccctggttgtcttgtcagttcgttcacagaagaaagtgcaggtgtcgctgatctcttcacaacatgtaccggtggtcgtaacttcaagctggccaagatcatggctcagaccggtaagtcggctcatgaggttgaaaaggagattcttaacggtcagagtgcgcaaggtttaatcactgcgaaggagatccacgagctgatcaagaacaaagggtgtgaagaagagttcccattattcgaaaccacctaccagattcttttccacggagtgcgtattggcattctaccttacatgttggagaacaagtggtccatctctaagccaaactattccagttga

SEQ ID NO: 58924 - protein, 394 aa, Pichia jadinii
MTDIGESESDISTDVSALPMLSHSVSYTSIQKPPFVVSVIGSGNWGTTVAKIIAENTRENPLLFEQKVRMWVYEEEFEGSNLSDIINTEHVNKKYLPGIKLPDNLVAVPDLLEAVQYSNILIFNIPHQHLEKILSQLRGNIDPRARAISCLKGLRVNLDGVELLPDIIQDALGIHCGVLAGANLAQEVAEQRFSETTVGYPLPADYKPGDVDHTVLYTLFHRPYFHVHVIEDIAGISCAGALKNIIAISVGFVEGLEWGDNAKAAMLRRGLLEMIKFGRKFFPGCLVSSFTEESAGVADLFTTCTGGRNFKLAKIMAQTGKSAHEVEKEILNGQSAQGLITAKEIHELIKNKGCEEEFPLFETTYQILFHGVRIGILPYMLENKWSISKPNYSS

SEQ ID NO: 58925 - DNA, 1170 bp, Zygosaccharomyces rouxii
  CDS (1)..(1170)
atggccgccactgacagattaaaccaaacctccgatatcctatctcattctatgaagaagactgatacctcaatgtcaattgttaccgctgagaatccttacaaggtcgctgttgtcggttctggtaactggggtaccactatcgctaaggttgttgccgaaaacaccaaagaaaagccagagttgttccaaggacgtgtggacatgtgggttttcgaagaacaaatcgatggtactccattgactcaaatcatcaacaccaaacaccaaaacgtcaaataccttccaaacatcgatcttccggggaatttggtcgctaacccagatttgatctctactaccaaggacgctgatgtcatcgttttcaacgttcctcaccaatttttgggccgtatcgtttctcaaatgaagggtcaaatcaaaccagatgctcgtgccatctcctgtctaaagggtttcgaagttggtccaaagggtgtccaactactttctgactacgtcactcaagaattaggtatccaatgtggtgccctatctggtgctaacttggctccagaagtcgccaaggaacactggtccgaaactaccgtcgcttaccaagtcccagatgacttcaagggtgaaggtaaagatatcgaccaccgtgtcttgaaacaattgttccacagaccatacttccacgtcaatgtgatcgacgatgttgctggtatttctatcgcaggtgcattgaagaacgtggttgccttgggttgcggtttcgtcaccggtctaggctggggtaacaacgctgccgccgccatccaacgtgttggtttgggtgaaatcatcaagttcggtagaatgttcttcccagaatccaaggtggaaacttactaccaagaatctgcaggtgttgctgatttgatcactacctgttccggtggtagaaacgttcgtgtcgccactgaaatggccaagactggtaagagcggtgaacaagtcgaaaaggacatcttgaacggtcaatccgctcaaggtttgattactgctaaggaagtccaccaatggttggaatccagcggtcacaccgaagaatacccattgtttgaagccgtctaccaaatcacttacgaaaacgtgcccatgaaggagttgccatccatgatcgaagaattggatatcgtagaataa

SEQ ID NO: 58926 - protein, 389 aa, Zygosaccharomyces rouxii
MAATDRLNQTSDILSHSMKKTDTSMSIVTAENPYKVAVVGSGNWGTTIAKVVAENTKEKPELFQGRVDMWVFEEQIDGTPLTQIINTKHQNVKYLPNIDLPGNLVANPDLISTTKDADVIVFNVPHQFLGRIVSQMKGQIKPDARAISCLKGFEVGPKGVQLLSDYVTQELGIQCGALSGANLAPEVAKEHWSETTVAYQVPDDFKGEGKDIDHRVLKQLFHRPYFHVNVIDDVAGISIAGALKNVVALGCGFVTGLGWGNNAAAAIQRVGLGEIIKFGRMFFPESKVETYYQESAGVADLITTCSGGRNVRVATEMAKTGKSGEQVEKDILNGQSAQGLITAKEVHQWLESSGHTEEYPLFEAVYQITYENVPMKELPSMIEELDIVE

SEQ ID NO: 58927 - DNA, 1002 bp, Mycobacterium paratuberculosis
  CDS (1)..(1002): transl_table=11
atgggcgccggggcgtggggcaccgcgctggccaaggtgctcgtcgacgccggcggccccggaacagaggttacgctgtgggcccgcaggcccgagctcgctgaacggatcaacgcgacccgatcgaaccccgactatctgcccgggacgtcgttgccgccgggcattcacgccaccgcggacgccggcgaggcgctgcgggacgcgacgacggtgctgctgggcgtgccggcgcaggcgatgcgcgccaacctcgagcgctgggcgccgctgctgcgggacggggcgaccctggtcagcctggccaagggcatcgagttgggcaccctgatgcggatgagccaggtcatcgtctcggtgaccggcgtcgacccggctcaggtcgcggtgatctcgggaccgaacctggccagcgagatcgccgcgtgccagcccgccgcgacggtggtggcgtgcagcgactccggccgcgccgtcgccctgcagcgcatgctcaacagcggatacttccggccctacaccaacagcgatgtggtcggcaccgagatcggcggggcgtgcaagaacgtgatcgcgctggcctgcgggatggccgccggcgtgggcctcggcgagaacaccgcggcggccatcatcacccgggggctggccgagatcatgcggctgggcatcgcgctcggcgccaagggcgcgacgctggccgggctggccggggtgggcgacctggtcgccacctgcagctcgccgcactcccgcaaccgttcgctgggcgagcggctcggccgcggggcaaccatcggttcggtgctcgccggtagccccgacggcggcgacgggcacgtcgtcgagggcgtgacgtcctgccagtcggtgctggcgctggccgccagctacgacgtggaaatgccgctcaccgacgcggtgcaccgggtctgccacaaggggctgtccgtcgatgaggcgatggcgctgttgctgggccggcgcaccaagccagaatga

SEQ ID NO: 58928 - protein, 333 aa, Mycobacterium paratuberculosis
MGAGAWGTALAKVLVDAGGPGTEVTLWARRPELAERINATRSNPDYLPGTSLPPGIHATADAGEALRDATTVLLGVPAQAMRANLERWAPLLRDGATLVSLAKGIELGTLMRMSQVIVSVTGVDPAQVAVISGPNLASEIAACQPAATVVACSDSGRAVALQRMLNSGYFRPYTNSDVVGTEIGGACKNVIALACGMAAGVGLGENTAAAIITRGLAEIMRLGIALGAKGATLAGLAGVGDLVATCSSPHSRNRSLGERLGRGATIGSVLAGSPDGGDGHVVEGVTSCQSVLALAASYDVEMPLTDAVHRVCHKGLSVDEAMALLLGRRTKPE

SEQ ID NO: 58929 - DNA, 1002 bp, Sphingopyxis alaskensis
  CDS (1)..(1002): transl_table=11
atgcgcctcaaagtgggcctgctcggcgggggcagctggggaacgacggtcgcggcggtcgtgtcgcgcaacgcgccgatccagctatgggcgcgcgacgcggaaacggtcgagggcatcaaccgcgatcacgaaaaccgcaaatatctgcccggcatcacgctgccccccgcgctcggcgcgaccagcgacatggccgaggtcgttgcgggcgccgacgtgctcgtcatggcggtgccctcgcacagtttccgcagcgtgttggaggaggctcgcgatcatatccgcccgtgggtgccggtcatcagcctcacgaaaggactcgaactcgcctcgggcaagcgcatgaccgaattgatcgaggacgtgctgcccggccaccccgtcggcgtgctcaccgggcccaacctcgcgcgcgagatcatggcgggacaggcggcggcgagcgtgctctcgatggcggacgaaatcgtcgtccgtgcgctccagccgctgttccattcgggcctgttccgcgtctacaccaacaccgacctgctcggctgcgagctcggcggggtgctcaagaatatcatcgcgatcgcggtgggcatgggcgacgggctcggcgccggcgacaatacgcgcgccggcctgatgacgcgcgggctggcggagatcacgcgcctcggtgtcgcgatgggcgggcgccctgaaaccttcgccgggctcaccggcatgggcgacctgatcgcgacctgcaccagccccctgtcgcgcaaccgccacgtcggcgtcgaactcggcaaggggcgcccgatcgacgcgatcatcgcgggcatgaacatggtcgcggagggcgtgaaaagcgcgccgacggttatggcgctcgccgaccgccacggcatcgcgatgccgatcgcgcgcgacgtgttcgacgtgacgcagggcaagcgaacggccatggatgtcttccgcggcctattgaaatcgagcgtcggcgacgaggcgcatccggggtag

SEQ ID NO: 58930 - protein, 333 aa, Sphingopyxis alaskensis
MRLKVGLLGGGSWGTTVAAVVSRNAPIQLWARDAETVEGINRDHENRKYLPGITLPPALGATSDMAEVVAGADVLVMAVPSHSFRSVLEEARDHIRPWVPVISLTKGLELASGKRMTELIEDVLPGHPVGVLTGPNLAREIMAGQAAASVLSMADEIVVRALQPLFHSGLFRVYTNTDLLGCELGGVLKNIIAIAVGMGDGLGAGDNTRAGLMTRGLAEITRLGVAMGGRPETFAGLTGMGDLIATCTSPLSRNRHVGVELGKGRPIDAIIAGMNMVAEGVKSAPTVMALADRHGIAMPIARDVFDVTQGKRTAMDVFRGLLKSSVGDEAHPG

SEQ ID NO: 58931 - DNA, 984 bp, Agrobacterium tumefaciens
  CDS (1)..(984): transl_table=11
atgcagcgggaaaaaatcgtcgtcatcggcgccggtgccttcggaaccgcgcttgccgtcgtcatcgcgctggaaaaccggcatgatgtgaccctgctcggccgcgatccgtcgctgatggccgatctaaggaacgaacgcgtacacgaggccgccctaccgggtgtggagttgccggatgcacttggattctcggccgagcctgacgtgctggctggcgccagtatcgtgttgttcgccatgccttcgcaggcccatgccgacgcggcccaacactatggcccttatctggccagtgactctatcatcgtcacctgcgcgaaaggtatcgaccgcaactccggtcgtctgctgacggaacttctggagacggaactgccgcatcatcccattgctgttctgtccgggccgggctttgctgccgatatcgcgcgcggcttgccgaccgccatggcgattgcggcggaggacgccacggttgccgaacggctggcgaccacgatttcgggcaagaccttccggctttatgcctcgacggaccgcatcggcgtgcagcttggcggtgcgctgaagaatgttctcgccattgccgccggcattgtcgaaggagcggggctcggcgattccgcccgggcggcgctgatttcgcgtgggcttgccgaaatgtctcgtctcatcgtcgccatgggcggcaaggccgatacggtgcgcggtctttccggcctcggcgatctggtgctgaccgccaccagccaccagtcgcgcaacctgcgtttcggcatcgcgcttggccggggtgagggcaaggacatgtccggcgggctggtggagggtgcctttgcggcagccgttgccgctcggctcggcgaacaccacgcaatcgacatgccggtgaccgaggcggtggccgccattattgatggcaatctggatgtggcgagcgccatgcaacaattgatgacacggccgatcaccaccgaatga

SEQ ID NO: 58932 - protein, 327 aa, Agrobacterium tumefaciens
MQREKIVVIGAGAFGTALAVVIALENRHDVTLLGRDPSLMADLRNERVHEAALPGVELPDALGFSAEPDVLAGASIVLFAMPSQAHADAAQHYGPYLASDSIIVTCAKGIDRNSGRLLTELLETELPHHPIAVLSGPGFAADIARGLPTAMAIAAEDATVAERLATTISGKTFRLYASTDRIGVQLGGALKNVLAIAAGIVEGAGLGDSARAALISRGLAEMSRLIVAMGGKADTVRGLSGLGDLVLTATSHQSRNLRFGIALGRGEGKDMSGGLVEGAFAAAVAARLGEHHAIDMPVTEAVAAIIDGNLDVASAMQQLMTRPITTE

SEQ ID NO: 58933 - DNA, 1023 bp, Bacillus anthracis
  CDS (1)..(1023): transl_table=11
atgacaaaaatcacagtagttggagcaggtagctggggaacagcgttagcgatggtattagctgacaatgggcatgatgtacgtatttggggaaatcgttctgaacttatggatgagattaatacaaaacatgagaatagtcgatatctcccaggaattacattgccaagcacaatcgtagcctactcttctttagaagaagcattagtagatgtaaatgtagtacttattgtagtaccaacgaaagcgtatagagaagtactgcaagatatgaagaaatatgtagcaggcccgactacttggattcatgcaagtaaaggaattgaacctggtacgtcaaaacgtatttcggaagtgattgaggaagaaattccagaggacttgattaaagatgttgttgtattgtctggaccgagtcatgctgaagaagtagggttgcgtcaagcgacaactgttacgtctgcagcaaagcgtatggaagcggctgaggaagtacaagatttgtttatgaatagttacttccgtgtatacacaaatccagatatcgttggagttgaacttggtggtgcgttaaaaaatattatcgcattagctgctgggataactgatggtcttggattaggtgataatgcaaaagcggcattgatgacacgtggtttaacggagattgctcgtttaggaagaaaaatgggcggaaatccgttaacgtttgctggactaactggtatgggtgacttaattgtaacttgtacaagtgttcatagccgaaattggcgcgctggaaatatgcttggaaaaggacactctttagaagaagtgttagaaagcatgggtatggttgtcgaaggtgtaagaacaacgaaagctgctcatgaattggcagaaaaaatggaagtagaaatgccgattacagctgctttatatgatgtgctattcaatgggaataatgtaaaagatgcagtaggctcattaatggggcgtgttcgaaaacacgaagtggaagctatacctgacttactttaa

SEQ ID NO: 58934 - protein, 340 aa, Bacillus anthracis
MTKITVVGAGSWGTALAMVLADNGHDVRIWGNRSELMDEINTKHENSRYLPGITLPSTIVAYSSLEEALVDVNVVLIVVPTKAYREVLQDMKKYVAGPTTWIHASKGIEPGTSKRISEVIEEEIPEDLIKDVVVLSGPSHAEEVGLRQATTVTSAAKRMEAAEEVQDLFMNSYFRVYTNPDIVGVELGGALKNIIALAAGITDGLGLGDNAKAALMTRGLTEIARLGRKMGGNPLTFAGLTGMGDLIVTCTSVHSRNWRAGNMLGKGHSLEEVLESMGMVVEGVRTTKAAHELAEKMEVEMPITAALYDVLFNGNNVKDAVGSLMGRVRKHEVEAIPDLL

SEQ ID NO: 58935 - DNA, 1023 bp, Bacillus cereus
  CDS (1)..(1023): transl_table=11
atgacaaaaatcacagtagtaggagcaggtagctggggaacagcgttagcgatggtattagctgacaatggacatgatgtacgtatttggggaaatcgcccagaacttatggatgaaattaatacgaaacatgagaatagtcgatatctcccaggcattacattgccaagcacaatcgtagcctactcttctttagaagaagcattagtagatgtaaatacagtactgctagtagtaccaacgaaagcgtacagagatgtattacaagagatgaaagaaattgttactgaaccaattacttggattcatgcgagcaaaggaattgaacctggtacgtcaaaacgtatttcggaagtgattgaggaagaaattccagagcacttaattaaagatgttgttgtactgtctggaccgagtcatgctgaagaagtcggtttacgacaagcgacaacagttacgtctgcagcaaagcgtatggaagcggctgaggaagtacaagatttatttatgaatagttattttcgtgtatacacaaatccagatatcgttggagttgaacttggtggtgcgttaaaaaatattatcgcattagctgctggtataactgatggtcttggattaggtgataatgcaaaggcggcattgatgacacgtggtttaacagagattgctcgtttaggaagaaaaatgggcgggaatccgttaacgtttgctggtctaactggtatgggagacttaattgtaacttgtacaagtgttcatagccgaaattggcgcgctggaaatatgcttggaaaaggacactctttagaagaagtgttagaaagcatgggtatggttgtggaaggtgtaagaacaacgaaagctgctcatgaattggcagagaaaatggaagttgaaatgccgattacagctgctttatatgacgtgctgttcaatgggaataacgtaaaagatgcagtaggctcattgatgggacgtgttcgaaaacatgaagtggaagctatacctgatttactgtaa

SEQ ID NO: 58936 - protein, 340 aa, Bacillus cereus
MTKITVVGAGSWGTALAMVLADNGHDVRIWGNRPELMDEINTKHENSRYLPGITLPSTIVAYSSLEEALVDVNTVLLVVPTKAYRDVLQEMKEIVTEPITWIHASKGIEPGTSKRISEVIEEEIPEHLIKDVVVLSGPSHAEEVGLRQATTVTSAAKRMEAAEEVQDLFMNSYFRVYTNPDIVGVELGGALKNIIALAAGITDGLGLGDNAKAALMTRGLTEIARLGRKMGGNPLTFAGLTGMGDLIVTCTSVHSRNWRAGNMLGKGHSLEEVLESMGMVVEGVRTTKAAHELAEKMEVEMPITAALYDVLFNGNNVKDAVGSLMGRVRKHEVEAIPDLL

SEQ ID NO: 58937 - DNA, 1023 bp, Bacillus cereus
  CDS (1)..(1023): transl_table=11
atgacaaaaatcacagtagttggagcaggtagctggggaacagcgttagcgatggtattagctgacaatgggcatgatgtacgtatttggggaaatcgttctgaacttatggatgagattaatacaaaacatgagaatagtcgatatctcccaggaattacattgccaagcacaatcgtagcctactcttctttagaagaagcattagtagatgtaaatgtagtacttcttgtagtaccaacgaaagcgtatagagaagtactgcaagatatgaagaaatatgtagcaggcccgactacttggattcatgcaagtaaaggaattgaacctggtacgtcaaaacgtatttcggaagtgattgaggaagaaattccagaggacttgattaaagatgttgttgtactgtctggaccgagtcatgctgaagaagtagggttgcgtcaagcgacaactgttacgtctgcagcaaagcgtatggaagcggctgaggaagtacaagatttgtttatgaatagttacttccgtgtatacacaaatccagatatcgttggagttgaacttggtggtgcgttaaaaaatattatcgcattagctgctgggataactgatggccttggattaggtgataatgcaaaagcggcattgatgacacgtggtttaacggagattgctcgtttaggaagaaaaatgggcggaaatccgttaacgtttgctggactaactggtatgggtgacttaattgtaacttgtacaagtgttcatagccgaaattggcgtgctggaaatatgcttggaaaaggacactctttagaagaagtgttagaaagtatgggtatggttgtcgaaggtgtaagaacaacgaaagctgctcatgaattggcagaaaaaatggaagtagaaatgccgattacagctgctttatatgatgtgctattcaatgggaataatgtaaaagatgcagtaggctcattaatggggcgtgttcgaaaacatgaagtggaagctatacctgacttactttaa

SEQ ID NO: 58938 - protein, 340 aa, Bacillus cereus
MTKITVVGAGSWGTALAMVLADNGHDVRIWGNRSELMDEINTKHENSRYLPGITLPSTIVAYSSLEEALVDVNVVLLVVPTKAYREVLQDMKKYVAGPTTWIHASKGIEPGTSKRISEVIEEEIPEDLIKDVVVLSGPSHAEEVGLRQATTVTSAAKRMEAAEEVQDLFMNSYFRVYTNPDIVGVELGGALKNIIALAAGITDGLGLGDNAKAALMTRGLTEIARLGRKMGGNPLTFAGLTGMGDLIVTCTSVHSRNWRAGNMLGKGHSLEEVLESMGMVVEGVRTTKAAHELAEKMEVEMPITAALYDVLFNGNNVKDAVGSLMGRVRKHEVEAIPDLL

SEQ ID NO: 58939 - DNA, 1041 bp, Bacillus licheniformis
  CDS (1)..(1041): transl_table=11
atgacaaaagtatcgattttgggagccggaagctggggaacagccttggcgctcgttttggcggacaaccagtacgatgtgtgcatatggggccatcgtgaagaactgattcagcaaatcaatgaacatcatgaaaacaaagattatctgccgggtgtcaaactttctgaaaacgtgcgtgccacaacagatcttgaagctgcagtggctgatgtcaagacgatcattgtcgccgttccgacaaaagcgatccgcgaagttttggcacaggctgtttccttcatcaaccaaaaggcgatttttgtacatgtttcaaaaggaattgagcctgacacactgcttcgaatttctgaaatgatgaaagaagaaattccggctgaattaagggaggacatcgtcgttctgtccggaccgagccatgcggaagaagtcggtttaaggcatccgacgacagtaacggtatctgccgacagcagcattgaatcggcccaggcgatccaggatatgtttatgaaccagaatttccgcgtgtatacgaatccggatatgatcggcgtagagatcggcggcgcgctgaaaaacgtcattgcgcttgccgcgggcattacagacggtttgggatacggagataatgcgaaagccgcgctgattacaaggggcttggcagaaatcgcccggctcggcacaaaaatgggcggaaatccgctgacattctcgggtcttactggaatcggggacttgatcgtcacctgcacaagcgtccattcacgaaattggcgagccggtaatatgctgggtaaaggcttcaagctggatgaagttctggaagaaatggggatggtcgtcgagggggtccgcacgacaaaagccgcttatcagctttcaaagaaatttgatgtaaaaatgccgatcaccgaagcactgcacaaagtattgtttgacggcgaaaaagttgagacggcagtcgaatcattgatggcaagagtcaaaacacacgagatggaagatcttgtgaacacattcgaaaatcaaatgaaatga

SEQ ID NO: 58940 - protein, 346 aa, Bacillus licheniformis
MTKVSILGAGSWGTALALVLADNQYDVCIWGHREELIQQINEHHENKDYLPGVKLSENVRATTDLEAAVADVKTIIVAVPTKAIREVLAQAVSFINQKAIFVHVSKGIEPDTLLRISEMMKEEIPAELREDIVVLSGPSHAEEVGLRHPTTVTVSADSSIESAQAIQDMFMNQNFRVYTNPDMIGVEIGGALKNVIALAAGITDGLGYGDNAKAALITRGLAEIARLGTKMGGNPLTFSGLTGIGDLIVTCTSVHSRNWRAGNMLGKGFKLDEVLEEMGMVVEGVRTTKAAYQLSKKFDVKMPITEALHKVLFDGEKVETAVESLMARVKTHEMEDLVNTFENQMK

SEQ ID NO: 58941 - DNA, 1023 bp, Bacillus clausii
  CDS (1)..(1023): transl_table=11
atgcaaaaaattgcggtgattggagcgggaagctggggaagcgctttagcgatggttctcgcggataatggccatgatgttcgcctcgtcgggcgccgacaagaacaaatggacgaattgaacgaacgtcatacaaatgaatcatatttgccgaacatcgaattgccaacaacgattcgcggttatacagggatggaggaagcgcttggtggagttgaagctatcgtactagtcgttccgactaaagcgatgcgtgaaactgtccgtaaaatcgtgccctatttgcaaaaggcggtaccggttattcacgcaagcaaagggattgaacctgcgactcataagcggatatctgaaatgatcgctgaagaagatgcaagcacaaatcgcatttcttctatcaccgttttatctggtcccagtcatgccgaagaagtcgcattgcgccaaccgacaaccgttacagttgcttcagcggatgatgaggcagccaagtatacgcaaaatttgtttatgaaccaacagtttcgtgtctataccaaccctgacttgatcggcgttgaaatcggaggggcactaaaaaacattattgcactagcctgtggtgtgacaaatggccttggttacggggacaatacaaaagcagcgatcatgacgagaggattagcggaaatctctcgcttaggcacgacaatgggcgccaaaccattaacgttttccggtttgtcagggctcggcgatttaatcgttacttgcacaagtgtgcattcacgtaactggcgtgctggacgaatgattggcgaaggtttgtccatggatgaagtgcttgaaaaaatgggaatggtagtcgaaggaattcgaacaacccaggcagcctatgaactatccgaaaagctggagattgatatgccagtgaccaaagcgctctatagtgtcttgtttaacggaatcgacccttaccaagcggctgaagaattaatgggacgtgtaaaacgacatgaagtggagtcgctttaccgttcgtaa

SEQ ID NO: 58942 - protein, 340 aa, Bacillus clausii
MQKIAVIGAGSWGSALAMVLADNGHDVRLVGRRQEQMDELNERHTNESYLPNIELPTTIRGYTGMEEALGGVEAIVLVVPTKAMRETVRKIVPYLQKAVPVIHASKGIEPATHKRISEMIAEEDASTNRISSITVLSGPSHAEEVALRQPTTVTVASADDEAAKYTQNLFMNQQFRVYTNPDLIGVEIGGALKNIIALACGVTNGLGYGDNTKAAIMTRGLAEISRLGTTMGAKPLTFSGLSGLGDLIVTCTSVHSRNWRAGRMIGEGLSMDEVLEKMGMVVEGIRTTQAAYELSEKLEIDMPVTKALYSVLFNGIDPYQAAEELMGRVKRHEVESLYRS

SEQ ID NO: 58943 - DNA, 1038 bp, Bacillus subtilis
  CDS (1)..(1038): transl_table=11
atgaaaaaagtcacaatgcttggagcggggagttggggaacagcactggctttagttctaactgataatggaaatgaagtgtgtgtgtgggctcaccgtgcagatttaattcatcaaattaatgagttgcatgaaaacaaagattatttgccgaatgttaagctgtctacatccattaaaggaacaacagatatgaaagaggctgtttcagacgcagatgtcattatcgttgcggtcccgacaaaagcaattcgggaagtgctgagacaggctgtcccttttataacgaaaaaggcagtctttgttcatgtcagcaagggtattgagccagattcacttctgcgcatttctgaaattatggaaattgagctcccgagtgatgtcagaaaagatatcgttgtcctttccggcccgagtcatgcggaagaagtagggctgcggcaccccacaactgttactgcatcttcaaagagcatgagggcagcagaagaggtgcaggatctatttattaatcacaattttcgggtgtacacaaatcctgacattatcggagttgaaatcggaggggctttaaaaaatattattgcccttgctgcaggaattacagatggtttagggtacggtgacaatgccaaagctgctttgattacacgcggacttgccgaaatcgcgagactcggaacgaaaatgggcggaaatcccttgacgttctctggattgacaggagtaggcgatctgattgtgacgtgcacaagtgttcattccagaaactggcgtgcgggcaatttgctcggaaaagggtacaagcttgaagatgttcttgaagagatgggaatggtagtcgaaggcgtccgcacgacgaaagcggcttatcagctttcgaagaaatatgatgttaaaatgccgattacagaagctctccatcaggtcctattcaacggacaaaaagtggaaaccgctgttgaatctttaatggcgagagggaaaacccacgagatggaggatttggtaaatacgtttgaaaatcaagtgaagtaa

SEQ ID NO: 58944 - protein, 345 aa, Bacillus subtilis
MKKVTMLGAGSWGTALALVLTDNGNEVCVWAHRADLIHQINELHENKDYLPNVKLSTSIKGTTDMKEAVSDADVIIVAVPTKAIREVLRQAVPFITKKAVFVHVSKGIEPDSLLRISEIMEIELPSDVRKDIVVLSGPSHAEEVGLRHPTTVTASSKSMRAAEEVQDLFINHNFRVYTNPDIIGVEIGGALKNIIALAAGITDGLGYGDNAKAALITRGLAEIARLGTKMGGNPLTFSGLTGVGDLIVTCTSVHSRNWRAGNLLGKGYKLEDVLEEMGMVVEGVRTTKAAYQLSKKYDVKMPITEALHQVLFNGQKVETAVESLMARGKTHEMEDLVNTFENQVK

SEQ ID NO: 58945 - DNA, 1056 bp, Bordetella bronchiseptica
  CDS (1)..(1056): transl_table=11
atgagccaagcacgccccgccacgctgcgcgtcgccgtgctgggcgccggcagctggggcaccgccctggcggccgcggccagccggcgccaccccactgtcctgtgggcgcgcgacggcgcccaggcgcaggccatggcggcccggcacgaaaacacccgctacctgcctggcgtggcgctgccgcccgccctgcaggtcagcgccgacctggcgcaggcgctcgcgcacctggcgcacgatcccgcccacgccctcatcatcctgggcgtgccggtcgccggcatgacgccgctgtgcaccgaactggccgcccgcctgccggccctgggcctgcaggccgtgccgctggtatggacctgcaagggattcgaggaacagaccgcccgcctgccccatgaaaccgtgcaggccgcgctgggcgccatgcccggcctggccgccggcgttctttccggcccgtcgttcgcgcgcgaggtcgcgcaggggctgcccgtggccctgaccgtcgccagcgaatcgtccgccgtgcgcgacgccgtcacgaccgccctgcacggcgcggcggtgcgcatctacgccagcaccgacgtggtcggcgtcgaagtcggcggcgcgctcaagaacgtcatcgccgtggcctgcggcatctgcgacggcctggcgctgggcaccaacgcccgcgccgcgctgatcacccgcggcctggcggagatggcgcgctttggcgccgcgctgggcgcgcaacaggaaaccttcgccggccttaccggcctgggcgacctggtgctgaccgccaccggcgaactgtcgcgcaaccggcgggtcgggctggagatcggcgccggccgcaagctggccgacatcctggccagcggcatgaccgccgagggcgtacgctgcgcgcgggccgcgcgcgaccgcgcccgcgcactgaacatcgaattgccgatcaccgaggccgtctgcgccgtgctgttcgagggactgtcgcccatgacggcggtatcggccctgctggcacgcgaggcgcgccccgaaagcccgacgccataa

SEQ ID NO: 58946 - protein, 351 aa, Bordetella bronchiseptica
MSQARPATLRVAVLGAGSWGTALAAAASRRHPTVLWARDGAQAQAMAARHENTRYLPGVALPPALQVSADLAQALAHLAHDPAHALIILGVPVAGMTPLCTELAARLPALGLQAVPLVWTCKGFEEQTARLPHETVQAALGAMPGLAAGVLSGPSFAREVAQGLPVALTVASESSAVRDAVTTALHGAAVRIYASTDVVGVEVGGALKNVIAVACGICDGLALGTNARAALITRGLAEMARFGAALGAQQETFAGLTGLGDLVLTATGELSRNRRVGLEIGAGRKLADILASGMTAEGVRCARAARDRARALNIELPITEAVCAVLFEGLSPMTAVSALLAREARPESPTP

SEQ ID NO: 58947 - DNA, 1056 bp, Bordetella parapertussis
  CDS (1)..(1056): transl_table=11
atgagccaagcacgccccgccacgctgcgcgtcgccgtgctgggcgccggcagctggggcaccgccctggcggccgcggccagccggcgccaccccactgtcctgtgggcgcgcgacggcgcccaggcgcaggccatggcggcccggcacgaaaacacccgctacctgcctggcgtggcgctgccgcccgccctgcaggtcagcgccgacctggcgcaggcgctcgcgcacctggcgcacgatcccgcccacgccctcatcatcctgggcgtgccggtcgccggcatgacgccgctgtgcaccgaactggccgcccgcctgccggccctgggcctgcaggccgtgccgctggtatggacctgcaagggattcgaggaacagacagcccacctgccccatgaaaccgtgcaggccgcgctgggcgccatgcccggcctggccgccggcgttctttccggcccgtcgttcgcgcgcgaggtcgcgcaggggctgcccgtggccctgaccgtcgccagcgaatcgtccgccgtgcgcgacgccgtcacgaccgccctgcacggcgcggcggtgcgcatctacgccagcaccgacgtggtcggcgtcgaagtcggcggcgcgctcaagaacgtcatcgccgtggcctgcggcatctgcgacggcctggcgctgggcaccaacgcccgcgccgcgctgatcacccgcggcctggcggagatggcgcgctttggcgccgcgctgggcgcgcaacaggaaaccttcgccggccttaccggcctgggcgacctggtgctgaccgccaccggcgaactgtcgcgcaaccggcgggtcgggctggagatcggcgccggccgcaagctggccgacatcctggccagcggcatgaccgccgagggcgtacgctgcgcgcgggccgcgcgcgaccgcgcccgcgcactgaacatcgaattgccgatcaccgaggccgtctgcgccgtgctgttcgagggactgtcgcccatgacggcggtatcggccctgctggcacgcgaggcgcgccccgaaagcccgacgccataa

SEQ ID NO: 58948 - protein, 351 aa, Bordetella parapertussis
MSQARPATLRVAVLGAGSWGTALAAAASRRHPTVLWARDGAQAQAMAARHENTRYLPGVALPPALQVSADLAQALAHLAHDPAHALIILGVPVAGMTPLCTELAARLPALGLQAVPLVWTCKGFEEQTAHLPHETVQAALGAMPGLAAGVLSGPSFAREVAQGLPVALTVASESSAVRDAVTTALHGAAVRIYASTDVVGVEVGGALKNVIAVACGICDGLALGTNARAALITRGLAEMARFGAALGAQQETFAGLTGLGDLVLTATGELSRNRRVGLEIGAGRKLADILASGMTAEGVRCARAARDRARALNIELPITEAVCAVLFEGLSPMTAVSALLAREARPESPTP

SEQ ID NO: 58949 - DNA, 1056 bp, Bordetella pertussis
  CDS (1)..(1056): transl_table=11
atgagccaagcacgccccgccacgctgcgcgtcgccgtgctgggcgccggcagctggggcaccgccctagcggccgcggccagccggcgccaccccactgtcctgtgggcgcgcgacggcgcccaggcgcaggccatggcggcccggcacgaaaacacccgctacctgcctggcgtggcgctgccgcacgccctgcaggtcagcgccgacctggcgcaggcgctcgcgcacctggcgcacgatcccgcccacgccctcatcatcctgggcgtgccggtcgccggcatgacgccgctgtgcaccgaactggccgcccgcctgccggccctgggcctgcaggccgtgccgctggtatggacctgcaaggggttcgaggaacagaccgcccgcctgccccatgaaaccgtgcaggccgcgctgggcgccatgcccggcctggccgccggcgttctttccggcccgtcgttcgcgcgcgaggtcgcgcaggggctgcccgtggcgctgaccgtcgccagcggatcgtccgccgtgcgcgacgccgtcacgaccgccctgcacggcgcggcggtgcgcatctacgccagcaccgacgtggtcggcgtcgaagtcggtggcgcgctcaagaacgtcatcgccgtggcctgcggcatctgcgacggcctggcgctgggcaccaacgcgcgcgccgcgctgatcacccgcggcctggcggagatggcgcgctttggcgccgcgctgggcgcgcaacaggaaaccttcgccggccttaccggcctgggcgacctggtgctgaccgccaccggcgaactgtcgcgcaaccggcgggtcgggctggaaatcggcgccggccgcaagctggccgacatcctggccagcggcatgaccgccgagggcgtacgctgcgcgcgggccgcgcgcgaccgcgcccgcgcactgaacatcgaattgccgatcaccgaggccgtctgcgccgtgctgttcgagggactgtcgcccatgacggcggtatcggccctgctggcacgcgaggcgcgccccgaaagcccgacgccataa

SEQ ID NO: 58950 - protein, 351 aa, Bordetella pertussis
MSQARPATLRVAVLGAGSWGTALAAAASRRHPTVLWARDGAQAQAMAARHENTRYLPGVALPHALQVSADLAQALAHLAHDPAHALIILGVPVAGMTPLCTELAARLPALGLQAVPLVWTCKGFEEQTARLPHETVQAALGAMPGLAAGVLSGPSFAREVAQGLPVALTVASGSSAVRDAVTTALHGAAVRIYASTDVVGVEVGGALKNVIAVACGICDGLALGTNARAALITRGLAEMARFGAALGAQQETFAGLTGLGDLVLTATGELSRNRRVGLEIGAGRKLADILASGMTAEGVRCARAARDRARALNIELPITEAVCAVLFEGLSPMTAVSALLAREARPESPTP

SEQ ID NO: 58951 - DNA, 981 bp, Bradyrhizobium japonicum
  CDS (1)..(981): transl_table=11
atgaccgcgttccactccgttgcggtgatcggagcgggcgcctggggcacggcgctggcgatggtggcagcgcgggccgggcggagcgtcacgctctgggcgcgcaatgccgagcatgcgacgcgcatcgcgtcgacccgcgacaatccgcggctacccggcgtgcggcttgcgccggacatcgtcgtgacgagcgagctggcgctcgccgcgcgcgcggacatgctgctgatcgcaacgccggcgcagcatctgcgcggcgccgtcaacatgctggcctcgcacatcgcaagaccgacaccggtcgtcgcctgtgccaagggcatcgagcacggcacccataaattcatgaccgaggtgatcgctgaagccgcgctgcacgcgcagccggcgatcctgtcgggcccgagctttgccgacgacgtcgcgcgcggcctgccgacggcggtgacgctggcggcgaaggaggaagagctggccagcagcctcgtgcaggcgttgggctcgccgacgttccggccctatcactccaccgacgtccgcggcgtcgagatcggtggcgccgccaagaacgtgctggcgatcgctgccggcatcgtggtcggccgcaacctcggggcctccgcgctcgccgcgctgaccacgcgcggcttcagcgagctggcacggctcggccgcgcctgcggcgcgcgcccggaaacgctctcgggcctctccggccttggcgacctgctcctgagttgttcaaccgcgcaatcgcgcaatttcgcgctcggcattgcgctcggccgtggtgaggcggcgccggcgggcaagcttgcggaaggcgcattcaccgcgccggtgctggtcgagctcgcggccgcacggaacgtcgacatgccggtctcgcaggccgtcgctgccatcctcgacaacaaattgacgatcgacgcagcgatcgaggggctgctgacgcggccgttcaaggcagaagaataa

SEQ ID NO: 58952 - protein, 326 aa, Bradyrhizobium japonicum
MTAFHSVAVIGAGAWGTALAMVAARAGRSVTLWARNAEHATRIASTRDNPRLPGVRLAPDIVVTSELALAARADMLLIATPAQHLRGAVNMLASHIARPTPVVACAKGIEHGTHKFMTEVIAEAALHAQPAILSGPSFADDVARGLPTAVTLAAKEEELASSLVQALGSPTFRPYHSTDVRGVEIGGAAKNVLAIAAGIVVGRNLGASALAALTTRGFSELARLGRACGARPETLSGLSGLGDLLLSCSTAQSRNFALGIALGRGEAAPAGKLAEGAFTAPVLVELAAARNVDMPVSQAVAAILDNKLTIDAAIEGLLTRPFKAEE

SEQ ID NO: 58953 - DNA, 999 bp, Burkholderia mallei
  CDS (1)..(999): transl_table=11
atgaaagtcgcggttctcggcgccggcgcgtggggcaccgcgctcgcggcgcatctggccgtgcggcacgacacgctgctctgggcgcgcgacgcggcgctcgtcgccgagcttgccgcgcggcgcgagaacgcccgctatctgggcggcgtcgcgctgccgcccgggctgcgctacgaggccgatctcgcgacggcgctgtcgcacgcgcaagcggacgacgcgctctgcgtgatcgcggcgcccgtggccgggctgcgcgcgctgtgccgcgcgatgcgcgacgcacgccgcgtgcccgctcacttcgtctgggtctgcaagggcttcgaggccgacacgcggcggctgccgcatcagatggtcgccgaggaattgccggatcacgcgagctacggcgtgctgtcgggcccgagcttcgcgcgtgaggtcgcgcaggggctgcccgtcgcgctgacggtcgcgagcgcgtcggccgcgtgccgcgagcgtacgctcgcggcgtttcatcatggcgcgatgcggatctatacaggcgacgacgtcgtcggcgtcgaggtcggcggcgcggtgaagaacgtgctcgcgatcgcgacggggatcgccgacggcctgggcctcggcctcaatgcgcgtgcggcgctcgtcacgcgcgggctcgcggagatgtcgcgcctgggcgtcgcgctcggcggccgcgcggagacgttcacgggcctcacgggcctgggtgacctgatcctcacggcgacgggcgatctgtcgcgcaaccggagcgtcggcctgcaactcgcggccggccgctcgctcgacgatatcctcgccgcgctcggccacgtggccgaaggcgtgcgctgcgcgcgcgcggtgctgtcgatcgcgcgcgagcgcggcgtcgacatgccgatcacggaggcggtgtgcgcggtgctgttcgacggcgtcgcgccgcgcgacgcggtgagcggcctgctgcggcgggacgcgaaagccgaatag

SEQ ID NO: 58954 - protein, 332 aa, Burkholderia mallei
MKVAVLGAGAWGTALAAHLAVRHDTLLWARDAALVAELAARRENARYLGGVALPPGLRYEADLATALSHAQADDALCVIAAPVAGLRALCRAMRDARRVPAHFVWVCKGFEADTRRLPHQMVAEELPDHASYGVLSGPSFAREVAQGLPVALTVASASAACRERTLAAFHHGAMRIYTGDDVVGVEVGGAVKNVLAIATGIADGLGLGLNARAALVTRGLAEMSRLGVALGGRAETFTGLTGLGDLILTATGDLSRNRSVGLQLAAGRSLDDILAALGHVAEGVRCARAVLSIARERGVDMPITEAVCAVLFDGVAPRDAVSGLLRRDAKAE

SEQ ID NO: 58955 - DNA, 1002 bp, Chlorobium tepidum
  CDS (1)..(1002): transl_table=11
atgaagatcactgttctcggcgcaggaagttggggaaccacgcttgccatgctgctggccaataaaggccacgaagtacggctgtgggcgcaccgcccggagttcgcccgcgcgcttgaggccgaccgcgaaaacaagcgctacctcaaaggggttctttttcccgacaacctgcgtgtggtcgaaaatcttcacgacgccgtcgaaacagcggagatgatcgtgacagcagtgccgtcgcatgcgctgcgggagacggcggcggcgtttgcgcacctgcctctcgacggcaaaatcatcgtcaacgtcgccaaggggatcgagcagcacaccggaaagcgcatgtccgaggtgttactcgaagcgctgccccgcatcgcgccggagcagatcgccgtgctctacggcccaagccatgccgaggaggtcgcccgccagcagccgaccaccgttgtcgcctgctctgtttcggaagcgaccgcccgccgggttcaggaggcgtttcacaccagcagcttccgcgtctatgtcaacaccgacctcatcggcgtcgagatcgccggatcagtcaagaacgtcatcgccatcgccgccggaatttccgacggactcggcttcggcgacaacgccaaggcggcgatcatcacgcgcggcctggctgaaatctcgcgcctcagctcgaagcttggcgccgacccgctgaccctatcgggtctgtccggcatcggcgacctggtcgtaacctgcctgagccagcacagccgcaaccgctacgtcggcgagcagattggcaagggccgcaagctcgacgaagtgatcggagagatgagcatggtagccgaaggggtgctcacctccaaagccgtagtcaagctcgccgaacgcctcggcgtcgaaatgcccatctcgcaagccgtctatgaaatgctctacgaaaacaaacccgccccgcaagccattctggagctgatggaaagggatcccaagccggagcattattga

SEQ ID NO: 58956 - protein, 333 aa, Chlorobium tepidum
MKITVLGAGSWGTTLAMLLANKGHEVRLWAHRPEFARALEADRENKRYLKGVLFPDNLRVVENLHDAVETAEMIVTAVPSHALRETAAAFAHLPLDGKIIVNVAKGIEQHTGKRMSEVLLEALPRIAPEQIAVLYGPSHAEEVARQQPTTVVACSVSEATARRVQEAFHTSSFRVYVNTDLIGVEIAGSVKNVIAIAAGISDGLGFGDNAKAAIITRGLAEISRLSSKLGADPLTLSGLSGIGDLVVTCLSQHSRNRYVGEQIGKGRKLDEVIGEMSMVAEGVLTSKAVVKLAERLGVEMPISQAVYEMLYENKPAPQAILELMERDPKPEHY

SEQ ID NO: 58957 - DNA, 996 bp, Corynebacterium diphtheriae
  CDS (1)..(996): transl_table=11
atgaagatcggtgtgatgggtgccggttcttggggaactaccttggctaaagtcttttcagacgcaggctgtgatgtcaccttgtgggcacgtcgtgaagaagttgcccgagaaatcaacaccgagcacacaaattccacctatcttcgaggtattgcgttgccgcacaccctcacggccacaacgcagccaacgcaggcgctgtgcgatgccgatgtggttgtcctcgcggttcccagccaaacattgcgtggaaatcttgctgaatggtgtgcggatattccgcaggatgctttgttgctgagcttggcaaaaggcatcgaaaaagagacatttttgcgcatgagtgaagtaatcgcggaggtaacgggtgcgcaacctgacaaagtggctgtcttgtcaggtccgaatctggctcgagagattgcagaggaacaaccagcagccaccgttattgcctgcacaaacgagaaaaatgcccagcgtatccagcatgctttggcggctccttatttccgtccgtataccaacacagatgtcatcggttgcgagatcggcggggcttgcaaaaatgtgatcgctctcgcctgcggtatggcatctggcagggggctaggagagaacactctggcaacgttgatgacgcgtggtctagcggagatctcacgtttgggagtagccatgggtgcagatccgcgaaccctatcaggtttagctgggttgggagacttggtagctacatgttcatcgccgttgtcacgtaaccgaacctttggtgcccgtttgggtgaaggcaagactttagacgaagcccgtgcagcgacaaacgggcaagtagccgaaggagttatatcctcgcaatctattgcgcggctagcagattccttgggggttgatatgcccattacccgtgcggtatttggagtatgtcatcgtgaccaaaatgttgccgacatggtggctgcattgatggggcgtaccaagaaatctgagtag

SEQ ID NO: 58958 - protein, 331 aa, Corynebacterium diphtheriae
MKIGVMGAGSWGTTLAKVFSDAGCDVTLWARREEVAREINTEHTNSTYLRGIALPHTLTATTQPTQALCDADVVVLAVPSQTLRGNLAEWCADIPQDALLLSLAKGIEKETFLRMSEVIAEVTGAQPDKVAVLSGPNLAREIAEEQPAATVIACTNEKNAQRIQHALAAPYFRPYTNTDVIGCEIGGACKNVIALACGMASGRGLGENTLATLMTRGLAEISRLGVAMGADPRTLSGLAGLGDLVATCSSPLSRNRTFGARLGEGKTLDEARAATNGQVAEGVISSQSIARLADSLGVDMPITRAVFGVCHRDQNVADMVAALMGRTKKSE

SEQ ID NO: 58959 - DNA, 990 bp, Dechloromonas aromatica
  CDS (1)..(990): transl_table=11
atgaagataacgctgcttggtgctggcgcttgggggacggcgctatccatcgccttctccggcaagcatgatctgacgctctggtcccgtgaggtagatgtcgcggatgatctgcgcaaaactcgcgaaaatcaccgcttctttcctggctacaaattgccggagtcagtcgctgtgtcgactgatttcgaggtggccgttgccggtgccgagttgcttgttgtcgctacgccgattgccggactgcggccgacggtcgagcgcttgcaggcacttggttgcaagcttccggtgctttgggtgtgcaagggttttgaggccggtagtggcaagttgccgcatcaggtggttgccgaggtgctaggcaaggaggcgctctgtggtgccctttccggcccgagctttgcggaagaggttgccgcagggcagccgacggcggtatcgctggccacgaatgatccggcctttgcccgtgaggccgctcgccaattgcacacgacccgcctgcgcatttatgccaatgatgatctggttggcgtcgaggtcggtggtgcggtcaagaatgtcctggccattgccaccggtgtttgtgatgggcttggcctcggcctgaattcccgtgctgcgctgatgacccgtggcctggctgaaatcgcccgcctcggtctggcgctgggggctgaacgccagactttcatggggctggctggcatgggcgatctgatcctgacctgtactggcgatctgtcgcgcaatcgtcgggttggtttggcgttggcgcagaacaagtcgctgccgcagatccttgaagagctggggcacgtcgctgaaggtgtttataccgcccgggaagtcgatcggctggcggccaggctcggcgtcgagatgccgatcagtgcggctgttgcggccgttcttgatggccgtctgacggcagctcaggcggttgagcagttgatggcccgcgatcccaaggaagagctggcttaa

SEQ ID NO: 58960 - protein, 329 aa, Dechloromonas aromatica
MKITLLGAGAWGTALSIAFSGKHDLTLWSREVDVADDLRKTRENHRFFPGYKLPESVAVSTDFEVAVAGAELLVVATPIAGLRPTVERLQALGCKLPVLWVCKGFEAGSGKLPHQVVAEVLGKEALCGALSGPSFAEEVAAGQPTAVSLATNDPAFAREAARQLHTTRLRIYANDDLVGVEVGGAVKNVLAIATGVCDGLGLGLNSRAALMTRGLAEIARLGLALGAERQTFMGLAGMGDLILTCTGDLSRNRRVGLALAQNKSLPQILEELGHVAEGVYTAREVDRLAARLGVEMPISAAVAAVLDGRLTAAQAVEQLMARDPKEELA

SEQ ID NO: 58961 - DNA, 1080 bp, Dehalococcoides ethenogenes
  CDS (1)..(1080): transl_table=11
atgtctaaagtttgtattataggcactactacctggggcattaccctgggtacggtcatagcccataaagggcgcgaagtaatgctctgggcacgcaccgaggacgaagccgcacttctctcagcccagcgccgtccggctgattttttgccggaagattattatttccccgaatacctgaacgtaaccgccagtttggaggaagccctatccggagcagacatggttcttatggctgtgccttcccagcggatgcgccccaatatacggctggctgcacctttgctgactaaaaacatgctggtctgcagcgcctccaaggggctggaaataggtactgccaagcgtatgagccaggtaattgccgacgagatttccccggatttttcccagaatatatgtgttctttcggggccgaatctggctatggaaatactaaaggggctgccggctgtaactgtactggctgccgatactgaaaagacggctaaaaaagccgccaaactggtaaccgccagtaacttttgcgcttacaccaatacggatatcataggggtggagctgggcggctcactcaagaatattatcgctctgggggcaggcatagcggacgggctgagcttcggcaacaatgccaagagcgccctgattacccgcggccttaccgagatttccgccctgggggcggctttgggggcaaaccctctgacattttcgggtctggccggactgggtgacctgattgccacctgttccagcaacctgtcacgcaaccattttgtgggggtggaattaaccaaaggccgcagcctgaatgacattatgtacagcatgagcaatgtagccgaaggtgtttccactaccgcagtagcctatgagctggcccgctctatggatttggaaatgccggtaaccgaaaacatttacaacgtgctttataataacgcagacccgaaggaagccgccagaaaactgatggctgcccaggctgcccatgaactggccggacgcaagtgggatttgtttaaaatgttccgcaggcgcagaacccgcaaaacacctgaacttaatccggattag

SEQ ID NO: 58962 - protein, 359 aa, Dehalococcoides ethenogenes
MSKVCIIGTTTWGITLGTVIAHKGREVMLWARTEDEAALLSAQRRPADFLPEDYYFPEYLNVTASLEEALSGADMVLMAVPSQRMRPNIRLAAPLLTKNMLVCSASKGLEIGTAKRMSQVIADEISPDFSQNICVLSGPNLAMEILKGLPAVTVLAADTEKTAKKAAKLVTASNFCAYTNTDIIGVELGGSLKNIIALGAGIADGLSFGNNAKSALITRGLTEISALGAALGANPLTFSGLAGLGDLIATCSSNLSRNHFVGVELTKGRSLNDIMYSMSNVAEGVSTTAVAYELARSMDLEMPVTENIYNVLYNNADPKEAARKLMAAQAAHELAGRKWDLFKMFRRRRTRKTPELNPD

SEQ ID NO: 58963 - DNA, 987 bp, Deinococcus radiodurans
  CDS (1)..(987): transl_table=11
atgacgcagggctctgctttgcctgtgctgggcgctggcggctggggcacggcgctcgcggtggccgccgcacgggccggacaaccggcgcggctctgggctcggcgtcccgactttgccgcccggctggccgaggtgcgcgagaaccgcgagtacctgccgggcgtgctgctgccccccgaggtagcggtcacgtctgacctgcccggcgcggtggccggcgccgacttcgccctgctggttgtaccaagtgtgggcgtgcccgaactgctggccgggctgccgcgcgaactgggcgtggtgctgtgcgccaagggtctcgcgcccgacggcagccgcctgagcgagtacgcggcggggctcggctttgaccgggtggcggtcctgagcggccccaaccacgccgaggaaataggccggggcctgcccgccgccacggtggtcgccagccgcgacccggcccttgccgccgccgtgcagaccgcgctgatgtcgcccagcctgcgggtctacaccagccgtgacgtgcccggcgtggaactcggcggcgtcctgaaaaacgtgatcgcggtggctgccggcatgggcgacggtctgcacctcggcgacaatgccaaggcgaccctcctgacccgtggcctgcgtgaaatgaaccgctacctgcgttcactcggcgccgaggaggaaacggtctacggcctgagcgggctgggcgacctgatcgccaccgccaccagcccccacagccgcaaccgggcagcgggcgaggcgattgcccggggcgagagcccgcagcaaggcggcaaggtggtcgagggcctgcgtaccgctggcctgctcgacgcctgggccgctgcccacggccacgacctgcctatcgtgcgggcggtggcgcaggtcacgcgcggcgagtggtcccccgcagaaggcgtgcgtcacctgatgggccgtgaggcgaaaggggagacggaagccggggagccgtaa

SEQ ID NO: 58964 - protein, 328 aa, Deinococcus radiodurans
MTQGSALPVLGAGGWGTALAVAAARAGQPARLWARRPDFAARLAEVRENREYLPGVLLPPEVAVTSDLPGAVAGADFALLVVPSVGVPELLAGLPRELGVVLCAKGLAPDGSRLSEYAAGLGFDRVAVLSGPNHAEEIGRGLPAATVVASRDPALAAAVQTALMSPSLRVYTSRDVPGVELGGVLKNVIAVAAGMGDGLHLGDNAKATLLTRGLREMNRYLRSLGAEEETVYGLSGLGDLIATATSPHSRNRAAGEAIARGESPQQGGKVVEGLRTAGLLDAWAAAHGHDLPIVRAVAQVTRGEWSPAEGVRHLMGREAKGETEAGEP

SEQ ID NO: 58965 - DNA, 993 bp, Desulfovibrio desulfuricans
  CDS (1)..(993): transl_table=11
atgaaaatagccgtagccggaggcggaagctgggggagcgctcttgcccatctgctggccgccaatgcctgtgacgtgacgctgctggtgcgcgatgccgtacaggcccgccgtatcaatgccgaccatgtgaatcccgattatctgccggatgtggtgctgcacagttctgtgcgggccactgtggatgatgctgaagcgctggatggtgccggtctgctgctgatggccgtgccgtgccagcattttcgcaaggtgctgcaaagattgcggccgctgctgccgccggagccggttgtggtgtgcgccaacaagggcatagaggtggaaaatctgtgcacggtttcagaggttgtggcgcaggaactggaaggcaccggtcacacctttgccatgctttccggaccgtcttttgccgtcgaagtcatgcgcgatatgcccaccgcggtggtgctgggctgcagggatgccgccacaggacgccggctgcgtcatattttttcgtacgggctgttccgcacgtattccagcacggacgtacgcggagtggagctgggcggggcggttaaaaacgtcatcgccattgcggccggtctggcagacgggctggggttcggccataatgcccgtgcggcgctcatcacccgcgggctggcagaaatgagccgtctgggtgtggccatgggcgcgcgggcttccacgtttatggggttgtccggcatgggcgatctggtgctgacctgcaccggagacctttcccgtaacaggcaggtggggttgaagcttgcgcagggcatgactctggaagaggtgaccagaagcatgcgcatggtggcggaaggcgtgaagaccaccgaggccgtgcacactctggcggcgcggctgcaggttgatctgcccattacttcggccatgtatgatgtgctgcacagcggtaaaaatccgcgtgatgccgtgcgcgaactgatgagcagggagctcaaggaagagtag

SEQ ID NO: 58966 - protein, 330 aa, Desulfovibrio desulfuricans
MKIAVAGGGSWGSALAHLLAANACDVTLLVRDAVQARRINADHVNPDYLPDVVLHSSVRATVDDAEALDGAGLLLMAVPCQHFRKVLQRLRPLLPPEPVVVCANKGIEVENLCTVSEVVAQELEGTGHTFAMLSGPSFAVEVMRDMPTAVVLGCRDAATGRRLRHIFSYGLFRTYSSTDVRGVELGGAVKNVIAIAAGLADGLGFGHNARAALITRGLAEMSRLGVAMGARASTFMGLSGMGDLVLTCTGDLSRNRQVGLKLAQGMTLEEVTRSMRMVAEGVKTTEAVHTLAARLQVDLPITSAMYDVLHSGKNPRDAVRELMSRELKEE

SEQ ID NO: 58967 - DNA, 1020 bp, Desulfotalea psychrophila
  CDS (1)..(1020): transl_table=11
atgagtaatttaactccatccattgccgttatcggagcaggatcctggggtacatccctggcgatcctgctggccggtaagggctatccggtacgtctctggggccataataaggagcacattgacaggcttatcagtgatggggaaaacagtcggtatttgccaggtatttccttgccagagagcctctatcctactccatccctggaaaaagctgtgttgggtgctcaattggtattgatggttgttcccagccatgtgttccgtacagtttttcgggatttaataccatttttgcctattgattgtcagattgtttcagcggtaaagggtattgaaaatagtaccctttccactatgcatatggttatggcccaggagctggctgcatatcctgctctggcgctaatagagctcggggttatttcgggtccttcctttgccaaagaggttgctcaaaaacagccaacagccgttaccgttggttttgcctctgctgatacggcaaaaaaggtgcaggatatttttagtaccgactattttcgggtctataccagtactgatatagatggactagagataagcggggccttcaagaatgttatggcgatagctgcaggcatcagtgatgggctctcctatggaagtaatgcccgggcggcacttatcacccgtggtcttgctgaaatgcagaggttgggcgctgccatgaatgctgatccggccacctttgccggtctcagtggtctcggagatttattgttgacctgtacaggagaccttagccgtaatcgtaatgtcggcttgcaacttggcaagggccactccattgaacatatagagagtgagatgttcatggtggcagagggagtgaagaccacaaagtctttttatgatcttgcccggaagttagatgttgagactccgatcctcgatgaggtctatcatatcatctatgagggcaaggattgttcgcaggcggtacaggatcttttgggtcgaaagctcaaacctgaatag

SEQ ID NO: 58968 - protein, 339 aa, Desulfotalea psychrophila
MSNLTPSIAVIGAGSWGTSLAILLAGKGYPVRLWGHNKEHIDRLISDGENSRYLPGISLPESLYPTPSLEKAVLGAQLVLMVVPSHVFRTVFRDLIPFLPIDCQIVSAVKGIENSTLSTMHMVMAQELAAYPALALIELGVISGPSFAKEVAQKQPTAVTVGFASADTAKKVQDIFSTDYFRVYTSTDIDGLEISGAFKNVMAIAAGISDGLSYGSNARAALITRGLAEMQRLGAAMNADPATFAGLSGLGDLLLTCTGDLSRNRNVGLQLGKGHSIEHIESEMFMVAEGVKTTKSFYDLARKLDVETPILDEVYHIIYEGKDCSQAVQDLLGRKLKPE

SEQ ID NO: 58969 - DNA, 1053 bp, Drosophila americana
  CDS (1)..(1053)
atggcggaaaaggtaaatgtttgcatcgtgggctctggcaactggggttcggccatagcgaaaatcgtgggcgccaatgcggccgcgctgcccgagtttgaggagcgcgtcacaatgtttgtctacgaggagatgattgatggcaagaagttaacggaaattatcaatgaaacgcacgagaatgttaaatacctgaagggacacaaactgccaacaaatgtggttgccgtacctgatctggttgaggctgccaagaatgccgatatactgatctttgtggtgccacatcagttcataccaaatttctgcaaacaattgctgggcaagatcaagccaaatgccattgccatatccctgatcaagggcttcgataaggccgagggcggcggcattgatctgatatcgcacattattacccgccatttgaagataccatgcgccgtgctgatgggcgctaatctggccaacgaggtggccgagggcaacttttgcgagacgacaatcggctgcacggacaaaaagtacggcaaggtgctgcgtgatctcttccaggccaatcattttcgtgtcgtggtcgttgaggatgccgaagccgttgaggtttgcggtgccctgaagaacattgttgcctgtggtgcgggctttgtcgatggtctcaagctgggcgataatactaaggcagcggtcattcgtttgggtcttatggaaatgatacgctttgtcgatgtcttctatccgggcagcaaattgtccacattctttgagagctgcggtgttgcggatctcatcacgacgtgttacggtggccgcaatcgtcgtgtctccgaggcttttgtcacatctggcaagacaattgaggatctggagaaggagatgctcaatggccagaaattgcagggcccgcccactgccgaggaggttaactatatgttgaaaaacaaaggcctggaggataaattcccattgttcaccgccatacacaaaatttgcacaaatcagcttaagcctaaagatttaatcgattgcatacgcaatcatcccgagcatatgtaa

SEQ ID NO: 58970 - protein, 350 aa, Drosophila americana
MAEKVNVCIVGSGNWGSAIAKIVGANAAALPEFEERVTMFVYEEMIDGKKLTEIINETHENVKYLKGHKLPTNVVAVPDLVEAAKNADILIFVVPHQFIPNFCKQLLGKIKPNAIAISLIKGFDKAEGGGIDLISHIITRHLKIPCAVLMGANLANEVAEGNFCETTIGCTDKKYGKVLRDLFQANHFRVVVVEDAEAVEVCGALKNIVACGAGFVDGLKLGDNTKAAVIRLGLMEMIRFVDVFYPGSKLSTFFESCGVADLITTCYGGRNRRVSEAFVTSGKTIEDLEKEMLNGQKLQGPPTAEEVNYMLKNKGLEDKFPLFTAIHKICTNQLKPKDLIDCIRNHPEHM

SEQ ID NO: 58971 - DNA, 1083 bp, Drosophila kanekoi
  CDS (1)..(1083)
atggcggaaaaagtaaatgtttgcatcgtgggctccggcaactggggttcggccatagcgaaaatcgtgggcgccaatgcggcagcgctgcccgagtttgaggagcgcgtcacaatgtttgtctacgaggagatgattgatggcaagaagttaacggaaatcatcaatgaaacgcacgagaatgttaaatacctgaagggacacaaactgccaacaaatgtggttgctgtacctgatctggttgaggctgccaagaatgccgatatactgatcttcgtggtgccacatcagtttataccaaatttctgcaaacaattgctgggcaagatcaagccaaatgccattgccatatccctgatcaaggggttcgataaggccgagggcggcggcattgatctgatatcgcacattattacccgccatttgaagataccatgcgccgtgctgatgggcgctaatctggccaacgaggtggccgagggcaacttttgcgagacgacaatcggctgcacggacaaaaagtacggcaaggtgctgcgtgatctcttccaggccaatcattttcgtgtcgtggtcgtcgaggatgccgatgccgttgaggtgtgcggtgccctgaagaacattgttgcctgtggtgcgggctttgtcgatggactcaagctgggcgataatactaaggcagccgtcattcgtttgggtcttatggaaatgatccgctttgtcgatgtcttctatccgggcagcaaattgtccacattctttgagagctgcggtgttgcggatctcatcacgacgtgttacggtggtcgcaatcgtcgtgtctcagaggcttttgtcacatcgggcaagacaattgaggagctggagaaggagatgctcaatggccagaaactgcagggcccgcccactgccgaggaggttaactatatgttgaaaaacaaaggcctagaggataaattcccgttgttcaccgccatacacaaaatttgcataaatcagcttaagcctaaagatttaatcgattgcatacgcaatcatcccgagcatatggatacgttcatcatgccgtcgccaaaactctaa

SEQ ID NO: 58972 - protein, 360 aa, Drosophila kanekoi
MAEKVNVCIVGSGNWGSAIAKIVGANAAALPEFEERVTMFVYEEMIDGKKLTEIINETHENVKYLKGHKLPTNVVAVPDLVEAAKNADILIFVVPHQFIPNFCKQLLGKIKPNAIAISLIKGFDKAEGGGIDLISHIITRHLKIPCAVLMGANLANEVAEGNFCETTIGCTDKKYGKVLRDLFQANHFRVVVVEDADAVEVCGALKNIVACGAGFVDGLKLGDNTKAAVIRLGLMEMIRFVDVFYPGSKLSTFFESCGVADLITTCYGGRNRRVSEAFVTSGKTIEELEKEMLNGQKLQGPPTAEEVNYMLKNKGLEDKFPLFTAIHKICINQLKPKDLIDCIRNHPEHMDTFIMPSPKL

SEQ ID NO: 58973 - DNA, 1023 bp, Enterococcus faecalis
  CDS (1)..(1023): transl_table=11
atgaaacaaaaagtcgctgttttaggtccaggttcctgggggacagctttagctcaagtattagccgaaaatggacacgaggtctgtatttggggaaataaaccagagcaaatcgatgaaataaatacaaaacacaccaacaaacattatttaccagaattaatcttacctacttcaattcaggcaaccactgatttagccactgctttagtagatgttgatgcggtactgtttgtggtaccaactaaagccattcgttcagtagcacaagaagtggcccaacatttaaaaacaaaaccaattattattcatgcaagtaaagggctcgaacaaggtacacataagcggatttcagaagtgatagcggaagagattccagcagaaaaacggcaagggattgtggttttatctggtccaagccatgcagaagaagtcgctgttcatgacattacaaccattacagcagcaagcgaaaatttagcagacgctgtgtatgtgcaagagttgtttatgaatgattactttagaatttatacgaatgatgatgtgattggtgtagaaacaggggcggccttaaaaaatattattgctttgggcgccggagcgattcatggcttaggctttggtgataatgccaaagcggcaattatgactcgtggtttagcagaaattagtcgtttaggggttgcgatgggagcaaacccattaacatttattggtttaagtggtgttggggatttaattgttacttgtacaagtgtccattctcgaaattggcgtgcgggtaatttattaggaaaaggccataagttagatgaagtcttagaaaacatgggcatgattgtggaaggtgtttcaacaactaaagcagcctatgaattggcacaacaactagaagtcgaaatgccaatcacagaaacaatctacaatgtcttgtacaatgacgaagatgtacaacaagcagcaaaagaaatcatgttgcgcgatggcaaaaccgaaaacgaatttacacttgatttttag

SEQ ID NO: 58974 - protein, 340 aa, Enterococcus faecalis
MKQKVAVLGPGSWGTALAQVLAENGHEVCIWGNKPEQIDEINTKHTNKHYLPELILPTSIQATTDLATALVDVDAVLFVVPTKAIRSVAQEVAQHLKTKPIIIHASKGLEQGTHKRISEVIAEEIPAEKRQGIVVLSGPSHAEEVAVHDITTITAASENLADAVYVQELFMNDYFRIYTNDDVIGVETGAALKNIIALGAGAIHGLGFGDNAKAAIMTRGLAEISRLGVAMGANPLTFIGLSGVGDLIVTCTSVHSRNWRAGNLLGKGHKLDEVLENMGMIVEGVSTTKAAYELAQQLEVEMPITETIYNVLYNDEDVQQAAKEIMLRDGKTENEFTLDF

SEQ ID NO: 58975 - DNA, 1035 bp, Geobacillus kaustophilus
  CDS (1)..(1035): transl_table=11
atggagaacatcgccgtattgggggctggaagctggggaacggcgttggcgctcgtgctggctgacaatgggcaccacgtccggctctggggtcatcggaccgagcagatcagcgaaatcaacgaaaagcggacaaatgaaaaatatttgccaggcgttcgcctgccggacgccattatcggctatgacgacctttgcgctgcgcttgacggcgttgcgatcgttgtgctcgccgtgccgactaaagcgatccgctcggtgcttgcggacgtgcgcgcctgcttggccaagccgatcaccattgttgccgtcagcaaaggaatcgaaccagggacgcataagcgggtgtcggaaatggtcgccgaggaaatgggggaatggcttgcagatgttgtcgttctctccgggccgagccatgccgaggaagtcgtgctccgccacccgacgaccgtggcggtatcgtcgccaaatatggaagcggcgcgccgcattcaagacatctttatgaaccatcactattttcgcgtgtatacgaacccggatttaatcggcgtcgaagtcggcggggcgctgaaaaatatcatcgccttggccgctggaatcagcgacgggcttggctatggggataacgccaaagcggccctcatcacgcgcgggctcgccgagattgcccgcctcggctgcgccctcggcgctaatccgttgacattcgctggtttgacgggagtcggcgatttgattgtcacgtgcacgagcgtccattcccgcaactggagggccggctacatgctcggccaaggaaaaaagctggacgaggtgcttgagagcatggggatggtcgtcgaaggggtgcgaacgacaaaagccgcctatgagctggcgaaagagcttggtgtgaagatgccgatcaccgaagctctctatgacgtattgtttgcgggaaaagacccgaaagaggcggtcgattcgctcatggcgcgcggaaaaaaagaggaaatggatgacttaaacaacatttttgccgaacaagaatga

SEQ ID NO: 58976 - protein, 344 aa, Geobacillus kaustophilus
MENIAVLGAGSWGTALALVLADNGHHVRLWGHRTEQISEINEKRTNEKYLPGVRLPDAIIGYDDLCAALDGVAIVVLAVPTKAIRSVLADVRACLAKPITIVAVSKGIEPGTHKRVSEMVAEEMGEWLADVVVLSGPSHAEEVVLRHPTTVAVSSPNMEAARRIQDIFMNHHYFRVYTNPDLIGVEVGGALKNIIALAAGISDGLGYGDNAKAALITRGLAEIARLGCALGANPLTFAGLTGVGDLIVTCTSVHSRNWRAGYMLGQGKKLDEVLESMGMVVEGVRTTKAAYELAKELGVKMPITEALYDVLFAGKDPKEAVDSLMARGKKEEMDDLNNIFAEQE

SEQ ID NO: 58977 - DNA, 1008 bp, Geobacter metallireducens
  CDS (1)..(1008): transl_table=11
atgggcgaaaagatcggagtcatcggcgcggggagttggggaacaaccctggcaaatcttctggcaaagaaggggctggatgtcaccctctgggcctatgagccggagctggtggcggagatgcgggccacgcgggtcaacaccctctttctccctggcacggaactcgctgccggcctcgccttcaccaactctcttgaggaggcggcagcggggaaagatgtgctggttctcgtctccccctcccaggtcatgcggagcgtcctgacgcagctcgctcccctcctgaagcccggggtgacgctggtgaacgcttccaaggggattgagctcgataccctcatgaccatggaccaggtatgcggcgccgtcctcccccccgcagtcgccggacgcttctgcgtcctctcgggcccaagctttgcccgggaagtggcccaggagatgccgacggcggtggtggcggcctccgccgacctcgaggctgcggcccaggtccagcgcctcttcaccgctccctatttccgggtctacaccaacagcgacgtggtgggggtcgagatcggcggggccctcaagaacgtcatcgccctggccgcggggatctccgacggcctggggctcggccacaacacccgggccgccctcatcacccgggggctcgccgagatgaaccgcctcggccgcgccatgggggcggatccggccaccttcgccgggcttgccggcatgggggacctggtcctcacctgcaccggcgacctctcccgcaaccggaccgtggggatgaagctgggccaggggatgcgccttgcggagatcctcggtgagatgcggatggtggccgagggggtgaagaccgccgagtcggcctggcgtcttgccagccagatgggggtcgacatgcccatcaccgagaaggtctaccaggtgctctacgaggacaagccggcacggcaggcggtccttgaactcatgacccgcgacccgaaggccgagcgggggtag

SEQ ID NO: 58978 - protein, 335 aa, Geobacter metallireducens
MGEKIGVIGAGSWGTTLANLLAKKGLDVTLWAYEPELVAEMRATRVNTLFLPGTELAAGLAFTNSLEEAAAGKDVLVLVSPSQVMRSVLTQLAPLLKPGVTLVNASKGIELDTLMTMDQVCGAVLPPAVAGRFCVLSGPSFAREVAQEMPTAVVAASADLEAAAQVQRLFTAPYFRVYTNSDVVGVEIGGALKNVIALAAGISDGLGLGHNTRAALITRGLAEMNRLGRAMGADPATFAGLAGMGDLVLTCTGDLSRNRTVGMKLGQGMRLAEILGEMRMVAEGVKTAESAWRLASQMGVDMPITEKVYQVLYEDKPARQAVLELMTRDPKAERG

SEQ ID NO: 58979 - DNA, 1008 bp, Geobacter sulfurreducens
  CDS (1)..(1008): transl_table=11
atgagtgaacgtatcggtgtgatcggagcgggaagctggggaacgacgctggcgaatctgttggcccgaaaggggcttgacgtgacactctgggcctatgaggccgagttggtggaagagatgcgtgcaacgcgggtcaactccctttttctccccggcatcgaactcgctcccgccctttcgttcaccaactccctggaggaggcggccaccgggaaggacttcctggttctcgtttcgccctcccaggtgatgcgcggagtgctggcgcaactggcgccgctgctgcgtcccggcgtggtgctggtgaacgcctccaaggggatagagctcgacaccctcatgaccatggaccaagtctgcgcggcggtactgccgccggaggtcgcccggtgtttcagcgtcctgtccggaccgagctttgcccgcgaagtctcccttgagatgccgacggcggtggtggcggcttcgggcgaccctgccgtggctgcggcagtgcagcgtctcttcaccacgccgtccttccgggtctacaccaataccgacgtggtgggagttgagatcggcggtgccctcaagaacgtcattgccgtggcggccgggatctcggacggtctgggcctcggccacaatacccgtgcagccctgatcacccgcggcctggcagagatgacccgactggggctctccatgggggcccagccggaaacttttgcgggccttgccggcatgggtgacctggtgctcacgtgcaccggagacctttcgcgcaaccggaccgttggcatgaagctgggccaggggatgaagctggctgatgtcctgggagagatgcgcatggtggcggagggggtgaaaaccgccgagtcggcgtaccgtcttgcccgccggacaggggtcgagatgccgataaccgagaaggtctaccaggtgctccacgaggacaagccggcccgccaggcagtaatggaactcatgacccgcgacctcaaggcggagcgctggtaa

SEQ ID NO: 58980 - protein, 335 aa, Geobacter sulfurreducens
MSERIGVIGAGSWGTTLANLLARKGLDVTLWAYEAELVEEMRATRVNSLFLPGIELAPALSFTNSLEEAATGKDFLVLVSPSQVMRGVLAQLAPLLRPGVVLVNASKGIELDTLMTMDQVCAAVLPPEVARCFSVLSGPSFAREVSLEMPTAVVAASGDPAVAAAVQRLFTTPSFRVYTNTDVVGVEIGGALKNVIAVAAGISDGLGLGHNTRAALITRGLAEMTRLGLSMGAQPETFAGLAGMGDLVLTCTGDLSRNRTVGMKLGQGMKLADVLGEMRMVAEGVKTAESAYRLARRTGVEMPITEKVYQVLHEDKPARQAVMELMTRDLKAERW

SEQ ID NO: 58981 - DNA, 918 bp, Gloeobacter violaceus
  CDS (1)..(918): transl_table=11
atgcgcattgccgtactcgggggcggcgcctggggaacgaccctggcggaccttgctgcggcccaggatcatcaggtgcgggtgtggtcgcgttcgggagcattggccctgggtgaagttctggcccaggcggaggcagtgttcagttgtctgccgatggcggcggtggccggggtgatcgatcaggtaatagcccttgggctgcctgcgggggtgatcgtggtcaacgccaccaaggggctcgatcgccgcacggcccgccccgcctccagcctctggcaggcccgctttgccgaccatccgctggtggtgctgtccggaccgaatttggctgctgaaattcgcgccgggctgccggcggccaccgtggtggcaagcgccgacggccaggcggccggacgcatccagcaatgcctggcctccgaacgcttccgggtctacaccagtgccgactggcgcggtgtggagttggggggcgtgctcaaaaacgtaatcgccatcgccgccggggtcagcgacggcctgggcctgggcgccaacgccaaggccgcccttatcacccgcggtctggccgagatgatccgggtaggcacccactgggggggacttgccgagactttttacggtctgtcgggtctgggggacttgctcactacctgcaacagtcccctgagccgcaactaccaggtgggttttggcctgggcaaaggccaatctctagaagctgttcttgagcgtctcgaagggaccgccgagggggtggcaaccgccgccatcctcgccgaatacgcccagcgcagcgcgcttgaagtgccgattaccgatcaaatctgcgccgtcctgggcggcctgcgcccccccaccgaagcgctcgcagccctgatgacccgccgactgcgcgaagaggacggtggttag

SEQ ID NO: 58982 - protein, 305 aa, Gloeobacter violaceus
MRIAVLGGGAWGTTLADLAAAQDHQVRVWSRSGALALGEVLAQAEAVFSCLPMAAVAGVIDQVIALGLPAGVIVVNATKGLDRRTARPASSLWQARFADHPLVVLSGPNLAAEIRAGLPAATVVASADGQAAGRIQQCLASERFRVYTSADWRGVELGGVLKNVIAIAAGVSDGLGLGANAKAALITRGLAEMIRVGTHWGGLAETFYGLSGLGDLLTTCNSPLSRNYQVGFGLGKGQSLEAVLERLEGTAEGVATAAILAEYAQRSALEVPITDQICAVLGGLRPPTEALAALMTRRLREEDGG

SEQ ID NO: 58983 - DNA, 1011 bp, Haemophilus ducreyi
  CDS (1)..(1011): transl_table=11
atgactacagacgacactagacccattgctgtacttggtgcaggttcttatggcaccgcacttgcaatagcacttgcgcgtaatggacaacggactcacctttggggacataatcccgataaaatggttaaaatggctgaacaacgtatgaatacagaatctctgccagcaataccatttcctaacgcattaattattgaaaaagtattagcgcacacactgcaacaagcgcaagatatattaattgtcgttccaagccacgctttcgccgatatcctacaccaaataaaaccgctcttaacgacacaacatcggattatgtgggcaacgaaaggactagaacataatacaggccgactattacaaactgttgcaacagaaataataggagagcaacatccatttgcagtcttatctggccctacatttgccaaagaattagccttaggcttaccgactgccattacattagcctcacacgatgcaaaattcgcagatgaaatgcaacaacgaatccattgctcaaaagcatttagagtttacctaaatactgatatgattggcgtccaactaggtggcgcgatcaaaaatgttatcgcgattggtgcaggcatttcagatggaatggggtttggcgccaatgcacgaacagcacttattactagagggctcgccgaaatcagccgtttaggcgaatctttaggtgcaaatccaaaaacgtttatgggaatggccggattgggcgacttagtcttaacgtgtacagataaccaatcacgaaatcgccgttttggcttagcattaggccaaggcaaatcagcagaacaagcgattgctgaaattggacaagttgtagaaggtttttataatacaaaagaaacctatctattagcacaacgtcaaaacattgaaatgccaattgtagaacaaatctaccaaatgctcttttgcaacaaaaatgccaacgacgttgttaccagcctacttgaacggcaacgaaaaaaggaataa

SEQ ID NO: 58984 - protein, 336 aa, Haemophilus ducreyi
MTTDDTRPIAVLGAGSYGTALAIALARNGQRTHLWGHNPDKMVKMAEQRMNTESLPAIPFPNALIIEKVLAHTLQQAQDILIVVPSHAFADILHQIKPLLTTQHRIMWATKGLEHNTGRLLQTVATEIIGEQHPFAVLSGPTFAKELALGLPTAITLASHDAKFADEMQQRIHCSKAFRVYLNTDMIGVQLGGAIKNVIAIGAGISDGMGFGANARTALITRGLAEISRLGESLGANPKTFMGMAGLGDLVLTCTDNQSRNRRFGLALGQGKSAEQAIAEIGQVVEGFYNTKETYLLAQRQNIEMPIVEQIYQMLFCNKNANDVVTSLLERQRKKE

SEQ ID NO: 58985 - DNA, 1002 bp, Idiomarina loihiensis
  CDS (1)..(1002): transl_table=11
atgcagacacctcaggtgacagtattaggggcgggctcttacgggaccgcccttgctatttgttttgcccgtaaaggtattcctaccaccttgtgggggcgggatgccgataaagttgccgttatgcaaacggctcatgaaaacgaagagtacctgcctgcgtgcccgtttccggaatcattaaaggttactgccgacttaggcgaagcccttaaagacgtgaaaaacgtggtggtcgtagttcccagtcattcgttttcgtccatgctgaagcaggcaaaacctttgttagcggaacatgcccgcgttgcctgggcaactaaaggattagagccggacagtgggcgtcttttgtacgaagtcgcagaagaaactctgggcgacgagcatccgctagcggtgttatccggccccacttttgctattgaaatggctaaaggcttacctactgccatttcgatgtcgtcaactgatcaggcctttgtcgaagagctttccgggcttctgcattgtgaccgctctttccgggtttacaccaacaacgactttattggcgtgcaactgggtggcgtggttaaaaatgttatagccattggtgctggtatggccgacggtattggctttggtgctaatgcccgcacggcgcttattacccgcggtttggctgaacttacccggttaggtctgaagttaggcgcaaaaagcgaaacctttactggtatggcaggtttgggcgatttaattctcacctgtaccgacaatcagtcgcgtaatcgccgttttggcatggctttaggtcagggcaaaggagttgaagaagcgctgaagagtatcgggcaatcggttgaaggctaccgtaatacccgtgaagtggttgctttagcagcgcgcaacgaagtggaaatgcccatctgtgagcagatatatgcggtcctttatgaaggtaaagaaccgcaacaggccgctattgatttattaagccgtgagcgtaaaacggagtga

SEQ ID NO: 58986 - protein, 333 aa, Idiomarina loihiensis
MQTPQVTVLGAGSYGTALAICFARKGIPTTLWGRDADKVAVMQTAHENEEYLPACPFPESLKVTADLGEALKDVKNVVVVVPSHSFSSMLKQAKPLLAEHARVAWATKGLEPDSGRLLYEVAEETLGDEHPLAVLSGPTFAIEMAKGLPTAISMSSTDQAFVEELSGLLHCDRSFRVYTNNDFIGVQLGGVVKNVIAIGAGMADGIGFGANARTALITRGLAELTRLGLKLGAKSETFTGMAGLGDLILTCTDNQSRNRRFGMALGQGKGVEEALKSIGQSVEGYRNTREVVALAARNEVEMPICEQIYAVLYEGKEPQQAAIDLLSRERKTE

SEQ ID NO: 58987 - DNA, 1017 bp, Lactobacillus plantarum
  CDS (1)..(1017): transl_table=11
atgatgaaaaaaattgccgttttaggtgctggctcatggggtagcattttggcaaatctgttggatgaaaatggccactcagtgcggctctggtcgtactcaccggcccaagtcacagaattaaatgagaaacacacgaatgagcgatacgttcctgattttaaatattcagaaacgttgactgcttattctaatctaacacaggcgattgatggtgcggatgtaatcttgtttgtcgtaccaaccaaagcgattcgcgaagtggcccaacaagtgactgccgtgcttgccaagacccatcagcggccgattattgtgcatgctagcaagggactcgaacaagagacacacaagcggctgtcgcaagttttggcagaagaaattcccaccgaattacgacaagcgatcgttgtcttatcgggccctagtcatgctgaagaagtggcccgccacgatattacgttgattacggcggctagcgccgatgaatctgcagccgaattagtacagcaactcttcatgaatgactatttccgcatttacacgaataccgacgtggttggtgttgaactaggtgcggcgctcaaaaatatcattgccctgggtgctggtgcgctacacggcctgggctatggtgatgacgccaaggcagccttaatgactcgtggtttagctgaaatcagtcggctcggagtggcgttgggcgcagagccgttgacatttatcggtttatccggtgtaggcgatttaattgttacggcaactagtgtccattcgcgtaactggcgtgctggtaatgagttaggtgctggtcaggacctcaagacggtgattgataccatgggcatggttattgaaggtatcccgtcaactaaagccgcttacgagcttgcacagcaacaaaatatcgaaatgcccatcactgaagcgatttatgatgtattatataagagtgccgacattaaggaagtcattccacaattgatgcggcgcgaggggaaacctgagattcagtag

SEQ ID NO: 58988 - protein, 338 aa, Lactobacillus plantarum
MMKKIAVLGAGSWGSILANLLDENGHSVRLWSYSPAQVTELNEKHTNERYVPDFKYSETLTAYSNLTQAIDGADVILFVVPTKAIREVAQQVTAVLAKTHQRPIIVHASKGLEQETHKRLSQVLAEEIPTELRQAIVVLSGPSHAEEVARHDITLITAASADESAAELVQQLFMNDYFRIYTNTDVVGVELGAALKNIIALGAGALHGLGYGDDAKAALMTRGLAEISRLGVALGAEPLTFIGLSGVGDLIVTATSVHSRNWRAGNELGAGQDLKTVIDTMGMVIEGIPSTKAAYELAQQQNIEMPITEAIYDVLYKSADIKEVIPQLMRREGKPEIQ

SEQ ID NO: 58989 - DNA, 1017 bp, Listeria innocua
  CDS (1)..(1017): transl_table=11
atgacacagaaaaaagttgctattcttggcgctggaagttggggaacaggactcgcacttgtcctagctgataataatcataaaccagttatttggggaaacttagataaaattgtgaatgaaattaacgaatcgcacacgaatagtcactatttgccagatattattttaccaactgaggtaaaagcgacattatcacttgatgaagctatagatggtgctgaaattgtcgtgattgctattccaacaaatgcaatgcgtgtggtttgtaagcagctaaatgaagcgctgaaagaaccaactattttagtgcatgttagtaaagggattgaaccagaaacaaatcttagaatgtcagaagtaattgaagaagaagtagatgctacaaaacgtaaagctcttgttgttctttcagggcctagtcacgctgaagaagtagctcttcgtcatccaacaacgctttgtgctagctgtaaagatttgaaagcagcagaaatcgtgcaagatcgttttattaataataatttacgtatttatacgaatgatgatgtcatcggtgctgaaattggtggagcgcttaaaaatattatcgcacttggcgcaggaatctctgatggccttggatacggcgataatgctaaagcggcactaatgacacgcggaatggctgaaattactcgtctcggagttgctgtgggctctaatccacaaaccttttacgggctaactggtattggtgacttaatcgttacttgtacaagtgtgcattcacgtaattggcgtgctggaaacatgctcggtaaaggcgagaatttagatgaagttttagaaaaaatgggtatggtcgttgaaggtgtgcgtacagccaaagcagttcatggttgggcgaaaaaactagatattgatatgccaattaccgaatcgatttacgcgattttattcgagaataaagatgctcgagaagccgttgatttattgatgggtcgtaaaaagaaaatcgaaaaagagtcattttaa

SEQ ID NO: 58990 - protein, 338 aa, Listeria innocua
MTQKKVAILGAGSWGTGLALVLADNNHKPVIWGNLDKIVNEINESHTNSHYLPDIILPTEVKATLSLDEAIDGAEIVVIAIPTNAMRVVCKQLNEALKEPTILVHVSKGIEPETNLRMSEVIEEEVDATKRKALVVLSGPSHAEEVALRHPTTLCASCKDLKAAEIVQDRFINNNLRIYTNDDVIGAEIGGALKNIIALGAGISDGLGYGDNAKAALMTRGMAEITRLGVAVGSNPQTFYGLTGIGDLIVTCTSVHSRNWRAGNMLGKGENLDEVLEKMGMVVEGVRTAKAVHGWAKKLDIDMPITESIYAILFENKDAREAVDLLMGRKKKIEKESF

SEQ ID NO: 58991 - DNA, 1017 bp, Listeria monocytogenes
  CDS (1)..(1017): transl_table=11
atgacacagaaaaaagtagctattcttggcgctggaagttggggaacaggtcttgcacttgtcctagctgataataatcataaaccagttatttggggaaacttagataaaattgtgaatgaaattaacgaatcgcacacgaatagtcactatttgccagatattattttaccaactgaggtaaaagcgacattgtcacttgatgaagctattgatggtgcagaaattgtcgtaattgctattccaacaaatgcgatgcgtatcgtttgtaagcagttaaatgaagcgctaaaagaacccacaattttagttcatgtgagtaaaggtattgaaccagaaacaaaccttcgaatgtctgaagtgattgaggaagaaattgatgcagctaaacgtaaagcacttgtggttctttctggaccaagtcatgcggaagaagttgcccttcgtcatccaacaacactttgtgcgagctgtaaagatttatcagctgctgagattgttcaagatcgtttcatcaataataacttgcgtatttatacgaatgatgatgtgattggtgcagaaattggtggcgcgcttaaaaacattatcgcacttggcgcaggaatctctgacggccttggttacggcgataatgccaaagcggcactaatgactcgcggaatggcagaaatcactcgtctcggtgttgctgttggctctaatccacaaaccttttacgggctgactggtattggtgacttaatcgttacttgcactagtgtgcattcacgtaattggcgagctggaaatatgctaggtaaaggcgagaatttagatgaagtattagaaaaaatgggtatggtcgttgaaggtgtacgaacagccaaagcagtacatggctgggcgaaaaaactagatattgatatgccaattactgaatcgatttacgcgattttattcgaaaataaagatgctcgcgaagcagttgatttattaatgggtcgcgaaaagaaaatcgaaaaagaatcattttaa

SEQ ID NO: 58992 - protein, 338 aa, Listeria monocytogenes
MTQKKVAILGAGSWGTGLALVLADNNHKPVIWGNLDKIVNEINESHTNSHYLPDIILPTEVKATLSLDEAIDGAEIVVIAIPTNAMRIVCKQLNEALKEPTILVHVSKGIEPETNLRMSEVIEEEIDAAKRKALVVLSGPSHAEEVALRHPTTLCASCKDLSAAEIVQDRFINNNLRIYTNDDVIGAEIGGALKNIIALGAGISDGLGYGDNAKAALMTRGMAEITRLGVAVGSNPQTFYGLTGIGDLIVTCTSVHSRNWRAGNMLGKGENLDEVLEKMGMVVEGVRTAKAVHGWAKKLDIDMPITESIYAILFENKDAREAVDLLMGREKKIEKESF

SEQ ID NO: 58993 - DNA, 1008 bp, Methylococcus capsulatus
  CDS (1)..(1008): transl_table=11
atgaggcactgcatcagcgttctcggcgccggctcctggggcacggcgctggccctgctcatcgccaggaacggcgtgcccactctgctgtggagccaccgccgggaacacgccgaggccatggcggcagagcgccggaacgcacattatctgccccatgccacatttcccgacaccctgagcgtgacgccggacttggccgaggcagccgccacggccagcgatgccgtactggtcgcggtccccagccacgccttccgcgccacgctcgacctctgcgccccacacctgcaaccggaagccggtctcatgtgggccaccaagggactggaccgcacccgcggctgtctgctgcacgaaaccgcccgcgagattctcggcccagaccgtgcgctcgccgtgctgtcgggaccgactttcgccgccgaagtggtcgcggaactgcccagcgccatcactgtcggcgccagtagcgaagccttcggcgccaagatcgtttcctggctgcacaacgcctatttccgcgcctacaccaccgacgacctcatcggcgcccagctgggaggcgcctgcaagaacgtgctggcgatcgccgccggcatctccgacggcttggggttcggcgccaacgccagggcggccctcatcacccggggactggccgagatgatgcggctgagtctcgccctgggcgccaggaccgaaacgctcatgggcctagccggggtcggcgatctggtactcaccgccaccgacaaccagagccgcaaccgccgcttcggcctgggggtgggcaaaggcaggccgcgtgaggaaatccacgccgagatcggccaggagatcgaaggcatcctggcggcccggctgatccacgaactcgccggcaggaagggcgtggacatgccgatcaccgcccagacctaccgcgtgctctacgaaggcttgccgccggaggaagccgtgcgcaatctgctgctgcgggaccccaagccggaatgggaccgctaa

SEQ ID NO: 58994 - protein, 335 aa, Methylococcus capsulatus
MRHCISVLGAGSWGTALALLIARNGVPTLLWSHRREHAEAMAAERRNAHYLPHATFPDTLSVTPDLAEAAATASDAVLVAVPSHAFRATLDLCAPHLQPEAGLMWATKGLDRTRGCLLHETAREILGPDRALAVLSGPTFAAEVVAELPSAITVGASSEAFGAKIVSWLHNAYFRAYTTDDLIGAQLGGACKNVLAIAAGISDGLGFGANARAALITRGLAEMMRLSLALGARTETLMGLAGVGDLVLTATDNQSRNRRFGLGVGKGRPREEIHAEIGQEIEGILAARLIHELAGRKGVDMPITAQTYRVLYEGLPPEEAVRNLLLRDPKPEWDR

SEQ ID NO: 58995 - DNA, 990 bp, Methylobacillus flagellatus
  CDS (1)..(990): transl_table=11
atgaaaatctctatcttaggcgccggggcctggggcacagccctggccctgcaaatcagccgtcggcaccaggtttctctctggacgcgcaaccaggcgcatatcgtggatatgcaggtgacgcgtgccaacctgcaatacctgggcgactttgccttcggtgatcagcttgcggtggaaggcgatctggggcgcgcgctggatggcgcagacctgattgtctctgtcgtgccgaccaacggtttccgaaatgcattgaaggaaatcaagcggcttggctgtgatgcgccagtggtctgggcctccaaagggttggaagcggcgacggccaagttgccgcacgaagttgcccaggacgaactgggtgacagccgccactggggcgtgttgtccgggccgagttttgcggctgagctggtgcgcgggttacccacggcggtaaccttggctgccaatgatgcggagtttgccgccagggctggtgcgatgctgcatggcggtaatttccgcgtctataccagcacggatgtcattggggtgtcggttggcggcgccctcaagaacgtattggccattgccgcgggtatcagcgacggcatgcaatgcggcaataacgcccgcgcggcgctgattacacgcggcatagccgaaatgacgcgcttcggcgtggccttgggcggtgccaaggaaaccttcatgggcttgaccggcgccggtgacttgatcttgacttgcaccggacaatactcgcgtaaccgggaagtaggcctgcgccttgccaatggccaaaccctgcaggaaatcctcaaaaccttgggccatgtggcggaaggggtgcatactgcgcgggaagtggtcaagcgcgcaggccagttgggggtcgagatgccgattacgcaggaggtggatcaggtgctgtcgcatggccgttcgccgcggcaggcgatggaaaacctgctcagccgggagcagaagtccgaagcgctgtag

SEQ ID NO: 58996 - protein, 329 aa, Methylobacillus flagellatus
MKISILGAGAWGTALALQISRRHQVSLWTRNQAHIVDMQVTRANLQYLGDFAFGDQLAVEGDLGRALDGADLIVSVVPTNGFRNALKEIKRLGCDAPVVWASKGLEAATAKLPHEVAQDELGDSRHWGVLSGPSFAAELVRGLPTAVTLAANDAEFAARAGAMLHGGNFRVYTSTDVIGVSVGGALKNVLAIAAGISDGMQCGNNARAALITRGIAEMTRFGVALGGAKETFMGLTGAGDLILTCTGQYSRNREVGLRLANGQTLQEILKTLGHVAEGVHTAREVVKRAGQLGVEMPITQEVDQVLSHGRSPRQAMENLLSREQKSEAL

SEQ ID NO: 58997 - DNA, 1005 bp, Mycobacterium tuberculosis
  CDS (1)..(1005): transl_table=11
atggccggaatagcaagcaccgtcgcggtgatgggcgccggtgcatggggcacggccctggctaaggtgctggccgacgcgggcggagaggtcacgctgtgggcgcggcgagctgaggtggccgatcagatcaataccacccgatataaccccgactatctgcccggtgcgctgttaccaccgagcattcatgccaccgcagatgccgaggaggcacttgggggcgcatccacggtgctgttgggagtgcccgcgcagaccatgcgggccaatctcgagcggtgggctcccctgttgcccgagggtgcgaccttggtcagtctggccaagggcatcgagttgggcaccctgatgcggatgagccaggtcatcatctcggtgaccggtgccgagccgccgcaggtcgcggtgatctctggacccaacctggccagcgagatcgccgaatgccagcccgccgctaccgtcgtcgcgtgcagcgactccggccgcgcggttgccttgcagcgcgcgctgaacagcgggtacttccgcccctacaccaacgccgatgtcgtcggcaccgagatcggcggggcgtgcaagaacatcatcgcgcttgcgtgcggaatggcggtgggcatcgggctgggcgaaaacaccgcggccgcgatcatcacccggggcctggcggagatcatccggctcgggacggcgctcggcgccaacggcgcgacgttggccggtctggcaggggtcggtgatctggtggccacctgcacctcaccgcgttcgcgcaaccgatcgtttggcgaacgcctgggccggggcgaaacgttgcagtcggcgggcaaggcttgtcatgtcgtcgaaggcgtgacgtcgtgcgaatccgtgctcgcgctggcgtccagctacgacgtcgaaatgccactcaccgacgcggtgcatcgggtctgtcataaagggctgtcggtggacgaggcgataacgctgctgctgggtcgccgcaccaagcccgaatga

SEQ ID NO: 58998 - protein, 334 aa, Mycobacterium tuberculosis
MAGIASTVAVMGAGAWGTALAKVLADAGGEVTLWARRAEVADQINTTRYNPDYLPGALLPPSIHATADAEEALGGASTVLLGVPAQTMRANLERWAPLLPEGATLVSLAKGIELGTLMRMSQVIISVTGAEPPQVAVISGPNLASEIAECQPAATVVACSDSGRAVALQRALNSGYFRPYTNADVVGTEIGGACKNIIALACGMAVGIGLGENTAAAIITRGLAEIIRLGTALGANGATLAGLAGVGDLVATCTSPRSRNRSFGERLGRGETLQSAGKACHVVEGVTSCESVLALASSYDVEMPLTDAVHRVCHKGLSVDEAITLLLGRRTKPE

SEQ ID NO: 58999 - DNA, 1011 bp, Nocardia farcinica
  CDS (1)..(1011): transl_table=11
atgacgagggcggcagtacttggtgcgggttcctggggaaccgcgttcgcgaaggtgttggccgacgcgggaacagaggtgacgatctgggcgcggcgcccggagatcgccgaggcgttggccaccgaacaccgcaatcccgcctaccttccggacgtgcaactacccgccgtatcggccacgcacgacgccgaggccgcgctcgacggcgcgcaactggtcgtgctcgcggtgccctcgcagtcgctgcgggccaacctcaccggatggcggcccgcgctgcgcgccgccatcgacgagcacgacgccacactgctgagtctggcgaagggcatcgagaccggcacgctgctgcggatgagtcaggtcatcgcggaggtgaccggcgccgaggaacgccgcatcgcggtgctctccggtccgaacctggccagggagatcgcggccggacagcccgccgcgaccgtcatcgcctgttccgacgccgcccgggcggaggccgtgcaacaggccagctacaccggctatttccgcccgtacaccaacaccgacgtgatcggctgcgagatcggcggcgcctgcaagaacgtgatcgcgctggcctgcggcatcgcggcgggcatgggtctgggtgacaactccatcgccagcctcatcacccgcggcctcgccgagatcatgcggctggcggtgaccctcggcgcggagccggtgacgctggccgggctggccggggtcggcgacctggtcgccacctgcacctcgccgctgtcgcgcaatcgttccttcgggcatgtgctcggcgcgggcggatcgatggaggcggcgcagcaggcgacccatggacaggtcgccgagggtgtgaagtcgtgcacatcggtgcgggcgctggccgccgcgcacgaggtggagatgccgttgaccgacgccgtgcaccgggtgtgccacgagggcatttcggttcgcgaggccgtcggcagcctgctcggacgccgcatcaagccggagtag

SEQ ID NO: 59000 - protein, 336 aa, Nocardia farcinica
MTRAAVLGAGSWGTAFAKVLADAGTEVTIWARRPEIAEALATEHRNPAYLPDVQLPAVSATHDAEAALDGAQLVVLAVPSQSLRANLTGWRPALRAAIDEHDATLLSLAKGIETGTLLRMSQVIAEVTGAEERRIAVLSGPNLAREIAAGQPAATVIACSDAARAEAVQQASYTGYFRPYTNTDVIGCEIGGACKNVIALACGIAAGMGLGDNSIASLITRGLAEIMRLAVTLGAEPVTLAGLAGVGDLVATCTSPLSRNRSFGHVLGAGGSMEAAQQATHGQVAEGVKSCTSVRALAAAHEVEMPLTDAVHRVCHEGISVREAVGSLLGRRIKPE

SEQ ID NO: 59001 - DNA, 1035 bp, Oceanobacillus iheyensis
  CDS (1)..(1035): transl_table=11
atggaaaaagttgctgtactaggagccggtagttggggaacagctcttgcaattgtattagctgacaatggtcatgaagttcgattatggtcacataggaaggaacatgcagaaacaattaatgaaactcaccgaaatcataaatatttagatgtcgatattccaaatgagattaccgcttatagtgatatgcatcaaacagtctctggggtagatgcagttgttattgtagtaccaacgaaagcaattcgagaagtgtgtagtgaactgaataaatggatggattcaaaaacaactgttatccacgcgacaaaaggcattgaacctgttagcttaaaacgggtctctgagatgattgaagaagagatggatataaagtacgaagatattgtcgtgctatctggtccaagtcatgcagaagaagttgctttaagacatccgactacagttacaacttcatctattaatctagaaaaagcaaaacatgcacaagatcttttctcaagtgattcattccgtgtgtatacaagcgatgatattctaggaatagaattaggtggggcacttaaaaacattattgcattgggagcaggaatttctgatggtttaggttttggtgataacgcgaaagctgctttaattacaagaggattggcagaaattgctcgattaggaacgtctttaggggcaaacccgttaagttttcttggattatcgggagttggagatttaattgttacttgtacaagtgttcatagccgaaattggcgtgcaggaaatctattgggtaaaggtaaccagcttgaggatgtacttgagcagatgggaatggtagttgaaggtgtacgcaccgttaaagctgcccatcaatttgctaaggatcaaaatgttgatatgccgataacaagcggaatatttcaaattctatttgaaaataaaaatcccaaagatgtagtcgaacaacttatgaacagaggaaaaagagatgaaatggatgatttagcagttctgcttaaggaaagatattcagaataa

SEQ ID NO: 59002 - protein, 344 aa, Oceanobacillus iheyensis
MEKVAVLGAGSWGTALAIVLADNGHEVRLWSHRKEHAETINETHRNHKYLDVDIPNEITAYSDMHQTVSGVDAVVIVVPTKAIREVCSELNKWMDSKTTVIHATKGIEPVSLKRVSEMIEEEMDIKYEDIVVLSGPSHAEEVALRHPTTVTTSSINLEKAKHAQDLFSSDSFRVYTSDDILGIELGGALKNIIALGAGISDGLGFGDNAKAALITRGLAEIARLGTSLGANPLSFLGLSGVGDLIVTCTSVHSRNWRAGNLLGKGNQLEDVLEQMGMVVEGVRTVKAAHQFAKDQNVDMPITSGIFQILFENKNPKDVVEQLMNRGKRDEMDDLAVLLKERYSE

SEQ ID NO: 59003 - DNA, 1023 bp, Pseudomonas aeruginosa
  CDS (1)..(1023): transl_table=11
atgacagagcagcaaccgattgccgtgctcggcggcggcagtttcggcaccgccatcgccaacctgctggccgagaacggccaggcggtccgccagtggatgcgcgacccggaacaggccgaggcgatccgcacacgacgcgagaacccgcgctacctgaaaggggtcaaggtgcatcccggagtcgacccggtcaccgacctggagcgcaccctggccgattgccaactgatcttcgtcgccttgccctccagcgccctgcgcaaggtgctgcaaccacaccaggcggcattgacggacaagctgctggtgagcctgaccaagggcatcgaggcgcacaccttcaagctgatgagtgagatcctcgaggaaatcgccccgcaagcccgcatcggggtgatttccggcccgaacctggcgcgcgagatcgcagagcacgagctgaccgccacggtggtcgccagcgaggacgacgagctgtgcgcccgcgtccaggcggccctgcacggccgcaccttccgcgtctacgccagccgcgaccgcttcggcgtggaactcggcggtgcgctgaagaacgtctacgcgatcatggccggcctggccgcggcgatggacatgggcgagaacacccgcagcatgctgatcacccgcgcgctggcggaaatgacccggttcgccgtcaagctcggtgccaacccgatgacctttctcggcctcgccggcgtcggcgacctgatcgtcacctgttcctcgccgaagagccgcaactaccaggtcggccacgccctcggcgaggggctcagcctggaggaggcggtatcgcgcatgggcgagaccgcggagggtgtgaacactctcaaggtactcaaggaaaagtccgacgagatgcaggtgtacatgccgctggtcgccggtctccatgcgatcctcttcgaaggccgcaccctggcgcaggtcatccagttgctgatgcgcggcgagccgaagaccgacgtcgatttcattcccaccaccggcttctga

SEQ ID NO: 59004 - protein, 340 aa, Pseudomonas aeruginosa
MTEQQPIAVLGGGSFGTAIANLLAENGQAVRQWMRDPEQAEAIRTRRENPRYLKGVKVHPGVDPVTDLERTLADCQLIFVALPSSALRKVLQPHQAALTDKLLVSLTKGIEAHTFKLMSEILEEIAPQARIGVISGPNLAREIAEHELTATVVASEDDELCARVQAALHGRTFRVYASRDRFGVELGGALKNVYAIMAGLAAAMDMGENTRSMLITRALAEMTRFAVKLGANPMTFLGLAGVGDLIVTCSSPKSRNYQVGHALGEGLSLEEAVSRMGETAEGVNTLKVLKEKSDEMQVYMPLVAGLHAILFEGRTLAQVIQLLMRGEPKTDVDFIPTTGF

SEQ ID NO: 59005 - DNA, 1026 bp, Pseudomonas fluorescens
  CDS (1)..(1026): transl_table=11
atgacacaacagcgccctattgcggtcctgggaggcggaagttttggtaccgccgtggccaatctgctggccgagaacggtcaccgggtgcggcagtggatgcgcgaccccgagcaggccgaggccattcgggtcaaccgcgagaatccgcgctatctcaagggcatcaagattcatccggcggtggagccggtcaccgacctgctggccaccctcaatgacagtgacctgtgctttgtcgccttgccctccagcgccctgcgctcggtgctggcgccccacgccgagctgctccgcggcaagctgctggtcagcctgaccaagggcatcgaggcccagaccttcaagctgatgagcgagatcctccaggacatcgccccgcaagcgcgcatcggcgtactttccggccccaacctggctcgggaagtggccgagcacgccctgaccgccaccgtggtcgccagtgaagacgaagagctctgtcagcgggtccaggccgcgctgcacggccgcaccttccgtgtgtatgccagcgccgaccgcttcggtgtggaactgggcggggcgctgaagaacgtctacgcgatcatcgccggcatggcggtggccctgggcatgggggaaaacaccaagagcatgctgattacccgggcgctggcggaaatgacccgctttgccgtgagccagggcgccaaccccatgaccttcctcggcctggccggggtcggcgacctgatcgtcacctgttcctcgcccaagagccgcaactaccaggtgggctttgccctgggccagggcctgagcctggaagaggcggtgacccgcctgggtgaggtggcggagggcgtcaacaccctcaaggtgctcaaggtcaaggctcaggagctgggggtctacatgccgctggtggccggcctgcacgcgatcctgttcgaagggcgtacgctgaaccaggtaatcgagctcttgatgcgcggcgagccgaaaaccgacgtcgactttatctccaccagcggattcaactga

SEQ ID NO: 59006 - protein, 341 aa, Pseudomonas fluorescens
MTQQRPIAVLGGGSFGTAVANLLAENGHRVRQWMRDPEQAEAIRVNRENPRYLKGIKIHPAVEPVTDLLATLNDSDLCFVALPSSALRSVLAPHAELLRGKLLVSLTKGIEAQTFKLMSEILQDIAPQARIGVLSGPNLAREVAEHALTATVVASEDEELCQRVQAALHGRTFRVYASADRFGVELGGALKNVYAIIAGMAVALGMGENTKSMLITRALAEMTRFAVSQGANPMTFLGLAGVGDLIVTCSSPKSRNYQVGFALGQGLSLEEAVTRLGEVAEGVNTLKVLKVKAQELGVYMPLVAGLHAILFEGRTLNQVIELLMRGEPKTDVDFISTSGFN

SEQ ID NO: 59007 - DNA, 1065 bp, Pseudomonas fluorescens
  CDS (1)..(1065): transl_table=11
atgccggcatcgccactggtatggattaacggattacatatgactgaacagcgcccgattgcggtcctgggaggcggaagtttcggtaccgccgtggccaatctgttggccgagaacggccatcaagtccggcagtggatgcgtgacccggaacaggccgaggctatccgggtcaatcgcgagaacccgcgttacctcaaaggcatcaagattctgcccggcgtgaccgcggtcaccgacctgcaggaaaccctcgacgcctgcgagttgtgtttcgtcgcgttgccgtccagcgcactgcgcacagtgctggcggcgcatgccgaacgcctgagcggcaagatgctggtcagcctgaccaaaggcatcgaagcgcagaccttcaaactgatgagccagattctcgaagaaatcgccccgcaggcacgcatcggcgtgctgtccgggccgaacctcgcgcgggaaatcgccgagcacgcgctgaccgccaccgtggtcgccagcgaagacgaagaactctgcaaagccgtgcaggctgcattgcatggccgcactttccgcgtctacgccagcgccgaccgtttcggcgtggagctgggcggcgcactgaaaaacgtctacgcgatcatcgccggcatggcggtggcgctggaaatgggcgagaacaccaagagcatgctgatcacccgcgccctggccgaaatgacccggtttgcggtgaatcagggcgccaacccgatgaccttcctcggtctggccggtgtcggcgatctgatcgttacctgctcgtcgccgaaaagccgcaactaccaggtcggtttcgccctcggtcagggcttgagcctcgacgaagcggtgtcgcgcctgggtgaagtggccgaaggcgtcaacaccctgaaagtgctcaaggccaaggcccaggaggtcggcgtgtacatgccgctggtcgccggactgcatgcaatcctgttcgaagggcgcacgcttgagcaggtgatcggtctgctgatgcgtgccgaaccgaaaaccgatgtcgactttatttccaccagtggtttcaactga

SEQ ID NO: 59008 - protein, 354 aa, Pseudomonas fluorescens
MPASPLVWINGLHMTEQRPIAVLGGGSFGTAVANLLAENGHQVRQWMRDPEQAEAIRVNRENPRYLKGIKILPGVTAVTDLQETLDACELCFVALPSSALRTVLAAHAERLSGKMLVSLTKGIEAQTFKLMSQILEEIAPQARIGVLSGPNLAREIAEHALTATVVASEDEELCKAVQAALHGRTFRVYASADRFGVELGGALKNVYAIIAGMAVALEMGENTKSMLITRALAEMTRFAVNQGANPMTFLGLAGVGDLIVTCSSPKSRNYQVGFALGQGLSLDEAVSRLGEVAEGVNTLKVLKAKAQEVGVYMPLVAGLHAILFEGRTLEQVIGLLMRAEPKTDVDFISTSGFN

SEQ ID NO: 59009 - DNA, 1026 bp, Pseudomonas putida
  CDS (1)..(1026): transl_table=11
atgactgaacagcaacctgttgcggttctgggcggcggcagcttcggcaccgccgtggcaaacctgctggcggaaaacggtgtgccggtgcgccaatggatgcgcgacccggcgcaggccgaggccatgcgtgtgaatcgcgagaatccgcgctatctcaagggtatccgcctgcacgatggggttgagccggtcaacgacttgctggccaccctgcaggccagcgagctgatcttcgttgccctgccatcgagtgccttgcgcagcgtgctggcaccgcatgccgagctgctgcgcggcaagggcctggtcagcctgaccaagggcatcgaagcgcaaagcttcaagctgatgagccagatcctcgaagagatcgcccccgaggcgcgcatcggcgttttgtcggggcccaacctggcgcgcgaaatcgccgaacatgcgctgactgccacagtggtggccagtgagcacgaagacctgtgccagcaggtacaggccgtactgcacgggcgcaccttccgcgtctacgccagtgccgaccgtttcggcgtcgaactgggcggtgcactgaagaacgtctacgcgatcatcgccggcatggcggtggccttggggatgggcgagaacaccaagagcatgctgattacccgggccttggccgagatgacccgtttcgccgtcagccagggcgccaaccccatgacgttcctcggcctggccggtgtcggtgacctgatcgtcacctgctcctcgcccaagagccgcaactatcaggttggctacgcactggggcagggccaaagcctggaagaggcggtcaaccgcctgggcgaagtggccgagggggtcaacacgctcaaggtgctcaagaccaaggcccagcaagtgcaggtgtacatgccgctggtggctggcctgcatgccatcctgttcgaagggcgcacgctgaaccaggtgatcgagcacctgatgcgcgccgagcccaagaccgatgtcgatttcatttccatcagcggtttcaactga

SEQ ID NO: 59010 - protein, 341 aa, Pseudomonas putida
MTEQQPVAVLGGGSFGTAVANLLAENGVPVRQWMRDPAQAEAMRVNRENPRYLKGIRLHDGVEPVNDLLATLQASELIFVALPSSALRSVLAPHAELLRGKGLVSLTKGIEAQSFKLMSQILEEIAPEARIGVLSGPNLAREIAEHALTATVVASEHEDLCQQVQAVLHGRTFRVYASADRFGVELGGALKNVYAIIAGMAVALGMGENTKSMLITRALAEMTRFAVSQGANPMTFLGLAGVGDLIVTCSSPKSRNYQVGYALGQGQSLEEAVNRLGEVAEGVNTLKVLKTKAQQVQVYMPLVAGLHAILFEGRTLNQVIEHLMRAEPKTDVDFISISGFN

SEQ ID NO: 59011 - DNA, 1017 bp, Ralstonia solanacearum
  CDS (1)..(1017): transl_table=11
atgcggatttccgttctgggcgcgggcgcctggggcacggccctggccagccacgccgcgcaatcgcacgatgtcgtgctgtggggccgcgacgcggcactggtggcccagatggcggcgacacgcgccaacgagcgctacctgccgggcatcccgctgcacgcatcgctgcgtttcgaggcggagatgtcggccgcgctcgatcatgccaccggggaagacgcgctggtcgtgatcgcctcgccggtcgcggggctggccgacctgacgcgcggcgtggccgcgcatggcggcgtgcgcaacgtgatctggctgtgcaagggcttcgaccccgagtcgggcgcgctgccgcacgccattgtggccggcgtgctggcgcagaccgggcgcgccgatctggccaccggtgcactgtccggcccgagcttcgccaaggaagtcgcgcagggactgccgtgcgcgatgacggtggcgtcggccagcaccgcgctgtgcacgcgcactcagcgcgctttccatcaccatgcgatgcgcgtctacgcgagcgacgacctcgtcggcgtggaagtgggcggcgcggtgaagaacgtgctggccattgcgaccggcgcggcggatggtctgggcctgggcctcaatgcgcgcgccgcgctggtgacgcgcggcctggccgagatgacgcggttgggcacggcactgggcggccggccggagaccttcatgggcctgaccggcatgggcgatctgctgttgaccgccaccggcgatctctcccgcaaccgcaccgtcggcatgcagctcgcgcaggggcgttcgctggatgagattctggcgcacctcggccatgtcgccgagggtgtgcgctgcgcacgggcggtggcggctcttgcgcgcgccaagggcgtcgacatgccgatcacctttgccgtgtgcgaagtcctgttcgatgggctggcgccgtcgcgcgccgtcgatcgcctgctgcagcgcgacgccaaggccgaatccgtgcgctga

SEQ ID NO: 59012 - protein, 338 aa, Ralstonia solanacearum
MRISVLGAGAWGTALASHAAQSHDVVLWGRDAALVAQMAATRANERYLPGIPLHASLRFEAEMSAALDHATGEDALVVIASPVAGLADLTRGVAAHGGVRNVIWLCKGFDPESGALPHAIVAGVLAQTGRADLATGALSGPSFAKEVAQGLPCAMTVASASTALCTRTQRAFHHHAMRVYASDDLVGVEVGGAVKNVLAIATGAADGLGLGLNARAALVTRGLAEMTRLGTALGGRPETFMGLTGMGDLLLTATGDLSRNRTVGMQLAQGRSLDEILAHLGHVAEGVRCARAVAALARAKGVDMPITFAVCEVLFDGLAPSRAVDRLLQRDAKAESVR

SEQ ID NO: 59013 - DNA, 1032 bp, Rhizobium loti
  CDS (1)..(1032): transl_table=11
atgacaggtgaagcggtgagcggccaagacgtcagcaatcccggcaaaagcagctggcgtgtcaccgtgctgggcggcggcgcctggggcacggcgctggcgctggccatgctgcgcgccggccataaggtgcggctgttcgcgcgcgatccgcaaaccgtggccgcgatcggccaaggccagaatccgcgctatctgcccggcatcgccattgcgcccggcatcgaggcgacatcggacattgcggcagcgctctccggcgccgattgcgtgctggcggtgacgccggcgcaatcgctgcgggcgacgctggctgtggcgaaggacaatatgccggacggcatcccgcttgtcctctgcgccaagggcatcgagcgcgacaccggcgccttgctgtcggcaattgtcgaggaaatcctgccgcgaaatccggttgccgcactgtcgggcccgagcttcgccaccgatgtcgcccgcggcctgccgacggcggtcgttgtcgccgcccgtgacgaggcgctagcagctgaccttgccgctcgcttttccgcgcaaaacctgcgttgctattcaagcgacgacctgatcggcgtcgagatcggcggcgccttgaagaatgtctttgccatcgccgcgggcgccgtcaccggcgccggacttggcgccagtgcccaggccgccatggtgacgcgcggcttcgtcgaactgcgccgcatcggtgccgccttcggcgccaggcccgagactctgatggggctttccggccttggcgacctgctgctgacctgctcgtccgcccaatcgcgcaacttcgcctacgggctgacgctcgggcaaggaaaggcgcttgctggcctgccgctggccgagggcgtgccgacggcggcgatcgccgcccgcatcgccgtcgagcgcggcatcgacgcgccgatcatcgccgccgtggcggccatactggacggcgccatcaccatcagccaggccgtgaccgccttgatgacccggccgctgaagaccgaaaccaacgattga

SEQ ID NO: 59014 - protein, 343 aa, Rhizobium loti
MTGEAVSGQDVSNPGKSSWRVTVLGGGAWGTALALAMLRAGHKVRLFARDPQTVAAIGQGQNPRYLPGIAIAPGIEATSDIAAALSGADCVLAVTPAQSLRATLAVAKDNMPDGIPLVLCAKGIERDTGALLSAIVEEILPRNPVAALSGPSFATDVARGLPTAVVVAARDEALAADLAARFSAQNLRCYSSDDLIGVEIGGALKNVFAIAAGAVTGAGLGASAQAAMVTRGFVELRRIGAAFGARPETLMGLSGLGDLLLTCSSAQSRNFAYGLTLGQGKALAGLPLAEGVPTAAIAARIAVERGIDAPIIAAVAAILDGAITISQAVTALMTRPLKTETND

SEQ ID NO: 59015 - DNA, 1002 bp, Rhizobium meliloti
  CDS (1)..(1002): transl_table=11
atgagcggcaaatcgaagagcgcgccaaaaatcgtggtcgtcggggcgggcgccttcggaacggcgctttcggccgtcgcggcagcgaaggacaaggcgaatgtcactctgcttgcccgccgggaagaagcggccgcggagtgtcgccgtaccgggcggaatgacgcggttctcccgggaattccgcttcccccgggccttgtctattcttcgcaggcggccgcgctcgaagacgccgacatcgtccttttcgcgatgccttcgcaagcgcatcgggacgcggcgcgtagctacggtcccgcgatcggcgccagggcgatcgtcgtcacctgcgccaagggcatggagcaatcgaccggccaactcctcaccgacgttctcgaagaggagttgccgggccgccgcatcggggtgctttccggcccgggctttgccgccgatatcgctagcggcctgccgactgccatggtgatcgccgcccccgatacggcgatcgcgacggagcttgcggaggcgctttccgggcggacgttccggctctatccctcggcggatcgcaccggcgttcagcttggcggggcgctcaagaacgtgctggcgatcgcctgcggcatcgtcgaaggcgccggtctcggcgactcggcccgcgctgcgctgatctcgcgcgggcttgcggaaatgtcgcgcttcatcgttgcgagaggcggcgaggcggacacggtgcgcggcctttcgggattgggtgacctcgtgctgaccgcgacgagccaccagtcgcgcaacctgcgcttcggcatagcgctcggcaaggacggccgggccgcggccggaagcagcgagctggtcgagggcgcctttgccgcatccgtcgccgcccgcgtggcgggcgcactcggcatcgagatgccggtcaccgaggccgtcgcggccatcgtcgacggaaagctggatgtccgctcggccctcgaacaactgatgtccagaccgatcacccacgaatga

SEQ ID NO: 59016 - protein, 333 aa, Rhizobium meliloti
MSGKSKSAPKIVVVGAGAFGTALSAVAAAKDKANVTLLARREEAAAECRRTGRNDAVLPGIPLPPGLVYSSQAAALEDADIVLFAMPSQAHRDAARSYGPAIGARAIVVTCAKGMEQSTGQLLTDVLEEELPGRRIGVLSGPGFAADIASGLPTAMVIAAPDTAIATELAEALSGRTFRLYPSADRTGVQLGGALKNVLAIACGIVEGAGLGDSARAALISRGLAEMSRFIVARGGEADTVRGLSGLGDLVLTATSHQSRNLRFGIALGKDGRAAAGSSELVEGAFAASVAARVAGALGIEMPVTEAVAAIVDGKLDVRSALEQLMSRPITHE

SEQ ID NO: 59017 - DNA, 1050 bp, Rhodospirillum rubrum
  CDS (1)..(1050): transl_table=11
atgaaccagatcatcgatcatatcgccgtcatcggcggcggcgcctggggcaccgcgcttgcccagacctcgcggcgcgccggccggcgggtaaccttgtgggcccgcgagcccgaggtcgcccgggcgatcaacgccacccacgagaacccggacttcctgcccggcgtcagccttgatcccggccttcacgccaccgccgatctggccgaggccctgcgcggcgccgaggccgtgctggtggtctgcccggcccaggccctgcgcccggtgctgaccaccgcccgcccgctctggccggggcgggcgccgatggtgatctgcgccaagggcgtcgagcagggaagcggggcgcggatgtcggaagtggccaccgccgttcttcccgaagcacccctggccgtgctgtcgggcccgaccttcgcccgcgaggtggccgagggccggccgacggcggtcaccctggcctgcgccgatggcgccctggccgaggccctggtgttggcccttggcacccggaccttccgcccctatgcctcgaccgatgtggtcggcgccgaaattggcggggcggtcaagaacgtgctggcgatcgcctgcggcgtggtcgaggggctggggttgggcgacaatgcccgcgccgccctgctgacccgggggctggccgagatcacccgcctgggccgggcccttggcgcgcggtcggaaaccctgtcggggctgtcgggtttgggcgatctgatcctgacggcgaccagcatgcagtcgcgcaacttctcgctgggcttcgcccttggtcaggggcggacccttgatcaggtgctgggcgagcgtcgctcggtcgccgagggcgttcataccgcttcggcggtggtcgccctggcggcgcgctgggcgatcgaaatgccgatctgcgcggccatccacggcgtgctgtcgggcgattacgacgtgacctcggccatcgagtcgctgctgtcgcgccccttgcgggttgaaggcggcagcgaaagccagatccaccccacagcaaagaccgccacgccctga

SEQ ID NO: 59018 - protein, 349 aa, Rhodospirillum rubrum
MNQIIDHIAVIGGGAWGTALAQTSRRAGRRVTLWAREPEVARAINATHENPDFLPGVSLDPGLHATADLAEALRGAEAVLVVCPAQALRPVLTTARPLWPGRAPMVICAKGVEQGSGARMSEVATAVLPEAPLAVLSGPTFAREVAEGRPTAVTLACADGALAEALVLALGTRTFRPYASTDVVGAEIGGAVKNVLAIACGVVEGLGLGDNARAALLTRGLAEITRLGRALGARSETLSGLSGLGDLILTATSMQSRNFSLGFALGQGRTLDQVLGERRSVAEGVHTASAVVALAARWAIEMPICAAIHGVLSGDYDVTSAIESLLSRPLRVEGGSESQIHPTAKTATP

SEQ ID NO: 59019 - DNA, 1023 bp, Serratia marcescens
  CDS (1)..(1023): transl_table=11
atgaacaccgtcaatgcttcaatgactgttatcggtgccggctcgtacggcaccgcattggccattacgctggcgcgtaacggccattccgtggtgctgtgggggcacaaccccgcgcaaattcaaacgttgcagcacgatcgctgcaatcaggcgtttctgcccgacgttcccttccccgataccctgctgcttgaagccgatttggcgcgtgcgctggccgccagccgcgacgtgctggtggtggtgccgagccacgtgttcggcgacgtgctgcgccagctgaagccgcatctgcgcccggacgcccgcatcgtgtgggccaccaagggattggaagcggaaaccggtcggttgctgcagaacgtggcgcgtgaggcgctgggcgagacgatcccgctggcggtgctctccgggccgacgttcgccaaagagctggccgccggcctgccgacggcgatcgcgctggcggcgaccgatgcgcagttcgccgacgatctgcaacagggctgcatgcactgcggcaagagcttccgtgtctacagcaatcccgacttcatcggcgtgcagcttggcggcgcggtgaagaacgtgatcgccatcggcgccggcatgtccgacggcatcggtttcggcgctaacgcccgtaccgcgttgattacacgcgggctggcggaaatgagccgtctgggttctgcgctgggcgccgatccttcgacgttcatgggcatggcggggctgggggatctggtgctaacctgcacggacaaccagtcgcgcaaccgtcgcttcggcattatgctggggcagggtaaaggcgtgcaggaagcgcaggacagtatcggtcaggtggtcgagggctatcgcaataccaaagaggtgttggcgttggcgcagcggcagggtgtggaaatgccgatcaccgaacagatttatcaggtgctttactgccacaaggacgcccgcgaagcggcgctgagcctgctggggcgagcccgaaaggacgaaaaacccagcgtgtga

SEQ ID NO: 59020 - protein, 340 aa, Serratia marcescens
MNTVNASMTVIGAGSYGTALAITLARNGHSVVLWGHNPAQIQTLQHDRCNQAFLPDVPFPDTLLLEADLARALAASRDVLVVVPSHVFGDVLRQLKPHLRPDARIVWATKGLEAETGRLLQNVAREALGETIPLAVLSGPTFAKELAAGLPTAIALAATDAQFADDLQQGCMHCGKSFRVYSNPDFIGVQLGGAVKNVIAIGAGMSDGIGFGANARTALITRGLAEMSRLGSALGADPSTFMGMAGLGDLVLTCTDNQSRNRRFGIMLGQGKGVQEAQDSIGQVVEGYRNTKEVLALAQRQGVEMPITEQIYQVLYCHKDAREAALSLLGRARKDEKPSV

SEQ ID NO: 59021 - DNA, 993 bp, Thermoanaerobacter tengcongensis
  CDS (1)..(993): transl_table=11
atgaaaatagcggtactgggagcaggaagctggggaactgctatagctattcaccttaataaattaaaccatcaggtaaggctgtggatgagaagtaaggagcaatttgaggaacttattgcaacaaggcacaattcgagataccttgacgtggatcttccttcaagcattttactgtacaatgacctagataaagcagtagaagattccgaagtagtggtcattgctgttccttcccatgctgtaagagaagtatccgaaaaattaaaagggaaaatctctaaaaatgctattgttgtcaatctggcaaaagggattgaaacttcttcattgaagagaatgtctgaggtaataaaggaataccttttaaaccctgtggtagtgctgtcaggaccaagtcatgcggaagaagtagtaagacagattcctacggcctgtgtacttgcttcagaggacgttaaggcttgcgaattcatacaggaggcttttatgaacgagactttcaggctgtatgtaaataccgatgtaataggagtggaactaggaggagctttaaaaaatataatcgctttaggggcggggatttccgacgggcttggctttggggataatacaaaagctgctctcatgacaagagggcttgccgagattacaaggctgggagtggctatgggttcggaccctttgactttcctgggattggcaggggtcggggaccttattgtgacctgtacaagtaactattcaagaaatagaagagcggggattttaataggcaaggggaaaagtttaaaagaagcgttaaaagaaatagggatggtagtggaaggcgtaaatactaccaaatcagcctacaggctttctcaaatatatggagtggagatgccaattaccaaggagatttattctataatttttgaaaataaaaatccttttgaggcggtttataatttgatgacgagagataaaaagcacgagttacacggaatttaa

SEQ ID NO: 59022 - protein, 330 aa, Thermoanaerobacter tengcongensis
MKIAVLGAGSWGTAIAIHLNKLNHQVRLWMRSKEQFEELIATRHNSRYLDVDLPSSILLYNDLDKAVEDSEVVVIAVPSHAVREVSEKLKGKISKNAIVVNLAKGIETSSLKRMSEVIKEYLLNPVVVLSGPSHAEEVVRQIPTACVLASEDVKACEFIQEAFMNETFRLYVNTDVIGVELGGALKNIIALGAGISDGLGFGDNTKAALMTRGLAEITRLGVAMGSDPLTFLGLAGVGDLIVTCTSNYSRNRRAGILIGKGKSLKEALKEIGMVVEGVNTTKSAYRLSQIYGVEMPITKEIYSIIFENKNPFEAVYNLMTRDKKHELHGI

SEQ ID NO: 59023 - DNA, 987 bp, Thiobacillus denitrificans
  CDS (1)..(987): transl_table=11
atgaagctcaccgtactcggcgccggcgcgtggggaacggcgctggccgcgagctgggcgtcgcagcatgcggtgacgctgtgggggcgcaatgcacgcgatgtcgacacgatgcgcgcctcccgcgtcaatacccactatctgcccggctgcccacttccttcgtcgctcgccctgagcgccgatttcgaccgcgcgctcgaggcggccgaactcatcgtcatcgccgtacccagcagcggcctgcgcgcgacgctcgcagcgctggcccgccggcccgcgctgccgcccatcctctgggtatgcaagggcttcgagccgggcacccggcggcttccgcaccaactcgtcgccgaacttctgccggcgggcgccgagactggcgtgctgtcgggcccgagctttgcccaggaggtggcgcacggctatcccaccgcgctcaccctggcgtcggcagacattgcgctggcgcagcggctcgccgaggcgctgtccggaaaccgcctgcgactttacgcgcacgacgacgtcgtcggagtcgagatcgggggcgcgctgaagaacgtcatggcgatcgccgcgggcatctgcgacggactcaatttcggccacaacgcgcgcgccgcgctgatcacgcgcggactcgccgaaatgacccggctcggggtcgactccggcggccgattcgaaaccttcatggggctgtccggcctcggcgatctcatcctcacgaccacgggcgatctctcgcgcaatcgtcaggtcggcctgcgcgtcgccaaggggcagccgctcgaccgcatcctcgacgaactcggccacgtcgccgaaggcgtcacgaccgcacgcgaggtcgccgcgctggcggccgagcgcggcgtggagatgccgatcgcgcgcatggtctgccgcatcctgttcgagggcctgcccgcgagcgaagccgtcgactcgctgctcaaccgcgaaatccgctcggaattctag

SEQ ID NO: 59024 - protein, 328 aa, Thiobacillus denitrificans
MKLTVLGAGAWGTALAASWASQHAVTLWGRNARDVDTMRASRVNTHYLPGCPLPSSLALSADFDRALEAAELIVIAVPSSGLRATLAALARRPALPPILWVCKGFEPGTRRLPHQLVAELLPAGAETGVLSGPSFAQEVAHGYPTALTLASADIALAQRLAEALSGNRLRLYAHDDVVGVEIGGALKNVMAIAAGICDGLNFGHNARAALITRGLAEMTRLGVDSGGRFETFMGLSGLGDLILTTTGDLSRNRQVGLRVAKGQPLDRILDELGHVAEGVTTAREVAALAAERGVEMPIARMVCRILFEGLPASEAVDSLLNREIRSEF

SEQ ID NO: 59025 - DNA, 1020 bp, Yersinia pestis
  CDS (1)..(1020): transl_table=11
atgaacaccaaccctgcttcaatggctgttatcggtgccggatcttacggcaccgcattagctatcacactggcgcgtaatggccatcaagtcgtgttatggggccatgaccctaaacatattcaacagctgcaacaagaccgctgtaaccgcgctttcctacctgatgctgctttccccgatacgttgcgattggaaaccgacttagcatgtgcgttggctgccagccgcgatgtgttggtcgtcgtgcccagccatgtctttggtgctgttttacatcagttgaagcctcatctacgtaaagatgcacgtatcgtctgggcaaccaaagggctagaagctgaaaccggccgtctgctacaggatgtggcccgcgaagtcttgggcgaggctatcccgcttgccgtgatttctggtccaacgtttgccaaagaattggccgcgggtttgcctacggcgattgcgttggcatcgaccgatgtgcaatttagcgaagatctgcaacagttattgcactgtggaaaaagctttcgagtttacagtaatcctgattttatcggggtacagcttggtggcgcagtgaaaaacgtgattgccatcggtgcaggtatgtccgatggcatcggttttggtgcgaatgcccgtaccgctctaataacccgcgggttagcggagatgacgcgcttagggacggcattaggtgccgatccttccacctttatgggcatggcagggttaggcgatttggtgctaacctgcacagataaccaatcccgtaaccgccgatttggcattatgctgggtcaggggttgggggtgaaggaggcgcaggacaacattggtcaagtggtagaaggttaccgtaataccaaggaagttctggcattagcacagcgtcatggcgtcgaaatgccaataactgaacaaatttatcaagtgttgtattgtcataagaatgctcgtgaggcggctctgacgttgttggggcggaccaaaaaagatgaaaaaatcggcatttga

SEQ ID NO: 59026 - protein, 339 aa, Yersinia pestis
MNTNPASMAVIGAGSYGTALAITLARNGHQVVLWGHDPKHIQQLQQDRCNRAFLPDAAFPDTLRLETDLACALAASRDVLVVVPSHVFGAVLHQLKPHLRKDARIVWATKGLEAETGRLLQDVAREVLGEAIPLAVISGPTFAKELAAGLPTAIALASTDVQFSEDLQQLLHCGKSFRVYSNPDFIGVQLGGAVKNVIAIGAGMSDGIGFGANARTALITRGLAEMTRLGTALGADPSTFMGMAGLGDLVLTCTDNQSRNRRFGIMLGQGLGVKEAQDNIGQVVEGYRNTKEVLALAQRHGVEMPITEQIYQVLYCHKNAREAALTLLGRTKKDEKIGI

SEQ ID NO: 59027 - DNA, 1275 bp, Ashbya gossypii
  CDS (1)..(1275)
atggtaaacacaacggctcttatacgctcacctacttttgtggcgcaatttagagtactgaagcaagtaaacagagggctattctcacagactagttacgctagaacgcacgcaaggacgagttatacacacacgatggcgggcacagatagactacagcaaacgtcgcagattctttcgcggtcgacgtcgtcggagatccggttggagcgccccttcaaagtgacagttatcgggtcgggtaactgggggaccaccatcgccaaggtggtggcggagaacacgcaggagtacccgcagctgtttgagcggcgcgtggacatgtgggtgttcgaggagcagattgagggccgcaagctgacggagatcatcaacgagcaacacgagaacgtgaagtatctgccgggaatcacgctgccggaaaacctggttgcgaacccgtcggtggcggctgccgccgcggacgcggatgtgctagtgtttaacataccacaccagtttctggggcggattgtggagcagctcaaggggcacgtgaagccgggcgcgcgggcgatctcgtgcctgaagggcttcagcgtgggcaaggacggcgtgcagctgctgtcgacctacatcgaggagcacctgcacatcccttgcggcgcgctatccggtgcgaacctggcgccggaggtggcgaagggcaactggtcggagacgacagtggcgtacacgctgccccaggacttccgtggcacgggcaaggacgtggaccacgcggtattgaagaagctgttccaccgcccctacttccacgtgaacgttgtggacgacgtcgcggggatttccgttgcgggcgcgctgaagaacgtggttgcgctggcttgcggtttcgtgctgggcctcgggtggggcaacaacgcagccgcagccgtgcagcgcgtaggcttgagcgagatgatcaagtttgcgcgcatgttcttcccggaatcgaaggtggagaccttctaccaggagtctgccggtgtcgcagacctgatcactacctgtgcgggtggcaggaatgtccgcattggtcgtgccatggcagagaccggcaaatccgcacaagagcttgagaaggagctcttgaacggccagtcatcccagggcatttacacgacgcaggaggtgcacgagtggttgcagcagtgcggcaagaaggacgagttcccactgtttgaggctgtgtacaagattgtctacgagggcgttccaatgtccaagttacctgacatgcttgaggatgcctaa

SEQ ID NO: 59028 - protein, 424 aa, Ashbya gossypii
MVNTTALIRSPTFVAQFRVLKQVNRGLFSQTSYARTHARTSYTHTMAGTDRLQQTSQILSRSTSSEIRLERPFKVTVIGSGNWGTTIAKVVAENTQEYPQLFERRVDMWVFEEQIEGRKLTEIINEQHENVKYLPGITLPENLVANPSVAAAAADADVLVFNIPHQFLGRIVEQLKGHVKPGARAISCLKGFSVGKDGVQLLSTYIEEHLHIPCGALSGANLAPEVAKGNWSETTVAYTLPQDFRGTGKDVDHAVLKKLFHRPYFHVNVVDDVAGISVAGALKNVVALACGFVLGLGWGNNAAAAVQRVGLSEMIKFARMFFPESKVETFYQESAGVADLITTCAGGRNVRIGRAMAETGKSAQELEKELLNGQSSQGIYTTQEVHEWLQQCGKKDEFPLFEAVYKIVYEGVPMSKLPDMLEDA

SEQ ID NO: 59029 - DNA, 2291 bp, Candida tropicalis
  CDS (729)..(1904): transl_table=12
agaatatggttggaatgtgaccgagtcagttggattgctacaaggctaatttaaacttaagcttgggtttcccaaaagccgaacaagcgctgaggaaggagatgtgtgtctctgattctattggttccgtcgtagcgagccgacagcatgcagtgtccatccgttggaagtttttttttctttcttcctgcgcggtcgcgttcacagggcgataactgaaggtttgtaaaccaggcggcgggtccgtcacgggcgagccaagagggcgactggtggtggtgccggtggtgggcggtagcaaagcaaaaagaaaaagtaacagcggaaaccgaggtacgtcgcatgcagacacacaatataataaaaattacgcacaccacaaagatacacttcacagttatcagggttgcagtttcttttcgtttcttttctgtataaattgaccaacatttgtccctgccctcttttcaaaccatccaagttttcattttcttcttgtaaagacttcccactttcttgtttaactattccaaactacatcttcaactgggctttcggattaactacctcatcggccctacaagaaaaaaaaatcattatcatataaagagagcctcactgaaaaaaaagttttcctcctttatacataacccaacaaattttttttgaaacccgccatattgtccacattccccagaaacaccctcccactactcagacgcttcaccatgtgcacatctgcaaacaacagattggaccaattaacccagatcttacaccccgagaacctcttgaacccaaccaatgcttcgcacccagaatcttccttaagaccggaccaccctttcaagattgccgttgttggttccggtaactggggtaccaccatcgccaagattgtctccgagaacgccgtcgccagaccacacttgttctcccatttcgtcaacatgtgggtctttgaagagaaaatcgacggcaccaacttgaccgaaatcatcaacaccagacacgaaaacatcaagtacttgcccggtgtcaaattacccaaaaacttgatcgcggtgccggacatcgtcaaggccgtcaaaggcgccgatttgattgtgttcaacttgccacaccagttcttgcctaggatcttgaagcagttgaagggccatgttccaaagacgacgagagccatctcgtgccttaaaggtttggaagtcaacgctaacggatgtaagttgttgtccaccgtcattgaagaagaattgggcattgcctgtggtgctttgtccggtgccaacttggcccctgagattgccagaggaaactggtccgagactactgtcgcctacagagtgcctgctgattacaggggtccaggaaaagatatcgacaagttggtcttgaaagctttgttccacagaccttacttccacgttaacgtcattgacgacgttgctggtgtttccatagccggtgccttgaagaacgttgttgcattggctgttggtttcgttgaaggtttgggctggggtgacaatgccaaggctgctgttatgagagtcggattgttggagaccatcaagtttgctaagctcttctttaatgatgctgagattgacacctttactggtgaatctgctggtgttgctgatttgatcactacttgttccggtggtagaaacgtcaaggttggtagatacatggctgagactggatgtgctgctgaagaagccgagaagaagttgttgaacggccagagttctcaaggtattgttaccaccaaggaagtccacgagttcttgactaacgttaacaagttggaagagttcccattgtttgaagctacctaccaaatcacctttggttctgaatccatcgaaaacttgccaaacttgttgaacaattattagagatttgaaagagagacgatgatgatgatgatgaagaagaagagaacggtgttgcatcttgtacaattagtaaattaactattatagagtttcagttagcagattattttttgattttttttttttttggtttgttcgtttatacacaatataaatatattcacacaatatagtacacaaagtaataatctaatttttaacacgtttatggtctgcaccctgttgttcagcctcaccaccatgctttctcttcctgtttctaaacttgaccaagaacttctccatgtacgtatcaacgtactctttaattgatttaaccctcttcttgtctagtttatgtggtggtgcagtatcgggacgttgtttcaactcttgtccggcaacttg

SEQ ID NO: 59030 - protein, 391 aa, Candida tropicalis
MCTSANNRLDQLTQILHPENLLNPTNASHPESSLRPDHPFKIAVVGSGNWGTTIAKIVSENAVARPHLFSHFVNMWVFEEKIDGTNLTEIINTRHENIKYLPGVKLPKNLIAVPDIVKAVKGADLIVFNLPHQFLPRILKQLKGHVPKTTRAISCLKGLEVNANGCKLLSTVIEEELGIACGALSGANLAPEIARGNWSETTVAYRVPADYRGPGKDIDKLVLKALFHRPYFHVNVIDDVAGVSIAGALKNVVALAVGFVEGLGWGDNAKAAVMRVGLLETIKFAKLFFNDAEIDTFTGESAGVADLITTCSGGRNVKVGRYMAETGCAAEEAEKKLLNGQSSQGIVTTKEVHEFLTNVNKLEEFPLFEATYQITFGSESIENLPNLLNNY

SEQ ID NO: 59031 - DNA, 1146 bp, Pichia angusta
  CDS (1)..(1146)
atgactgctatggatagactggatcacgttagtaaccaattggccgcaaagcgccagaagaaaaacccggaaggcaagcctttccgcatcaccgtggtgggctccggcaattgggggtcaacgatcgcaaaagtggtcgccgagaacgctaaggagcttccggaggagttccatcagattgtgaaaatgtgggttttcgaggaggaagtggacggacgtaagctgaccgaaattatcaatacggaccacgagaacgtcaaatacctcccggacgtcaagttgcctgataacattgttgccattccggacattgttgacgcttgtgcggacgccgacattatcattttcaatatccctcaccagtttctgccaaagatccttgcccaattgaagggcaaggtcaacccaaaagcacgcgcaatctcctgtctgaagggtcttgaggtcaccaaggacggctgcaagttgctctcgaactatatcacggaggagctgggaatttactgtggtgccctttcaggagccaaccttgctccggaggttgccagacaaaagtggtcagagaccactgtggcttacagaattcctcaggacttccgtggcgaaggcaaggatgtcgaccagagcgtgatcagaaaccttttccaccgcccatacttccacgtccgagtcatcgacgacgttgctggtgtgtccttgagtggggctctgaagaacgtcattgccatggccgccggcttcgtcgagggacttggctggggagacaatgcgaagtcagctgtgatgcggattggattggtcgagatgatcaaatttgcccacatgttctttgaagactgccagtccaccactttcactcacgagagtgctggtgttgcggacatcatcacgacgtgcgccggaggcagaaacgtgcgtgttggaagatacatggcagagcacaaggtgagcggttttgaggcggagaaggtcttgttgaacggccagtcctgccagggtctgcacaccaccagagaggtgtatgagctgctggctgccaagaacgtgatcgacgagttcccgctcttcaaggccacgtaccaaatcatttacgaggggcttcctatggagaagttgccagagttgcttgaggcatctgaggactaa

SEQ ID NO: 59032 - protein, 381 aa, Pichia angusta
MTAMDRLDHVSNQLAAKRQKKNPEGKPFRITVVGSGNWGSTIAKVVAENAKELPEEFHQIVKMWVFEEEVDGRKLTEIINTDHENVKYLPDVKLPDNIVAIPDIVDACADADIIIFNIPHQFLPKILAQLKGKVNPKARAISCLKGLEVTKDGCKLLSNYITEELGIYCGALSGANLAPEVARQKWSETTVAYRIPQDFRGEGKDVDQSVIRNLFHRPYFHVRVIDDVAGVSLSGALKNVIAMAAGFVEGLGWGDNAKSAVMRIGLVEMIKFAHMFFEDCQSTTFTHESAGVADIITTCAGGRNVRVGRYMAEHKVSGFEAEKVLLNGQSCQGLHTTREVYELLAAKNVIDEFPLFKATYQIIYEGLPMEKLPELLEASED

SEQ ID NO: 59033 - DNA, 1104 bp, Zea mays
  CDS (1)..(1104)
atggagatggagaacgggcacgccaagtaccgggtggccgtcattggcagcggcaactggggcagcgtcgcctcccgcctcatcgcctccaacaccgccaagctgccctccttctatgatgaagtgaggatgtgggtgtttgaggaaatactgcctacaggcaggaagctatctgagtccattaacgaacagaatgagaactgcaaatacttgccaggtataaagcttggaacgaatgttattgccgaccctgacttggagagcgcagtcaaagacgcgaatatgctggtttttgtgacgccccatcaatttgtggagggtatatgtaagaagcttgtagggaagctaacaccaggagctgaggctatctccctcatcaagggcatggaggtcaagatggaagggccatgcatgatatccaagttaatcgcggatacacttggaatcaattgctgtgtgctcatgggtgctaacattgcaaacgagattgctgtcgaagagttcagtgaagcaacaattgggtataggaaagataaggaagtggcaaatcgatgggctaaactttttaccacaccttacttcctagtttctgtcgcagaagatattgaaggagtagagctgtgtggaactctgaaaaatatcgtggctattgcagcaggccttgtggatggcttggatatgggaaacaatacaaaggctgcaataatgaggattggtttgcgagaaatgcgtgctttctctaagcttctgttcccttcagtcagagacaacacgttcttcgagagctgtggtgtcgccgacctaataaccacgtgccttggtgggaggaacagaagagtggctgaggcctttgcacgaaatggtggcaaaaggtcttttgatgaactggaggcagagatgttgcgtggccaaaaactccagggagtgtccacagcaagggaagtctatgaagtgttgacttatcgaggatggcaggagctgtttcctctgttatcaacagtgcatgagatctgtattgggcagttgcctcctacatcgatagttgaatacagtgagcacacgccaaatctctccatcatcggtggccatactccattctactga

SEQ ID NO: 59034 - protein, 367 aa, Zea mays
MEMENGHAKYRVAVIGSGNWGSVASRLIASNTAKLPSFYDEVRMWVFEEILPTGRKLSESINEQNENCKYLPGIKLGTNVIADPDLESAVKDANMLVFVTPHQFVEGICKKLVGKLTPGAEAISLIKGMEVKMEGPCMISKLIADTLGINCCVLMGANIANEIAVEEFSEATIGYRKDKEVANRWAKLFTTPYFLVSVAEDIEGVELCGTLKNIVAIAAGLVDGLDMGNNTKAAIMRIGLREMRAFSKLLFPSVRDNTFFESCGVADLITTCLGGRNRRVAEAFARNGGKRSFDELEAEMLRGQKLQGVSTAREVYEVLTYRGWQELFPLLSTVHEICIGQLPPTSIVEYSEHTPNLSIIGGHTPFY

SEQ ID NO: 59035 - DNA, 21 bp, Artificial sequence
  primer
atggtcataatggaggcgaag

SEQ ID NO: 59036 - DNA, 24 bp, Artificial sequence
  primer
ttaaagatcaaaatcttcaaattc

SEQ ID NO: 59037 - protein, 345 aa, Artificial sequence
  consensus sequence
  Variant (2)..(2): Xaa in position 2 is any amino acid
  Variant (4)..(4): Xaa in position 4 is any amino acid
  Variant (7)..(9): Xaa in position 7 to 9 is any amino acid
  Variant (11)..(26): Xaa in position 11 to 26 is any amino acid
  Variant (27)..(51): Xaa in position 27 to 51 is any or no amino acid
  Variant (53)..(54): Xaa in position 53 to 54 is any amino acid
  Variant (57)..(68): Xaa in position 57 to 68 is any amino acid
  Variant (69)..(74): Xaa in position 69 to 74 is any or no amino acid
  Variant (76)..(81): Xaa in position 76 to 81 is any amino acid
  Variant (82)..(92): Xaa in position 82 to 92 is any or no amino acid
  Variant (94)..(114): Xaa in position 94 to 114 is any amino acid
  Variant (115)..(123): Xaa in position 115 to 123 is any or no amino acid
  Variant (126)..(147): Xaa in position 126 to 147 is any amino acid
  Variant (148)..(155): Xaa in position 148 to 155 is any or no amino acid
  Variant (157)..(157): Xaa in position 157 is any amino acid
  Variant (159)..(161): Xaa in position 159 to 161 is any amino acid
  Variant (163)..(163): Xaa in position 163 is any amino acid
  Variant (165)..(194): Xaa in position 165 to 194 is any amino acid
  Variant (195)..(203): Xaa in position 195 to 203 is any or no amino acid
  Variant (206)..(210): Xaa in position 206 to 210 is any amino acid
  Variant (212)..(213): Xaa in position 212 to 213 is any amino acid
  Variant (215)..(218): Xaa in position 215 to 218 is any amino acid
  Variant (221)..(221): Xaa in position 221 is any amino acid
  Variant (224)..(225): Xaa in position 224 to 225 is any amino acid
  Variant (227)..(229): Xaa in position 227 to 229 is any amino acid
  Variant (231)..(233): Xaa in position 231 to 233 is any amino acid
  Variant (235)..(237): Xaa in position 235 to 237 is any amino acid
  Variant (239)..(239): Xaa in position 239 is any amino acid
  Variant (241)..(242): Xaa in position 241 to 242 is any amino acid
  Variant (245)..(248): Xaa in position 245 to 248 is any amino acid
  Variant (251)..(251): Xaa in position 251 is any amino acid
  Variant (253)..(254): Xaa in position 253 to 254 is any amino acid
  Variant (256)..(271): Xaa in position 256 to 271 is any amino acid
  Variant (272)..(275): Xaa in position 272 to 275 is any or no amino acid
  Variant (277)..(278): Xaa in position 277 to 278 is any amino acid
  Variant (281)..(282): Xaa in position 281 to 282 is any amino acid
  Variant (285)..(287): Xaa in position 285 to 287 is any amino acid
  Variant (288)..(289): Xaa in position 288 to 289 is any or no amino acid
  Variant (292)..(294): Xaa in position 292 to 294 is any amino acid
  Variant (296)..(306): Xaa in position 296 to 306 is any amino acid
  Variant (307)..(318): Xaa in position 307 to 318 is any or no amino acid
  Variant (320)..(322): Xaa in position 320 to 322 is any amino acid
  Variant (323)..(323): Xaa in position 323 is any or no amino acid
  Variant (325)..(338): Xaa in position 325 to 338 is any amino acid
  Variant (339)..(344): Xaa in position 339 to 344 is any or no amino acid
GXGXWGXXXAXXXXXXXXXXXXXXXXXXXXXXXXXXXXXXXXXXXXXXXXXNXXYLXXXXXXXXXXXXXXXXXXAXXXXXXXXXXXXXXXXXPXXXXXXXXXXXXXXXXXXXXXXXXXXXXXXKGXXXXXXXXXXXXXXXXXXXXXXXXXXXXXXLXGXXXAXEXXXXXXXXXXXXXXXXXXXXXXXXXXXXXXXXXXXXXXXFRXXXXXDXXGXXXXGAXKNXXAXXXGXXXGXXXGXNXXAAXXXXGLXEXXRXXXXXXXXXXXXXXXXXXXXGXXDLXXTCXXXXXRNXXXGXXXXXXXXXXXXXXXXXXXXXXXGXXXXGXXXXXXXXXXXXXXXXXXXXP

SEQ ID NO: 59038 - protein, 60 aa, Artificial sequence
  protein pattern
  Variant (2)..(6): Xaa in position 2 to 6 is any amino acid
  Variant (7)..(8): Xaa in position 7 to 8 is any or no amino acid
  Variant (10)..(11): Xaa in position 10 to 11 is any amino acid
  Variant (12)..(12): Xaa in position 12 is Ala or Gly
  Variant (13)..(13): Xaa in position 13 is any amino acid
  Variant (14)..(14): Xaa in position 14 is Glu, Gln or Ser
  Variant (15)..(15): Xaa in position 15 is any amino acid
  Variant (16)..(16): Xaa in position 16 is Ala, Cys, Gly or Ser
  Variant (17)..(17): Xaa in position 17 is Ala or Gly
  Variant (18)..(18): Xaa in position 18 is Ala, Ser, Thr or Val
  Variant (19)..(19): Xaa in position 19 is any amino acid
  Variant (22)..(22): Xaa in position 22 is Ile or Val
  Variant (23)..(23): Xaa in position 23 is any amino acid
  Variant (25)..(27): Xaa in position 25 to 27 is any amino acid
  Variant (29)..(31): Xaa in position 29 to 31 is any amino acid
  Variant (32)..(32): Xaa in position 32 is Ala or Gly
  Variant (33)..(35): Xaa in position 33 to 35 is any amino acid
  Variant (37)..(37): Xaa in position 37 is any amino acid
  Variant (38)..(38): Xaa in position 38 is Asp, Gly, Asn or Ser
  Variant (39)..(39): Xaa in position 39 is Ala, Ser or Thr
  Variant (40)..(40): Xaa in position 40 is any amino acid
  Variant (41)..(41): Xaa in position 41 is Ala, Ser or Thr
  Variant (42)..(42): Xaa in position 42 is any amino acid
  Variant (43)..(43): Xaa in position 43 is Ile, Leu, Met or Val
  Variant (44)..(46): Xaa in position 44 to 46 is any amino acid
  Variant (47)..(47): Xaa in position 47 is Ala, Gly or Ser
  Variant (48)..(48): Xaa in position 48 is Phe, Ile, Leu or Met
  Variant (49)..(49): Xaa in position 49 is any amino acid
  Variant (51)..(52): Xaa in position 51 to 52 is any amino acid
  Variant (54)..(59): Xaa in position 54 to 59 is any amino acid
  Variant (60)..(60): Xaa in position 60 is Ala, Gly, Pro or Ser
RXXXXXXXDXXXXXXXXXXKNXXAXXXGXXXXXXXGXXXXXXXXXXXXXEXXRXXXXXXX

SEQ ID NO: 59039 - protein, 16 aa, Artificial sequence
  protein pattern
  Variant (2)..(2): Xaa in position 2 is any amino acid
  Variant (3)..(3): Xaa in position 3 is Ala or Gly
  Variant (6)..(6): Xaa in position 6 is Phe, Ile, Leu or Val
  Variant (7)..(7): Xaa in position 7 is any amino acid
  Variant (10)..(12): Xaa in position 10 to 12 is any amino acid
  Variant (13)..(14): Xaa in position 13 to 14 is any or no amino acid
GXXDLXXTCXXXXXRN

SEQ ID NO: 59040 - protein, 12 aa, Artificial sequence
  protein pattern
  Variant (2)..(2): Xaa in position 2 is any or no amino acid
  Variant (4)..(4): Xaa in position 4 is any amino acid
  Variant (6)..(6): Xaa in position 6 is Ala, Gly, Asn or Ser
  Variant (7)..(7): Xaa in position 7 is Phe, Trp or Tyr
  Variant (9)..(9): Xaa in position 9 is Ser or Thr
  Variant (10)..(10): Xaa in position 10 is any amino acid
  Variant (11)..(11): Xaa in position 11 is Phe, Ile, Leu or Val
VXGXGXXGXXXA

SEQ ID NO: 59041 - DNA, 855 bp, Synechocystis sp.
  CDS (1)..(855): transl_table=11
atggtgttgcgtcaggtgatggattttgcccaagcggtggaacatctcttacatccagcggtggttagttttaatccccatccccgcagttttttcagtggccgcacccaacctttattgactcccttgccagagaaagcagcgcaattgacggcgatcggcattgaacagttggtcttattaccctttacggaaaaattggccaaccttagccccaagcaatttgtccaatccattttagtggagcaattgcaagccaaatttatcagcgttggccaggatttttgctttggtcatcaacggcggggcaatgtgcaggatttacaaaaccttgggcaagaatttggcatcaccgtggcgatcgcccaattggagcaaacggacacggaacggattagtagttcccgtattcgccgagccttaaaagaaggcaagttggcaatggccaatcatttgttgggacggccctatgccctcagggggacggtggtgcagggacagcaattggggcgtaaattgggctttcccactgctaacctttgtttgccagcggataaactctggccgaagtatggagtgtatgcgggttgggtcaatctaaatgccttggacgtacccataccagcggtgattaaccttggcgatcgccccacagtcaacggccaggaaccttcggcggaagtgcatttactgcagtggtcaggggatttgtatggccaaggtttagaggtggccttgacccactatctgcgccccgaaacaaaatttgccggcttggaccaattaaaaaatcagatcgcccaggactgccagcaggcagaaaagttactcaatctggatggggcgattccttaa

SEQ ID NO: 59042 - protein, 284 aa, Synechocystis sp.
MVLRQVMDFAQAVEHLLHPAVVSFNPHPRSFFSGRTQPLLTPLPEKAAQLTAIGIEQLVLLPFTEKLANLSPKQFVQSILVEQLQAKFISVGQDFCFGHQRRGNVQDLQNLGQEFGITVAIAQLEQTDTERISSSRIRRALKEGKLAMANHLLGRPYALRGTVVQGQQLGRKLGFPTANLCLPADKLWPKYGVYAGWVNLNALDVPIPAVINLGDRPTVNGQEPSAEVHLLQWSGDLYGQGLEVALTHYLRPETKFAGLDQLKNQIAQDCQQAEKLLNLDGAIP

SEQ ID NO: 59043 - DNA, 981 bp, Mesorhizobium loti MAFF303099
  CDS (1)..(981): transl_table=11
atggtaggcttccagcatctttcggcgaccgcgccgctgcctgccgatctacgtggcggcgttgtcgcgatcggcaatttcgatggcgtccaccgtggccatcaggcggtgctcgaacgggcgttggccgaggcagtgcagcgtgatgttccggccctggtgctgagcttcgagccgcatccgagaaaggtcttccggcctgacatcccgctcttcgtgctgacgccgccgccgatgaaggcgcggctcttgtccttgctgggctttgccgcgctcgtcgagcagccgttcacgcgcgacttcgccgcgctgtcggcggaagccttcgtcaccgacgtgctggagaggacgctcggcatcacccacgccgtgaccggcttcgatttccatttcggaaaggaccgccaaggcggaccggcctatctgatggcagccggcgaacgccatggctttggcgtcacgctcgtcgacgcttttcgcgacgagggcgcagaggtggtttcgtcgagccggatcagggccttgctctgcgatggcgaggtggcggaggccgccggtctgctcggctatcgcttcacggtggaaagcgaggtcgtcggtggccagcagctcggacgcacgctcggctttcccacagcgaatatgaggcttcccgcggaagccaccctcaaggaagggatctatgccgtccgcttccggcgcgccgacggtactttgcatgacggcgtcgccagcttcggccgccgcccgaccgtcgacgacaatggcgcgccgcttctggaaacctttgtcttcgatttttccggcgatctctatggcgagaccagcgaggtctcgttcttcggtttcctgcgcagcgagatcaaattcgacggcctcgatgcattggtggtgcagatgaagcgcgatgaagccgaagcccgcgcgctgctggccggcgtcaagccgctttcgcagctcgacgcggccattgccttctga

SEQ ID NO: 59044 - protein, 326 aa, Mesorhizobium loti MAFF303099
MVGFQHLSATAPLPADLRGGVVAIGNFDGVHRGHQAVLERALAEAVQRDVPALVLSFEPHPRKVFRPDIPLFVLTPPPMKARLLSLLGFAALVEQPFTRDFAALSAEAFVTDVLERTLGITHAVTGFDFHFGKDRQGGPAYLMAAGERHGFGVTLVDAFRDEGAEVVSSSRIRALLCDGEVAEAAGLLGYRFTVESEVVGGQQLGRTLGFPTANMRLPAEATLKEGIYAVRFRRADGTLHDGVASFGRRPTVDDNGAPLLETFVFDFSGDLYGETSEVSFFGFLRSEIKFDGLDALVVQMKRDEAEARALLAGVKPLSQLDAAIAF

SEQ ID NO: 59045 - DNA, 936 bp, Pasteurella multocida subsp. multocida str. Pm70
  CDS (1)..(936): transl_table=11
atgcgactgattcgtggcattcacaatttacccccaaatttatctggttgtgcgctgactattggcaattttgatggtgtacatttaggtcatcaagccattttgcgccatttacgtcaaaaagccgatgcgttgaatttgccggtggtcgtgatgttatttgaaccacaaccgcgcgaatactttactggcgacgccattcccgcacgcctgatgcgcctacgtgataaattacattatctcgctcaagcaaaagtagattatgtgctttgtattcgttttaatgaaaattttgctagccaaaccgccgaagaatttattgaagattggctcgtcaaaaagttgaatgtccgctttttaagtattggtgatgatttccgttttggggcgaaacgacaaggtgactttgccctgttacagaagtcaggcgaggcatttggctttttcgtggaagataaccacagtttttgctgtgacgagttacgtattagtagcactgcgatccgagaagccttagccgaggatgatttagcctatgctgaaaaaatgttaggtaaaccttatcgcatcttagggcgtgttgcacacggcaataaattaggtcgtactatcggttttccgacagccaacattccattacatcggcaagtgaaccccgttaaaggggtttacgcggtaaaagtgcggttaaaaaatcaagagatttatcacggtgttgcgaatattggtaaacgacccacgattaatggcgttgtacagctgttagaggtgcatatttttgattttcattcaaccatttatggacagtgcctagaagtcgaattttgccacaaaatccgtaacgaatttaagtttccctcttttgaggcattaaaagagcaaatcgcccaagatgtggaaaccgcaaagcattttttcagaacacaacaaatttaa

SEQ ID NO: 59046 - protein, 311 aa, Pasteurella multocida subsp. multocida str. Pm70
MRLIRGIHNLPPNLSGCALTIGNFDGVHLGHQAILRHLRQKADALNLPVVVMLFEPQPREYFTGDAIPARLMRLRDKLHYLAQAKVDYVLCIRFNENFASQTAEEFIEDWLVKKLNVRFLSIGDDFRFGAKRQGDFALLQKSGEAFGFFVEDNHSFCCDELRISSTAIREALAEDDLAYAEKMLGKPYRILGRVAHGNKLGRTIGFPTANIPLHRQVNPVKGVYAVKVRLKNQEIYHGVANIGKRPTINGVVQLLEVHIFDFHSTIYGQCLEVEFCHKIRNEFKFPSFEALKEQIAQDVETAKHFFRTQQI

SEQ ID NO: 59047 - DNA, 942 bp, Caulobacter crescentus CB15
  CDS (1)..(942): transl_table=11
atgcccctgaagactgttcacgcctggaagaacctgcccccggaacaccgtggcgcgtccgtcgcgctcggcaatttcgatggcgtgcatcgcggccaccagcaggtgatcgcccaggccgcgaaggccgccctgaccgacaagactccgctgggcgtgatcagcttcgacccgcatccgcgccgcctgttccggcccagcgagccggcgttcaagctgatgacccagggccagcaggcccgggcgttggccggactgggcgtcggggtcttctacctgctgccgttcgacttcgagatggccagcttcagcgaccgcgagttcgtcgagaaggtgctggtcgaggggctgggcgtcacccacgtggccgccggcttcgacatctcgttcgggcgcggccgcaccggcagcccggaactgctgcggacctatggccaggagtacggcttcaccgtctcgatcgccgagcctgtggccggcggcgatggcgagaagttctcgtcgaccggcgtgcgcgacgccctgcgcggcggccagcccgagcaggcggcggccatcctgggccgcccgttcgccatcgagggcgtggtgcggcgcggccagcaactgggccgccagctgggctttcccaccgccaatgtcgaggtcgaggactatgtggtcccgaaactcggcgtctacgccacccgcacccgcctgcccgacgggcgcgaggtgcccggcgtggccaatctcggcaacaacccgaccacgggcctggtcgagacccggctggaaacctggctgttcgacttcgacgaggacctttacggccagatcatcgaaaccgacctggtggccttcctgcgcccggagctgaagttcgacagcctggagctgatgatcgaacagatccgccgcgacgaacaggccgcgcgggcgatcgtcgcgccggggttttag

SEQ ID NO: 59048 - protein, 313 aa, Caulobacter crescentus CB15
MPLKTVHAWKNLPPEHRGASVALGNFDGVHRGHQQVIAQAAKAALTDKTPLGVISFDPHPRRLFRPSEPAFKLMTQGQQARALAGLGVGVFYLLPFDFEMASFSDREFVEKVLVEGLGVTHVAAGFDISFGRGRTGSPELLRTYGQEYGFTVSIAEPVAGGDGEKFSSTGVRDALRGGQPEQAAAILGRPFAIEGVVRRGQQLGRQLGFPTANVEVEDYVVPKLGVYATRTRLPDGREVPGVANLGNNPTTGLVETRLETWLFDFDEDLYGQIIETDLVAFLRPELKFDSLELMIEQIRRDEQAARAIVAPGF

SEQ ID NO: 59049 - DNA, 1089 bp, Nostoc sp. PCC 7120
  CDS (1)..(1089): transl_table=11
gtgctaaatctgtctcaaaatgggtgttctgtgtgggttgcttcttcaactgaaatggttctcacgccaacggctgttgctcttggtaagtttgatggagtgcatcttggccatcaaagggtcattcaaccagttttgcagtcaaccaggagcgcacaaacatggggagatgcactagactcatcagcccaatcagcaaaccctccagcagcaccacaagaacggatatactccacagttgtcacttttcgtcctcatccccaagagttctttacaggacaagcccgtacttggttaactcctctagatgaaaaagtacaacaattgcgatcgcttggggtagatcaactagtactactaccctttgacaaagaattaactgctttgtcgccggaagagtttgtcgaaaaaatccttgtgcaacaactacgctgtcaacgaattagcgtcgggcaagatttttgttttggcaaacagcgccgtggtaccgccaaggacttgcagttaattgcagccaaataccatattcctgttagcatagttcctttacaaacttctgatgggcaatttctggaagatggcaactgtggaagctttgagtctctagaagatgctcctattagtacctcattaattcgccaagctctagaaacgggcgatatcaaaactgccaacagattcttaggaagaccctacattctcattggcgtagtcgttgaaggcgaacaacttggtagaaccattggttttcctacagccaacctggagctaccaaaagataagtttgtcccccgtcaaggagtttacgccgtccgtgtcaaaattctcggtgagagtgcagatgctaatataccactggaaattttgggggtgatgaatattggcaaccgtcccacagttaatggtacttattcatcagtagaagtgtatcttcttgattggtctggggatttatatggtaaagaactagccgtgcagttagtggactttctgcgaccagaacaaaaatttccgtctctagaagccttaaaagcacaaattcaacaagactgcactgtcgctagacaaattttgtcaagggagaattga

SEQ ID NO: 59050 - protein, 362 aa, Nostoc sp. PCC 7120
MLNLSQNGCSVWVASSTEMVLTPTAVALGKFDGVHLGHQRVIQPVLQSTRSAQTWGDALDSSAQSANPPAAPQERIYSTVVTFRPHPQEFFTGQARTWLTPLDEKVQQLRSLGVDQLVLLPFDKELTALSPEEFVEKILVQQLRCQRISVGQDFCFGKQRRGTAKDLQLIAAKYHIPVSIVPLQTSDGQFLEDGNCGSFESLEDAPISTSLIRQALETGDIKTANRFLGRPYILIGVVVEGEQLGRTIGFPTANLELPKDKFVPRQGVYAVRVKILGESADANIPLEILGVMNIGNRPTVNGTYSSVEVYLLDWSGDLYGKELAVQLVDFLRPEQKFPSLEALKAQIQQDCTVARQILSREN

SEQ ID NO: 59051 - DNA, 981 bp, Agrobacterium tumefaciens str. C58
  CDS (1)..(981): transl_table=11
atgaccgtctttcatcgcaatgaaaaaaaagagccgttgccggaagctcttcgcggtggcgttatcgcgatcggcaatttcgatggtgtgcatcgtggccaccgcgccgtgctggaccgtgctctggaactggcggaagcccgcggtgttcccgccctggtcctgaccttcgagccgcatccccggtccgtcttccgtcctgatacacctgtctttcgtctgacgcccgcgccgttgaaagcccgcattctcgaggcgatcggtttccgctccgtcatcgaatatcccttcgaccgggagttctcgcagcgttcggcggacgaattcgtccagtccatattggtcgactggctgggtgccagcgctgtcgttaccggttttgatttccatttcggcaagggccgcgagggcggtccggcattcctgatggcagccggcaaacgtcacggcttcgacgtgacgctggtggatgccttccgcgacgaggggtcggatgtcgtttcctccagccgtatccgctcgcttctgtgtgagggcgatgtggcgggtgccgccggtctgctcggttatcgctttaccgtggagagcgaggtcatcggcggccagaagctcggccgcacattgggataccccactgccaacatggcgctggcgccggagacggagctgaaggcgggcatctatgccgtgcggttccgtcgcctcgatggttcgatccacgatggcgtcgcgagtttcggctaccgcccgacggtgacggagaacggtgcggcgctgctcgaaaccttcctgttcgatttttcgggcgatctttatggggaagtgtgttcggtgtccttcttcgggcacctgcgcgacgagctgaagttcgacgggctcgatccgcttgtcgcccagatcaggcgtgatgaagaggaggcgagggcgatgctatcaggcgtgcgtccgctcagccagctggacgcgaagatcgcgttctga

SEQ ID NO: 59052 - protein, 326 aa, Agrobacterium tumefaciens str. C58
MTVFHRNEKKEPLPEALRGGVIAIGNFDGVHRGHRAVLDRALELAEARGVPALVLTFEPHPRSVFRPDTPVFRLTPAPLKARILEAIGFRSVIEYPFDREFSQRSADEFVQSILVDWLGASAVVTGFDFHFGKGREGGPAFLMAAGKRHGFDVTLVDAFRDEGSDVVSSSRIRSLLCEGDVAGAAGLLGYRFTVESEVIGGQKLGRTLGYPTANMALAPETELKAGIYAVRFRRLDGSIHDGVASFGYRPTVTENGAALLETFLFDFSGDLYGEVCSVSFFGHLRDELKFDGLDPLVAQIRRDEEEARAMLSGVRPLSQLDAKIAF

SEQ ID NO: 59053 - DNA, 990 bp, Brucella melitensis 16M
  CDS (1)..(990): transl_table=11
atgaagaaatcaagctttcagcgcctcaccggaaccgagggtttgccgccagccctgcatgattgcgtggtggcaatcggcaatttcgacggtgtgcatcgcggccaccaggctgttctggagcgggcgcttgagcttgccgagcgtgagagccggcctgcggtcgtgctgaccttcgagccgcatccgcgcagtttcttcaagcaggaccagcctgtcgatcgcctgaccgatgcggcggaaaaggccgaaatcctgcgcctcatgggctttgacgccgtgatggaacagccttttacggcagagttttcgcagcgttcggcggaagatttcgttcagcatattcttgttgaaaagctgcgtgcgagccgcgtcgtcaccggttacgactttcatttcggcaagggacggcgcggcacgccggaattcctgtgcgaggcggggaaaaaggccgggttcagtgttacgctggtcgatgccttcaccgatgagggcgggatgctcgtttcttcaacgcgcatccgcaatctcttgagcgagggtgaagtggctgaggctgccggacttctcggctatcgctaccgcatatgcggggaggtgatccacggcaagaagcttggccggacgcttggttttccaacagccaatatggcgcttgcaccgcagacaagtctcaagcacggcatttatgcggttcgcttccggttggatgacgccatgctttatgacggcgtggcaagtttcgggcgaagacccacagtggacgacgaaggcgcgcctcttctcgaaacctttctcttcgatttttccggcgacctttacggaaagaccgcagccgtttccttcttcggtttcctgcggggcgaggtgaaattcgacggcctcgatccgctgatcgatcagatgaagcaggatgaggcgcaggcgcgcgcgcttctcgccgatgtccggcctatctcggggctcgaccggatgctctccttcaactga

SEQ ID NO: 59054 - protein, 329 aa, Brucella melitensis 16M
MKKSSFQRLTGTEGLPPALHDCVVAIGNFDGVHRGHQAVLERALELAERESRPAVVLTFEPHPRSFFKQDQPVDRLTDAAEKAEILRLMGFDAVMEQPFTAEFSQRSAEDFVQHILVEKLRASRVVTGYDFHFGKGRRGTPEFLCEAGKKAGFSVTLVDAFTDEGGMLVSSTRIRNLLSEGEVAEAAGLLGYRYRICGEVIHGKKLGRTLGFPTANMALAPQTSLKHGIYAVRFRLDDAMLYDGVASFGRRPTVDDEGAPLLETFLFDFSGDLYGKTAAVSFFGFLRGEVKFDGLDPLIDQMKQDEAQARALLADVRPISGLDRMLSFN

SEQ ID NO: 59055 - DNA, 1026 bp, Corynebacterium glutamicum ATCC 13032
  CDS (1)..(1026): transl_table=11
gtggatatttggagtggactagacagcgttccggctgatcttcaaggatcagtagtcaccattggtgtgtttgatgggctccaccgggggcatcaaagtttaatcggcgaggccaagaagcaggccgaggagctgggtgtgccttgtgtcatggtgacctttgacccgcatccgatcgctgtgtttttgccaggtaaagagccaacccgtttggctcctttggattatcgccttaatttggctgcggaatgtggcgtcgatgctgcgttggttattgatttcactaaagaactcgcaggtctgagcgctgaagagtatttcacaaccatgatcgtggatacgctgcatgcgcgttcagttgtggtgggggagaacttcaccttcggtgtcaatggcgctggcactgagtccacgatgcgggaattgggacaaaagtttggcgtgaatgtcacgattgctccgctgctgcatgatgatgaccagcgtatttgctccaccttggtgcgcgattacttggatcagggcgaggttgagcgcgcgaactgggcgcttggtcgacgctatgccgtgcgcggcgaagttgtccgtggtgctggccgtggcggcaaagaattgggctatcccaccgcgaatctctacctgccgacctctgtggcgctgcccgccgatggcgtgtatgcaggctggttcaccatcaccgatgaccgcgaaatcgacaaggaaatctcccgcgatatcgacggcaccatggttccaggcgtgcgttaccaaactgccatttccgtgggcaccaatcccaccttcggcgatgagcgacgcagcgtcgaggcattcatcctcgaccaggaagccgacctgtacggtcaccatgtcatggtggaattcgtgggacacttgcgcgacatggtcaaattcaacggcgtcgacgagctactagacgccatggcccgagatgtcaccaacgcccgcgacatccttgccaaagacaaattgcttctcgacgccgacacccagcccagcgcttaa

SEQ ID NO: 59056 - protein, 341 aa, Corynebacterium glutamicum ATCC 13032
MDIWSGLDSVPADLQGSVVTIGVFDGLHRGHQSLIGEAKKQAEELGVPCVMVTFDPHPIAVFLPGKEPTRLAPLDYRLNLAAECGVDAALVIDFTKELAGLSAEEYFTTMIVDTLHARSVVVGENFTFGVNGAGTESTMRELGQKFGVNVTIAPLLHDDDQRICSTLVRDYLDQGEVERANWALGRRYAVRGEVVRGAGRGGKELGYPTANLYLPTSVALPADGVYAGWFTITDDREIDKEISRDIDGTMVPGVRYQTAISVGTNPTFGDERRSVEAFILDQEADLYGHHVMVEFVGHLRDMVKFNGVDELLDAMARDVTNARDILAKDKLLLDADTQPSA

SEQ ID NO: 59057 - DNA, 957 bp, Streptomyces coelicolor A3(2)
  CDS (1)..(957): transl_table=11
gtgcagcgctggcgtggcttggaggacatccccgaggactggggacgcagcgtcgtcaccatcggctcctacgacggtgtccaccgcggacaccagctgatcatcaggcacgccgtggaccgcgcccgcgagctgggcgtccccgccgtcgtcgtcaccttcgacccgcaccccagcgaggtcgtccgccccggcagccacccgccgctgctcgccccgcaccaccgcagggccgaactgatggcggacctgggggtggacgccgtgctgatcctccccttcaccaaggagttctcgaagctctccgccgccgacttcgtggtcaaggtcctggtcgaccggctgcgcgccaaggccgtcgtcgagggccccaacttccgcttcggccacaaggccgccgggaacgtggacttcctcatcgagcaggggaaggtctacgacttcgaggtcgaggtcgtcgacctgtacgtcaccggcgacgcgggcggcggcgagccgttctcctccaccctgacccgccgcctggtggccgagggcgacgtggcgggcgccgcggagatcctgggccgcccgcaccgcgtcgagggcgtcgtcgtgcggggcgcccagcgcggccgcgagatgggcttccccacggccaacgtcgagacgctcccgcacaccgcgatcccggccgacggcgtctacgccggctggctgcacgcccagggcgaggcgatgccggccgcgatctccgtcggcaccaacccgcagttcgagggcaccgagcgcacggtcgaggcgtacgccatcgaccgcgtgggcctcgagctgtacggcctgcacgtcgccgtggacttcgtggccttcgtacgcggacaggcgaagttcgagacgctggacgcgctcctcgagcagatggccgtggacgtggacaggtgccgcgagatcaccgcgacggacgcccccaggccctga

SEQ ID NO: 59058 - protein, 318 aa, Streptomyces coelicolor A3(2)
MQRWRGLEDIPEDWGRSVVTIGSYDGVHRGHQLIIRHAVDRARELGVPAVVVTFDPHPSEVVRPGSHPPLLAPHHRRAELMADLGVDAVLILPFTKEFSKLSAADFVVKVLVDRLRAKAVVEGPNFRFGHKAAGNVDFLIEQGKVYDFEVEVVDLYVTGDAGGGEPFSSTLTRRLVAEGDVAGAAEILGRPHRVEGVVVRGAQRGREMGFPTANVETLPHTAIPADGVYAGWLHAQGEAMPAAISVGTNPQFEGTERTVEAYAIDRVGLELYGLHVAVDFVAFVRGQAKFETLDALLEQMAVDVDRCREITATDAPRP

SEQ ID NO: 59059 - DNA, 948 bp, Thermosynechococcus elongatus BP-1
  CDS (1)..(948): transl_table=11
gtgtcaaaatgtttcctgtgtcaatttaagagcggcgtacccttgcaaactccgacggcgatcgccctgggcaactttgatggtgtccatcgagggcatcaagaggtcatccgtactcttcttaaagcagcgcctcccgactgttacccttcagtgatgacattttcgccccatccccaagcattttttacgggagaagagcgactgctgctgaccccagaggctgaaaaacgtgcccttttgcaccagtgtggcattgcacaggtgattgtcctgccctttacccaggccctggcccaactctcgcctttagagtttgttgagcagattttggtacagcagttgcaggccaaggtgttgagtgttggttttaattttggctttgggcgggggcgatcgggaaccgcagaggatttgcgcagtctctgtgctccctttggcattgtggtgcatattgtgcctccctattgtcgggggagcgatcgcgtgagtagttccgcagtacgagccgcccttgccgcaggagaggtggccttggcacgggagctgctgggacgcgcctataccttaacaggcacggtaactcaaggggaacagttgggccgtcagttgggatttcctacggccaatttagtcctccctcgcgaaaaattattgcctcgctacggcgtctatgcctgccgtgtcagcgggccagctctccccagggagcacttgggggtagtgaatatcggcgtgcgacccacagtgggggggcaggaggtcaggacggaagtgcacctattgcactggcaggggaatctctacaaccaagagatcacgctccacctggaggcatttattcgtcctgagttaacactgcccagtttggctgccctacgggcgcaaattgccgccgattgccaagtagcggttgatctcctagaacgagtcgtctcctatgcgtga

SEQ ID NO: 59060 - protein, 315 aa, Thermosynechococcus elongatus BP-1
MSKCFLCQFKSGVPLQTPTAIALGNFDGVHRGHQEVIRTLLKAAPPDCYPSVMTFSPHPQAFFTGEERLLLTPEAEKRALLHQCGIAQVIVLPFTQALAQLSPLEFVEQILVQQLQAKVLSVGFNFGFGRGRSGTAEDLRSLCAPFGIVVHIVPPYCRGSDRVSSSAVRAALAAGEVALARELLGRAYTLTGTVTQGEQLGRQLGFPTANLVLPREKLLPRYGVYACRVSGPALPREHLGVVNIGVRPTVGGQEVRTEVHLLHWQGNLYNQEITLHLEAFIRPELTLPSLAALRAQIAADCQVAVDLLERVVSYA

SEQ ID NO: 59061 - DNA, 951 bp, Pseudomonas putida KT2440
  CDS (1)..(951): transl_table=11
atgcagctggttcgaggtcttcacaacctgcgccccgagcaccggggctgtgtcgccaccattggcaacttcgacggggttcaccgcggccaccaggcaatcctggcgcgcctgcgcgagcgcggtcaggccttgggcctgccgacctgcgtggtgatcttcgaaccacaaccacgcgagtacttcgcacccgataccgcgccagcgcgcctggcccggctgcgcgacaagatcgagctgctggcgaccgaaggcatcgaccgggtgctgtgcctggcgttcaaccagcgtctgagcaagctcagtgccgatgccttcgtcaaggccatcctggtcgacggcctgggcgtgcgtcatctcgaagtgggcgatgacttccgcttcggctgcgaccgcgctggcgacttcgctttcctggtcgaggccggcaacgcgtacggctttaccgtcgaggccgccaacacggtcatccaggatggcctgcgggtcagcagcaccgaagtgcgcaaggccttgtccgagggcgacttcgaactggccgaacacctgctgggccgcccgtaccgcattacaggccgcgtgctgcacggccagaagctggcccgccagctcggcacaccaaccgccaacatccagctcaagcgccgccgcgtgccgctgtccggggtatacctggccagcatcgtgatcgacggcaaagcttggccgggtgtcggcaatatcggcgtgcgccccaccgttgccggtgatgggcgcccgcacctggagattcatcttctggactttgccggcgatctttacggccggcgcctgacggtggagttccaccacaagctgcgtgaagagcagcgattcgcctccctggaggcgctgaagtcggcgatcgatgcggatatcgccgccgcacgtgcacattggcacgctcaaccgctaacgaagagcctgaaatga

SEQ ID NO: 59062 - protein, 316 aa, Pseudomonas putida KT2440
MQLVRGLHNLRPEHRGCVATIGNFDGVHRGHQAILARLRERGQALGLPTCVVIFEPQPREYFAPDTAPARLARLRDKIELLATEGIDRVLCLAFNQRLSKLSADAFVKAILVDGLGVRHLEVGDDFRFGCDRAGDFAFLVEAGNAYGFTVEAANTVIQDGLRVSSTEVRKALSEGDFELAEHLLGRPYRITGRVLHGQKLARQLGTPTANIQLKRRRVPLSGVYLASIVIDGKAWPGVGNIGVRPTVAGDGRPHLEIHLLDFAGDLYGRRLTVEFHHKLREEQRFASLEALKSAIDADIAAARAHWHAQPLTKSLK

SEQ ID NO: 59063 - DNA, 981 bp, Haemophilus ducreyi 35000HP
  CDS (1)..(981): transl_table=11
atgcaattaatccgtggctttcacaatttagctaactatgatgcactaaaaaaaggttgtgtattaaccattggcaattttgatggtgtacacataggccatcaaaatattttagcccgtttatgcgatcaatcattagctatcggtttaccttcagtggttatgctatttgaacctcaaccgcgtgaattttttgctaaaaatagccaaaatcagaccgctagcgctctatccaacgctgtaccagcaaggctaatgcgtttacgcgataagctgaaatatttagctgaaatgggggttgattttgtactttgtgtcaatttcaatcaaaaatttgcgaaatattcggcggaagattttattactgaattattggtaaaaaaattgaaagttcgttatcttagtgttggcgatgattttcgttttggtattgaacgtcgcggtaattttgaaatgctacgaaatgcaggcttaacacatcgttttgcagttgaagaaagccacactcatcgctttgatacactcagaattagtagttcattaatccgacaagcgttacaacaaaatgacttagccttagtagaaaatttacttggtaaaccttattcaatccgtggacgtgttgctcacggcaataaactcggtagaacaattggcttcccaaccgcaaacattatgctgaatcggttagtaacgccgattcaaggcgtgttcattgtagaagttcaaaccatttacgggcgcttcaatggcattgctaatgtaggaaatagaccaaccattaacggcacaaaaccgttattagaagtacatatttttgactttaataacgctatttatcatcaaatcattgaagtgatttttataaaaaaaatccgtgatgaactaaaatttgctagttttaccttactaaaagagcagattgaaaaagattgtcaacaagcggttgaattttttaatcaattacccaagacaaaataa

SEQ ID NO: 59064 - protein, 326 aa, Haemophilus ducreyi 35000HP
MQLIRGFHNLANYDALKKGCVLTIGNFDGVHIGHQNILARLCDQSLAIGLPSVVMLFEPQPREFFAKNSQNQTASALSNAVPARLMRLRDKLKYLAEMGVDFVLCVNFNQKFAKYSAEDFITELLVKKLKVRYLSVGDDFRFGIERRGNFEMLRNAGLTHRFAVEESHTHRFDTLRISSSLIRQALQQNDLALVENLLGKPYSIRGRVAHGNKLGRTIGFPTANIMLNRLVTPIQGVFIVEVQTIYGRFNGIANVGNRPTINGTKPLLEVHIFDFNNAIYHQIIEVIFIKKIRDELKFASFTLLKEQIEKDCQQAVEFFNQLPKTK

SEQ ID NO: 59065 - DNA, 966 bp, Bordetella bronchiseptica RB50
  CDS (1)..(966): transl_table=11
gtgaaaccatcgctgcgcatctaccgctacccgcccccgccctcgcaacgcacgccgtgcgccctgacgatcggcaatttcgacggcgtccacctcggccatcaggccatcctggcgcgcgtgcgccaggaggcccgcgcgcgcggcctcgtgcccgccgtcatgaccttcgagccgcacccgcgcgaatacttcgccaccctgaaccgccgccccgaactggcgcccacccgcatttccggactgcgcgacaagctgcaggcgctggcagccgccggcatcgaacaggtcgcggtcgagcgcttcgacgcccggctggccgaaatgtcggccaacgccttcatcgaagacctgctggtggccggcctgcagacccgctggctgctggtcggcgaggatttccgctatggccacaagcgcagcggcgacatcgacctgctgcgcgaggcaggcctggcgcacggtttcgaagtctgtaccctggccgacatcaccgaccgccagggccaccgcatttccagctccgaggtacgcaccgccctggcggtgggcgacctggaccgcgccgcgcagctgctgggccagccgttccatatcagcggccatgtgatccatggccggaaactgggccgcgaactgggtttcccgaccatgaacctgcgggtggcgccgcgctgcgccacccgctcgggtatttacgtggtgcgcgtgctcggcctgcaggaccggcccttgccggcggtggccagcctgggcgtgcgtccgacggtcgaagaccgcggccgggtgctgctcgaagcccacctgctcgacgagagcctcgacgcatacggtaaactcgtgcgagtcgagttcctgcacaagctgcgggacgaagaaaaattcgccgatctcccctccctgactgccgccatcgcccaagacgcgcaaaacgcgcgcgcctattttgccgttcatggactataa

SEQ ID NO: 59066 - protein, 321 aa, Bordetella bronchiseptica RB50
MKPSLRIYRYPPPPSQRTPCALTIGNFDGVHLGHQAILARVRQEARARGLVPAVMTFEPHPREYFATLNRRPELAPTRISGLRDKLQALAAAGIEQVAVERFDARLAEMSANAFIEDLLVAGLQTRWLLVGEDFRYGHKRSGDIDLLREAGLAHGFEVCTLADITDRQGHRISSSEVRTALAVGDLDRAAQLLGQPFHISGHVIHGRKLGRELGFPTMNLRVAPRCATRSGIYVVRVLGLQDRPLPAVASLGVRPTVEDRGRVLLEAHLLDESLDAYGKLVRVEFLHKLRDEEKFADLPSLTAAIAQDAQNARAYFAVHGL

SEQ ID NO: 59067 - DNA, 909 bp, Gloeobacter violaceus PCC 7421
  CDS (1)..(909): transl_table=11
atggcggtgtttcgatcgctctcggaggtggcgacgccctgtgcggtggcgctgggcaacttcgacggcgttcacctcggccatcaggcggtgatccaggcggtcctgggccgggcgggcatcccgacggttctgaccttcgacccgcatccgcgcgaatatttcacgggcaaaaccgggtttttgctggccccggagcgcgagcgcaccgccgcgattttggccctggggatcgcccaggtgctggtgttgccttttgatgaactactggcggccaccgaggcgggcgcctttgtcgagcaggtgctggtggcggggctcggggcgcgctttgtctcggtgggctggaactttcgcttcggcaaggagcgcgccggcaccaccgagatgctccagagctatgcgcgcgcgggggcgtttgatatcgagattctggcggagcggcaggtaaggggccggcgcgtcagcagttcggtgattcgcgaagctctaggttgcggcgatctcgatctggcccggttgctgctcggtcgcgcctacggcctcgaaggcgaggtggtgcgaggcgatcagcgcggccgtttgttgggatttccgactgcgaatttgcaggtgagcgggcgcaagtttctgcccaaggacggtgtgtacctggtgagtgcgcgctggggagtgcagcagcgctgggggttgctcaatctcgggctgcgccccaccttcgacggtctgaaacgcaccatcgaggtgcatgtgctcgattgggaaggcgatctgtacggccagcacatcaagatcaccctggaacgctacttgcgccctgagcaaaaattcggctcgccgggcgaactggtggcgcagttgcaccgcgaccgcgaagcagctctcaaagagattgccggtaacccgtag

SEQ ID NO: 59068 - protein, 302 aa, Gloeobacter violaceus PCC 7421
MAVFRSLSEVATPCAVALGNFDGVHLGHQAVIQAVLGRAGIPTVLTFDPHPREYFTGKTGFLLAPERERTAAILALGIAQVLVLPFDELLAATEAGAFVEQVLVAGLGARFVSVGWNFRFGKERAGTTEMLQSYARAGAFDIEILAERQVRGRRVSSSVIREALGCGDLDLARLLLGRAYGLEGEVVRGDQRGRLLGFPTANLQVSGRKFLPKDGVYLVSARWGVQQRWGLLNLGLRPTFDGLKRTIEVHVLDWEGDLYGQHIKITLERYLRPEQKFGSPGELVAQLHRDREAALKEIAGNP

SEQ ID NO: 59069 - DNA, 981 bp, Vibrio vulnificus YJ016
  CDS (1)..(981): transl_table=11
ttgacactgcataaaacgaaaacagaggcatttcgctgtatccaaatggaactgatacgaggtatacacaatataaaaccacagcatcgcggctgtgtattgaccataggtaactttgatggtgtgcatttagggcaccaagaagtgttgcgtcaagtctctctgcgagctagggaaatgtcgctaccttctgtcgtgatgacatttgaacctcagcctttagagctgtttgccaaagagaaagcccctgcgcgcttaacgcgtttacgcgataagtttgtccaattgggtaagcttgagatcgaccgattgttgtgcgtcaactttaatcgtcatttcgcttccttagatgcggatgcctttattcgcgacttgttggttgagcgtttgggtgttaagtttctcgttgttggcgatgacttttgttttggtaaagcaagacaaggcaattttgccatgctgcaagaagcgggcaaaaaatacggtttcaccgtagtgaatacccaaagcttctgtttagcgcagttaagagtcagtagtaccgccattcgtgaagcgcttgctcacgatcagctagcggttgccgctcaaatgttagggcgagattacagcattagcggacgtgtttcacatggccgtaaattaggcaggacgataggttttcctaccgccaatattccgctaaaacgctgtgtttctcccgtctctggcgtgtatgtcgttcaagcgttaggcttggataacaaaccgattggtggtgtggccaacattggccaaagaccgacggttaacggcgttcgtcagcagttagaggtacatttattcgactttcaagccaacttgtatggcaagcagttagaagtggtacttttgcataaactgcgtgatgaaaagaagtttgagtcttttgatgcactcaaacagcaaattgaattggatgctgaggcagcaagggtgtggctgcgtcagctaaagcgttga

SEQ ID NO: 59070 - protein, 326 aa, Vibrio vulnificus YJ016
MTLHKTKTEAFRCIQMELIRGIHNIKPQHRGCVLTIGNFDGVHLGHQEVLRQVSLRAREMSLPSVVMTFEPQPLELFAKEKAPARLTRLRDKFVQLGKLEIDRLLCVNFNRHFASLDADAFIRDLLVERLGVKFLVVGDDFCFGKARQGNFAMLQEAGKKYGFTVVNTQSFCLAQLRVSSTAIREALAHDQLAVAAQMLGRDYSISGRVSHGRKLGRTIGFPTANIPLKRCVSPVSGVYVVQALGLDNKPIGGVANIGQRPTVNGVRQQLEVHLFDFQANLYGKQLEVVLLHKLRDEKKFESFDALKQQIELDAEAARVWLRQLKR

SEQ ID NO: 59071 - DNA, 933 bp, Prochlorococcus marinus str. MIT 9303
  CDS (1)..(933): transl_table=11
atgtgcacggccaccttgattcctctctgcccccctcagcaggcacgcaccccgacagcgcttgccctcggtagtttcgatggccttcatgctggccatcgccgcgtcattgaggctgttgtaaacaatgcgcctggcgtgccaacggtggtgagtttctggccccatccccgcgaagtgctctatggcgaaccgcgattacgactggacctgcctaccgaaaaaacctgcctcctcgctccgcttggtgtcgaacaacttgtgctggtgcccttcgatcgtgctctggcatccctcagtgccgaaacctttgtgaagcaaatgctgatccacaccctcaaagcgcagcgcattgccgttggggccaacttccgctttggacgtaatcgtgagggcgacacaaccaccttgcagaaactcgccgcagccgccggagtggaagtgatggtgttgccaatcctggaagacacagaggggcgaatgagcagcagccgcattcgctccgctctcagcgaaggcgatctacaggcagcaacgaccctgatgggccggccctatcgcttccgcggccgtgtcgtcagcggccgcggccttgggcgaaaactgggctggcctacagccaacttgcaagttgatggtcgcaaattcctgccaggtcttggggtctatgccgcctgggcatcagtcaaagacgaaagcgaaccccttgctgccgtgatgaacttgggtccccaacccacagtggatccaacatcgccctccgccgtagaggtccatttgctagatcagcaaatggacctggaaggatgcgagttgttggttgaaccactacagagacttcgaggccagcaacgcttcgcaaaccttgaagaactcagcacccagattggccgcgatgccgacctagcacgcagcaaattgaaggtccgataa

SEQ ID NO: 59072 - protein, 310 aa, Prochlorococcus marinus str. MIT 9303
MCTATLIPLCPPQQARTPTALALGSFDGLHAGHRRVIEAVVNNAPGVPTVVSFWPHPREVLYGEPRLRLDLPTEKTCLLAPLGVEQLVLVPFDRALASLSAETFVKQMLIHTLKAQRIAVGANFRFGRNREGDTTTLQKLAAAAGVEVMVLPILEDTEGRMSSSRIRSALSEGDLQAATTLMGRPYRFRGRVVSGRGLGRKLGWPTANLQVDGRKFLPGLGVYAAWASVKDESEPLAAVMNLGPQPTVDPTSPSAVEVHLLDQQMDLEGCELLVEPLQRLRGQQRFANLEELSTQIGRDADLARSKLKVR

SEQ ID NO: 59073 - DNA, 885 bp, Thermus thermophilus HB27
  CDS (1)..(885): transl_table=11
atgcttttctccgaggtcgctgacgtccccaaaggccccaaggtggtggccgtgggctcctttgacggggtgcacctgggccaccagtacctcctgcgccaggccctggccgaggccaaggccctccaccagccccttttggtctacacctttgacccgcccaccaaggtcttcacccggggggagggcttcctcatggacctcacggagaaggtggaggccctgagggccctgggggtggagctcatcctggcggtgcccttcaacgaaaccttcgcccggcgtccggcggaggagttcctggaggacctaaggaccctgggggccagccgcatctacgtgggggaggacttccgctttggccggggccggggcggggaccccgaggccctggcccgggtggcccccacccgggtggtgccccttctggccttagggggggagccggtgaagtccagccgcatccgcgcccttctccaagagggcagggtggaggaggcccgccacctcctgggccgcccctacggggcctatggggtggtggtggagggggagaagctgggaaggaggctctccttccccaccgccaacctggcggtccaccccctgaaggtccttccccccggggtctatgcggtggaggccatgggggacttcgggcggtacaagggggtggccaacgtgggcacgaggcccacgctggggggcggggagaggcggcttgaggtccacctcctgggcttcgccggggagctttacggggaggaggtgcgcctccttttcctcaagcacctgcgccaggaaaggcgttttgagagcctcgaggccctgaaggcccagatcgcccaggacgtggccgcggcccgggcctactttgggctttag

SEQ ID NO: 59074 - protein, 294 aa, Thermus thermophilus HB27
MLFSEVADVPKGPKVVAVGSFDGVHLGHQYLLRQALAEAKALHQPLLVYTFDPPTKVFTRGEGFLMDLTEKVEALRALGVELILAVPFNETFARRPAEEFLEDLRTLGASRIYVGEDFRFGRGRGGDPEALARVAPTRVVPLLALGGEPVKSSRIRALLQEGRVEEARHLLGRPYGAYGVVVEGEKLGRRLSFPTANLAVHPLKVLPPGVYAVEAMGDFGRYKGVANVGTRPTLGGGERRLEVHLLGFAGELYGEEVRLLFLKHLRQERRFESLEALKAQIAQDVAAARAYFGL

SEQ ID NO: 59075 - DNA, 1002 bp, Acinetobacter sp. ADP1
  CDS (1)..(1002): transl_table=11
atgaaactgctccgtcttaatgcgttatcgccagattttgagttagctgccactgcggtcacgattggcaattttgatggcgtccatcttggacatcaggccatgattagtcagcttaaaaatattgcagatgcgaacagcctgaaaacgttagtgatgatttttgagcctcagccgcttgaatacttcaagggttatgaagcaccgccacgcatcagttcactcagagaaaaagtcgaatacttgactgaattgggcgtcgattatattgcgattgcaaaatttgatcattatttccgtggactcagtgcccaagaatttgcagacctactcaaatttaagctgaatgccaaacagcttgtactgggtgacgattttcattttggtaaaaatcgtcagggaaatagtgaatttttacgggattatggctttaaaatcaccaaccttgacaccatagagttcaaaggagaacgtgtcagttccacccgtattcgtcaggttctggcagagggtgatctggcattggcagccaagttacttggacgtccatatagtatgattggtcgtgtgcaatatggtgaccaaattggtcgtacactcaattttccaaccatcaatgtccgtttaggccggcataaaccgtgtctgagtggtatttatggtgtagatgtcgtctgtgaaacaacgtctttacgcaagaagatcatgcatgatccgaatgcacctaaaggtattgcaggctacgacccagacagcttatatggtgcgggtcatgttggaactcgtcctgccatcaaacaggcgcatcccgaatggcgattggaagtacattttccagaagtttctgctaatctgtatggcctattaatgcgggtgacgtttttacactatttacatggtgagcgaaactatccttcgctagacgcgctgaaagctgggattgaccaagatgttgaggatttgctcgaatttcgtaagcaaaatacccaacgccctttttaa

SEQ ID NO: 59076 - protein, 333 aa, Acinetobacter sp. ADP1
MKLLRLNALSPDFELAATAVTIGNFDGVHLGHQAMISQLKNIADANSLKTLVMIFEPQPLEYFKGYEAPPRISSLREKVEYLTELGVDYIAIAKFDHYFRGLSAQEFADLLKFKLNAKQLVLGDDFHFGKNRQGNSEFLRDYGFKITNLDTIEFKGERVSSTRIRQVLAEGDLALAAKLLGRPYSMIGRVQYGDQIGRTLNFPTINVRLGRHKPCLSGIYGVDVVCETTSLRKKIMHDPNAPKGIAGYDPDSLYGAGHVGTRPAIKQAHPEWRLEVHFPEVSANLYGLLMRVTFLHYLHGERNYPSLDALKAGIDQDVEDLLEFRKQNTQRPF

SEQ ID NO: 59077 - DNA, 942 bp, Erwinia carotovora subsp. atroseptica SCRI1043
  CDS (1)..(942): transl_table=11
atgcagctaattcgcggtatacacaatcttcgagcacaccattatggctgtgtgctcactattggtaattttgacggcgtgcaccttggacaccaaatgctgcttgaacgactgaagcaggaaggtcgtgctcgtgggttgccggtgatggtcatgatttttgaaccacagccgctggaactctttgctgcggaaaaagcgcccgcacgtttgacgcgtttgcgtgacaaggtgaaatacctggcgcaggctggtgtggactatctgctgtgcgtcaggttcgacgcgcgttttgccgccaatgatgcagagacgttcgtttcttctctgctggcgaagaaattgggcgtgaagtttctggttgtcggggatgacttccgcttcggcgctggtcgtcagggagatttcctgttattacagaaggctgggcgtgagtcggggtttgatgtcattagtaccgattcgttctgtaatggcggtaagcgggtcagcagcactgcagtacgtgaagcgctcagtcgtgatgagcttgaactagcagaaagcctgctgggccatccttactgcatttccggacgcgtggaacatggcaaagaattggggcgaaccattgggttccctaccgccaatttaccgctgaaacgtcaggtttcccctgtcagcggcgtgtatgccgtcagcgtttatgggctggggcaagaaccgctgccgggtgtcgccaatattggtacgcgtccaaccgtaaacggtgacaaacgccagcagcttgaagtgcatttgctggacgtgacgatagatctctatggtcgtcatattgaagtcgtactgcgtaaaaaaatccgtaatgaacagcgttttgcttcgctcgatgcgttaaaacagcaaatcgccgatgatgtggtgacagcccggacgttcttcgggttaaagacaccggtttaa

SEQ ID NO: 59078 - protein, 313 aa, Erwinia carotovora subsp. atroseptica SCRI1043
MQLIRGIHNLRAHHYGCVLTIGNFDGVHLGHQMLLERLKQEGRARGLPVMVMIFEPQPLELFAAEKAPARLTRLRDKVKYLAQAGVDYLLCVRFDARFAANDAETFVSSLLAKKLGVKFLVVGDDFRFGAGRQGDFLLLQKAGRESGFDVISTDSFCNGGKRVSSTAVREALSRDELELAESLLGHPYCISGRVEHGKELGRTIGFPTANLPLKRQVSPVSGVYAVSVYGLGQEPLPGVANIGTRPTVNGDKRQQLEVHLLDVTIDLYGRHIEVVLRKKIRNEQRFASLDALKQQIADDVVTARTFFGLKTPV

SEQ ID NO: 59079 - DNA, 993 bp, Symbiobacterium thermophilum IAM 14863
  CDS (1)..(993): transl_table=11
atggaacttgtcacacgcatcgcagacgtcccggtccggggtacgggaaacctcatcgccatcggcaagtgggacggggtgcacctggcccatcaggccattctgagggccctggtcgcggaggcccggcgggtgggcggacaggcggtggccgtcggcttccatccgctgccgatgcaggttctgcgcccggaggcggcgccgccgatgctgcagagcctggaggagcgggccgagctcatggccgccctcggcgtcgacgttcacctggccctgcccttcgatcgggccctggcggacatgacgccggaggccttcgttcaccaggtactggtcggccagctgcgggcccagcaggtgatggtcggcttcaacaacaccttcggccgcggcggcaagggcacggccgagaccatgcggcagctctgcacccccctggggatccccgtccacatcttccagcccgtgcgggcagacggcgagaacgtctcctccaccgaggtgcggttcgccgtggccaaggggcgcatgcaggcggcggcacgcctcctgggccgcccctacgcggtgcggggcctcgtggtgcagggcgacaggcgcggccgcgagctggggtaccccaccgccaacatccggctggaggaggggaggctgctgccgccccacggggtctacacggcccgggtcacggtgctgggcgagccccggaagctgcagccgccggtcacggtgaccccccgcaccgggcccgtctacggcgccatgctgaacctgggtgtgcgccccacggtgggcggcacggagctgcggtgcgaggcgcacctgttcgacttccgcggcgatctctacggccgggagctgcaggtcgagtttctcgaatacatgcggcccgagcgggcgttcccgaacctggacgccctggtggcgcaactgcgcgccgatgagcgggccgcgcgggagttcctggccggtcggcagggggcagaggggtga

SEQ ID NO: 59080 - protein, 330 aa, Symbiobacterium thermophilum IAM 14863
MELVTRIADVPVRGTGNLIAIGKWDGVHLAHQAILRALVAEARRVGGQAVAVGFHPLPMQVLRPEAAPPMLQSLEERAELMAALGVDVHLALPFDRALADMTPEAFVHQVLVGQLRAQQVMVGFNNTFGRGGKGTAETMRQLCTPLGIPVHIFQPVRADGENVSSTEVRFAVAKGRMQAAARLLGRPYAVRGLVVQGDRRGRELGYPTANIRLEEGRLLPPHGVYTARVTVLGEPRKLQPPVTVTPRTGPVYGAMLNLGVRPTVGGTELRCEAHLFDFRGDLYGRELQVEFLEYMRPERAFPNLDALVAQLRADERAAREFLAGRQGAEG

SEQ ID NO: 59081 - DNA, 987 bp, Legionella pneumophila subsp. pneumophila str. Philadelphia 1
  CDS (1)..(987): transl_table=11
atgaaattgttacgcggttctactcattttgctatatttgataagggtgcagttgccactattggcaattttgatggcgtgcatttagggcatcagcatttgattaagaccctaagagcaaaggctgatgaaatgaacttgcctttagttattttattgtttgagcctcagcctaaagagtattttcacagagagaaagcaccagcacgactttctaccttgagagaaaaaatagatgtcttaaacttatgtcaggtggattacatctattgcatcaagtttgatgcaaggctggctcaaactcccgctttgtattttgctcagttttatttatttgaagcattgaaaatacgctaccttctggttggccaggattttcgttttggcaaaagcagagaaggtgatgttaatttactcaaaacactaggtgctaattattcctgtgaagtgacagtgcaatctgattttcttatagaaaatgaaaaaatcagttcgacgagaatcagagaagccttgcaacagggaaatttacgtttcgcagccaagttgttgggaagaccatacagcatgtgtggacgtgttatcaaaggggatggtcgtggtcgtcaatgggggataccgacagccaatttaggcatgcatcgtttatcgatccctttgcaaggtgtatatgctgtacaagtccatattaattcgaatgttttttatggggttgcaaatattggaaagcggccaactgtagctggaaccaaaaatattttggaggtccatttatttgattttcacggatctctgtatggtcagctagtgcaggtaattttcttgcacaaacttcgagatgaagttaaattctcaagtgtggaagcgttaattacgcagattaatagtgacatcatattggcaaaggcctatttaaaacagaattggcttgatagtgtgattgattcatcgaatgatgttgcgaatggaatcaataataccgtttaa

SEQ ID NO: 59082 - protein, 328 aa, Legionella pneumophila subsp. pneumophila str. Philadelphia 1
MKLLRGSTHFAIFDKGAVATIGNFDGVHLGHQHLIKTLRAKADEMNLPLVILLFEPQPKEYFHREKAPARLSTLREKIDVLNLCQVDYIYCIKFDARLAQTPALYFAQFYLFEALKIRYLLVGQDFRFGKSREGDVNLLKTLGANYSCEVTVQSDFLIENEKISSTRIREALQQGNLRFAAKLLGRPYSMCGRVIKGDGRGRQWGIPTANLGMHRLSIPLQGVYAVQVHINSNVFYGVANIGKRPTVAGTKNILEVHLFDFHGSLYGQLVQVIFLHKLRDEVKFSSVEALITQINSDIILAKAYLKQNWLDSVIDSSNDVANGINNTV

SEQ ID NO: 59083 - DNA, 993 bp, Burkholderia pseudomallei K96243
  CDS (1)..(993): transl_table=11
gtgaaagtcttccgcggcctgcccaacgccgagagccgcgccccgtgcgcgctgacgatcggcaacttcgacggtgtccatcgcggccaccaggccctgctcgcgcgcgtgcgcgcggcggcggacgcgcgcgggctgcccgtgtgcgtgatgacgttcgagccgcatccgcgcgaattcttcaatccggcgagcgcgccgccgcgcatcgcgatgctgcgcgacaagctcgaggcgctgcgcgagcacggcgtcgaccgcgtggtcgtcgagcacttcaaccatacgttcgcgagccagtcgcccgaggcgttcgtcgaacgcacgctcgtccacgggctgcacacccgctggatcatggtcggcgacgacttctgctacggcgcgaggcgcgcgggcgatttcgcgtcgctgaaggcggcgggcgagcgcttcggcttcgaggtcgagcagatggaaacgctcgccgacgccgatggcgcgcgcatttcgagctccggcgtgcgcgccgcgctcgcggcgggagatctcgacgccgccgcgcgtgcgctcggccacggctatgcgatcagcggccacgtcgcgcacgggctgaagctcggccgcgacctcggcttcccgacgctgaacctgccgatcgctcacaagcgcccggccctgtcgggcatcttcgtcgtgcgcgtgcacggcctcgcgcccgagccgctgccgggcgtcgcgagcctcggcgtgcggccgaccgtcgacgattccggccgcgtgctgctcgaagtgcacctgctcgactggcacggcgatgcatacggcaagctcgttcgcgtcgaattcctgaagaagctgcgcgacgaggcgaaattcgtcgatctcgaaacgctctcgcgcgcgatcgcgcaggacgtcgtcgacacgcgcgcgtacttcgccgagcacggtcgcgcgccgggcagccgcgcgaccggcttcgcgacgtcggccaccgaccgaattagctga

SEQ ID NO: 59084 - protein, 330 aa, Burkholderia pseudomallei K96243
MKVFRGLPNAESRAPCALTIGNFDGVHRGHQALLARVRAAADARGLPVCVMTFEPHPREFFNPASAPPRIAMLRDKLEALREHGVDRVVVEHFNHTFASQSPEAFVERTLVHGLHTRWIMVGDDFCYGARRAGDFASLKAAGERFGFEVEQMETLADADGARISSSGVRAALAAGDLDAAARALGHGYAISGHVAHGLKLGRDLGFPTLNLPIAHKRPALSGIFVVRVHGLAPEPLPGVASLGVRPTVDDSGRVLLEVHLLDWHGDAYGKLVRVEFLKKLRDEAKFVDLETLSRAIAQDVVDTRAYFAEHGRAPGSRATGFATSATDRIS

SEQ ID NO: 59085 - DNA, 930 bp, Methylococcus capsulatus str. Bath
  CDS (1)..(930): transl_table=11
atgcgcgtcattcatggcctctccggtacgatatgccctcccgcctgcgtcgccagcatcggcaacttcgacggtgtccacctaggacatcagaccttggtccggcggctgaccgaacaaggacatcgtctcggcctgccggttgccctcgttctgttcgaaccgcagccacgtgaattcttcgaccaggatcagtcccctccccgtttgatgcggctgtcggagaaactgaccagactcgccgagctgccggtcgactgggtactgctgctgcgtttcgacgagaaactcgccactctggcgccggctgacttcgtccgtcggatactggccgaacgcctgcacgtccggcatctcatcgtcggcgacgacttccgttttggccggggccgcagcggagactatgaactgctgtgccggctcgggcggctccacggcttcgcggtgagcgacaccgaatcggtgacggtgggtggcatccgcgtcagcagcacacgggtacgggaggcgctcggacgaggcgacatggccggcgcggcgaccctgctgggccgcccctatgccctgcgcggacgcgtggtccacggtgaccagctcggccgtcggctgggctttcccaccgccaacatcgagctggggcgtgaaaacattccggtgcaaggcgtatttgccgttacaatgtcgggcatttcagccgaaccctggcctggcgtggccaacatcggcatccggccaaccgtcggcggccaccgcaaggccatgctggaaacccatttgttcgatttcgccggcgacctgtacgggcgccgggtggaaatccatctgcactacaaacttcgcgacgagatgcggttcgccaacctcgaagaactgaaggaacagatcgcctgcgatgcggctgccgcgcgcagccatttcgcggcaggctga

SEQ ID NO: 59086 - protein, 309 aa, Methylococcus capsulatus str. Bath
MRVIHGLSGTICPPACVASIGNFDGVHLGHQTLVRRLTEQGHRLGLPVALVLFEPQPREFFDQDQSPPRLMRLSEKLTRLAELPVDWVLLLRFDEKLATLAPADFVRRILAERLHVRHLIVGDDFRFGRGRSGDYELLCRLGRLHGFAVSDTESVTVGGIRVSSTRVREALGRGDMAGAATLLGRPYALRGRVVHGDQLGRRLGFPTANIELGRENIPVQGVFAVTMSGISAEPWPGVANIGIRPTVGGHRKAMLETHLFDFAGDLYGRRVEIHLHYKLRDEMRFANLEELKEQIACDAAAARSHFAAG

SEQ ID NO: 59087 - DNA, 933 bp, Silicibacter pomeroyi DSS-3
  CDS (1)..(933): transl_table=11
atgcgtatcatccgcgactacagatttcttgaacccgcagaccggggcgccagcgtcgccatcggcaatttcgacggtgtgcatatcgggcatcgctcggtgatcgagctggcccggcaggccgcacccgatgtgccgctgggggtgatgaccttcgaaccgcatccgcgcgagtatttcgcccccgacagcccgccctttcgcctgatgcgcggcccggcgcgggcgcaccggctggaaaagctgggggtcgagcggctctatgaactgcctttcaacgcagcgctcgccgggttgacgcccgaaggcttcgcacgcggggtgatctgcgacgggctgggtctgaaacatgtggtgatcggtgccgatttctgcttcggcaagggccgcagcggcaacgccgccgacatggtgcggttcgggcagcagatggggttcggcgtcaccattgcgccgctcctggagcagaccgaacgcgtgatctcgtcaaccgcgatccgtaccgcgctaagcgagggccgcccgcgcgacgccgccgcgatgctgggccattggcaccggatcgagggcgaggtgatcggcggcgagcagcgcgggcgcgaactaggctttcccactgccaatatgtcgatcgacgggctgcacccgccccggttcggcgtctatgcggtgctggtcgatgtgctcgatgggccgcacaagggcagctatcacggtgccgcctcggtgggtgtgcgaccgatgttcaacggcgagcggcccaatatcgaaacctttctgttcgacttctccggcgatctttacggcgccacgctgagcgtcgggctggttgagtatctgcgcccggagatgacctttgacgggctcgacgcccttatcgcgcagatggacgccgattgcgcccgcgcccgcgatatcctggcggcgccatga

SEQ ID NO: 59088 - protein, 310 aa, Silicibacter pomeroyi DSS-3
MRIIRDYRFLEPADRGASVAIGNFDGVHIGHRSVIELARQAAPDVPLGVMTFEPHPREYFAPDSPPFRLMRGPARAHRLEKLGVERLYELPFNAALAGLTPEGFARGVICDGLGLKHVVIGADFCFGKGRSGNAADMVRFGQQMGFGVTIAPLLEQTERVISSTAIRTALSEGRPRDAAAMLGHWHRIEGEVIGGEQRGRELGFPTANMSIDGLHPPRFGVYAVLVDVLDGPHKGSYHGAASVGVRPMFNGERPNIETFLFDFSGDLYGATLSVGLVEYLRPEMTFDGLDALIAQMDADCARARDILAAP

SEQ ID NO: 59089 - DNA, 972 bp, Staphylococcus epidermidis RP62A
  CDS (1)..(972): transl_table=11
atgaaagtgatagaagttacacatcccatacaaagtaatcaattcataactgaaaatgttgctatggcttttggtttcttcgatggtatgcatagaggtcacgacaaggtgtttcaagtgcttgatgaaaaagcaaaagagcatcaacttaaaaaggctgttatgacgtttgatccacacccctcagtcgtattaaaccctgagcgtaaacgtacaacctatcttacaccactttcagataagttagaaatgatagcagaacacggtatagactattgtatcgttatcaatttttcatcaagatttgctaatgtgacatctgacgatttcataaaaaattatattattaataatcatgttaaagaagtgattgcagggtttgatttcacctttggtaaatttggaaaaggaaatatgacggtacttcaggaatcaaaagcttttaatacgactattgtaggaaaacaagagatggattctgaaaaaatttctacaactgcaatacgccaagcgcttacagatggtcatttacagaaagcaaatgacgaattagggtatatatataggattaaaggaactgtagtacaaggtgaaaaacgtggaagaacaattggttttccaacagctaatgtgcaacccagtgatgattatgtactaccaaaaaaaggtgtttacgcagtgagtatggaaattggtccagagagtaaattacatcgtggtgtagctaacgttggagttaaaccaacattccacgatccaactagggctgagttagttattgaagtgaatatatttgattttaatgaaaatatttacggtgaacgtgtgactgtgtattggcatcactttttaagaccagaagttaaatttgatggtatcgatccattagttaaacaaatgaatgaagataaagcgcaggctaaacatttattatctattgatttcgatgatgatatatcatataatatataa

SEQ ID NO: 59090 - protein, 323 aa, Staphylococcus epidermidis RP62A
MKVIEVTHPIQSNQFITENVAMAFGFFDGMHRGHDKVFQVLDEKAKEHQLKKAVMTFDPHPSVVLNPERKRTTYLTPLSDKLEMIAEHGIDYCIVINFSSRFANVTSDDFIKNYIINNHVKEVIAGFDFTFGKFGKGNMTVLQESKAFNTTIVGKQEMDSEKISTTAIRQALTDGHLQKANDELGYIYRIKGTVVQGEKRGRTIGFPTANVQPSDDYVLPKKGVYAVSMEIGPESKLHRGVANVGVKPTFHDPTRAELVIEVNIFDFNENIYGERVTVYWHHFLRPEVKFDGIDPLVKQMNEDKAQAKHLLSIDFDDDISYNI

SEQ ID NO: 59091 - DNA, 942 bp, Bacteroides fragilis NCTC 9343
  CDS (1)..(942): transl_table=11
atgcagataatccgtaatataccgggagttctacccgaaccatgtgttgccaccatcggtttcttcgatggagtacatatggggcatcgctttctgatagaacaagtcagagagttggctgcggctcgtggattgcgttctgcactgattacttttcccattcatcctcgtaaggtgatgaatgcagactatcgtccggagttattgaccacttcggaagagaaactggcgctgcttgaagaaacgggcgtggattattgctttatgcttgattttacacgtgaagtatcacatctgactgcccatgaatttatgtccgatatcctgagagaccgttatcgggtgcagacacttgtcatcggatatgaccaccgcttcggacacaatcgtagtgaaggctttgaggattattgccgttatggctctgaaatgggaatagaggtgattcgtgctcgtgcctgtgtgtgtgatgatctccatataagctcttctgtcattcgtaagatgttgcatcagggcgaagtagatcgggctgcacgttgtctgggttacgactattttctggatggtacggtggtgagcggttatcaggtaggaaggaaaatcggattccctacggccaatctcagtgtagacgatcctgataagttggttcctgccgatggtgtctatgcagttcatgtcacgttcgacgggcatacttataatggtatgctcaatatcggtactcgtcccacgatagggaatggtcccgaacgttcgatagaagtgaatatcctccattttcattccgatatttacgataaatttatccggctctcttttgtaaaatatctccgtccggagctgaagttcgatgggattgaaggattgatagcgcagcttcatcaggatgcagccgatgtggaagcgcttttggggaaaatacaaaatgtcaattga

SEQ ID NO: 59092 - protein, 313 aa, Bacteroides fragilis NCTC 9343
MQIIRNIPGVLPEPCVATIGFFDGVHMGHRFLIEQVRELAAARGLRSALITFPIHPRKVMNADYRPELLTTSEEKLALLEETGVDYCFMLDFTREVSHLTAHEFMSDILRDRYRVQTLVIGYDHRFGHNRSEGFEDYCRYGSEMGIEVIRARACVCDDLHISSSVIRKMLHQGEVDRAARCLGYDYFLDGTVVSGYQVGRKIGFPTANLSVDDPDKLVPADGVYAVHVTFDGHTYNGMLNIGTRPTIGNGPERSIEVNILHFHSDIYDKFIRLSFVKYLRPELKFDGIEGLIAQLHQDAADVEALLGKIQNVN

SEQ ID NO: 59093 - DNA, 1044 bp, Psychrobacter arcticus 273-4
  CDS (1)..(1044): transl_table=11
atgaacacctattttcttgagcaactgatggcgtcttcagacgcttcgcctacccataccaacccagtagctttagcaccctgtgtgctgactattggcaatttcgatggcgtgcatttgggtcatcaagccatgctcgctcaagtgcgcgaacttgcaaaggctcgtaaacttaactctgccgttatgatatttgagccacagccaagagagttctttgcgccagcggctgctcctgcccgcttaaccaaccttgccgaaaagcaagctttgctagcagaatacggggttgagaccttgattgtggcaggttttgacaacgaatttcgctcattatcagcgcaggcatttgcagatatcttagcgaggcgactgaatgtgcaagccttggtattgggtgatgacttcaaatttggtcatgatcgtaccggtgacagtcagtttttgcgtgattatgggctacatgtgaccaatctgcacaccgtcaatgacgatagtcataaagcggcgcgcatcagctctactcgtatccgtgatttattgttggcaggtgacatcaacgctgccaacgctttattgggtcgagattatgccattactggtacggtcgttggcggtgataaaattggtcgcaccatggatttcccaaccgccaatattgacttagagcgcatgaaacctgctttacacggcatctttgcagtcgatgtcgtcagccttgatcaggatggcaatgttataccagacggtttatacaaacgtgcagataataaccataaaggtataacaggtttgcgagcacatagcctgtttggtactgccaatatcggcaccagaccttctgtcgacaaaacccatgagtggcgtttagaagtgcattttccagaactgcaagccgacttatatggttcaaccttgcaggtgcgttttttgcattacttgcatggtgaacgccattacgaaagtttggatgcgctaaaagaaggtattcatcatgatgtacaagaattgattgaatggcgcgcaaagcaaacggacggttaa

SEQ ID NO: 59094 - protein, 347 aa, Psychrobacter arcticus 273-4
MNTYFLEQLMASSDASPTHTNPVALAPCVLTIGNFDGVHLGHQAMLAQVRELAKARKLNSAVMIFEPQPREFFAPAAAPARLTNLAEKQALLAEYGVETLIVAGFDNEFRSLSAQAFADILARRLNVQALVLGDDFKFGHDRTGDSQFLRDYGLHVTNLHTVNDDSHKAARISSTRIRDLLLAGDINAANALLGRDYAITGTVVGGDKIGRTMDFPTANIDLERMKPALHGIFAVDVVSLDQDGNVIPDGLYKRADNNHKGITGLRAHSLFGTANIGTRPSVDKTHEWRLEVHFPELQADLYGSTLQVRFLHYLHGERHYESLDALKEGIHHDVQELIEWRAKQTDG

SEQ ID NO: 59095 - DNA, 921 bp, Colwellia psychrerythraea 34H
  CDS (1)..(921): transl_table=11
atgcagttagttcgcggaatacataatattcaattaaatgatcatagttgtgtgttaactattggtaattttgatggtgttcatttaggacatcagcaagtgattaaggcgttggtaagtaaagcgaaagctttgaattgtgtggctgcagtgttagtttttgaaccacaaccacaagagcttttttcaccagaaacagcacctgctagattatgccgtctacgcgataaatataatttattagcaaaacttggtgtgcagcgacttatttgtgtcaattttaccgctaaatttgctaatcaaagcgctaaacattttatagaaaatttgttggtagctaaattaggaataaagcatcttatcgtcggcgatgatttccattttggtaagaatcgaaccggtaacttttctatgttacgtcaagcaggagaaaagtttggcttcgatgtttcagataccgcaagttataaaatggcggattgccgcattagttcaaccgctattcgtcaagcattagaacaagatgatttagtgtcagttaaacagatgctaggcagagaatattcgataattggtcgcgtgttccatggtgacaagcgaggtcgacagttaggctttccaaccgctaatgtcttacttaaaaggcgtgtttctccccttagtggtgtttttgctgtgatggtaaaaacaaatgatggtgaatttaaaggggttgcaaatattggtgctaggccaacagttaacggcattaggcaacaattagaagtacatatttttgattttgatgaaaatctctatgggcaatgcattgaagtggtcgttaagagaaaactacgcccagtgattaagtttgacagccttgaagcgcttaccgcgcaaattcgtcaagacagtgaacaagcaaaacaagtattagcttaa

SEQ ID NO: 59096 - protein, 306 aa, Colwellia psychrerythraea 34H
MQLVRGIHNIQLNDHSCVLTIGNFDGVHLGHQQVIKALVSKAKALNCVAAVLVFEPQPQELFSPETAPARLCRLRDKYNLLAKLGVQRLICVNFTAKFANQSAKHFIENLLVAKLGIKHLIVGDDFHFGKNRTGNFSMLRQAGEKFGFDVSDTASYKMADCRISSTAIRQALEQDDLVSVKQMLGREYSIIGRVFHGDKRGRQLGFPTANVLLKRRVSPLSGVFAVMVKTNDGEFKGVANIGARPTVNGIRQQLEVHIFDFDENLYGQCIEVVVKRKLRPVIKFDSLEALTAQIRQDSEQAKQVLA

SEQ ID NO: 59097 - DNA, 921 bp, Dechloromonas aromatica RCB
  CDS (1)..(921): transl_table=11
atgcgcgtctttcgcggtcattcgcgtcccgttgtagcccccgtcgtgctcgccatcggaaatttcgatggggttcacctggggcatgccgcgttgatcaggcggctggccgaggtggcagaaaactgccagttggcacccatggtgctgaccttcgagccacatccgcgcgagttctttgcacctgaatcggcgccggcccgtctgagcaccttgcgcgaaaagctcgaattgctcggtgattccggtgtttcgcaggtcatgatctgccccttcaatggagcgttttccgccctttcggccgaagaattcatcgagcaggtgctggtgcgcggctgccaggttcggcatttgatcatcggcgacgattttcgttttggacgaggacgtactggcgatttcgccttgctgcaagaagcggggcagcgtttcggcttcaccgttgaagccatgggcagcgtaacggttgccggtgagcgggtgtccagttcggctgtgcgcaaggcgctggccatcggcgacatggagcatgcggccctgttgctggggcgcccttacatcatcgacggtcaggtatcgcatggccaaaagctggggcgtcaactcggcttcgccacagccaacctgcgcatcaagcacaacccacttccgatgagcggcgtcttcgcagtcgaagtcagcgggctgggtgagcaagcgttgcccggcgtggccaatcttggcatccggccaacggtgggcggcacgcgccccttgctagaagtgcatctgttcgatttcgatcgcgacatctacggcgcccatatttcggttcgttttgtgcataaactgcgcaacgagcaacggtttcccaattttgatgccctcaaggcgcagatcgcggcagacgccgcggccgcccgggccttcttctcgctgtga

SEQ ID NO: 59098 - protein, 306 aa, Dechloromonas aromatica RCB
MRVFRGHSRPVVAPVVLAIGNFDGVHLGHAALIRRLAEVAENCQLAPMVLTFEPHPREFFAPESAPARLSTLREKLELLGDSGVSQVMICPFNGAFSALSAEEFIEQVLVRGCQVRHLIIGDDFRFGRGRTGDFALLQEAGQRFGFTVEAMGSVTVAGERVSSSAVRKALAIGDMEHAALLLGRPYIIDGQVSHGQKLGRQLGFATANLRIKHNPLPMSGVFAVEVSGLGEQALPGVANLGIRPTVGGTRPLLEVHLFDFDRDIYGAHISVRFVHKLRNEQRFPNFDALKAQIAADAAAARAFFSL

SEQ ID NO: 59099 - DNA, 1059 bp, Anabaena variabilis ATCC 29413
  CDS (1)..(1059): transl_table=11
gtgtgggttgcttctacaactgaaatggttctcacgccaacggctgttgctcttggtaagtttgatggagtgcatcttggccatcaaagggtcattcaaccagttttgcagtcaactaggagcgcacaaacatggggagatgcactagactcatcagcccaatcagcgaaccctccagcagcaccacaagaacggatatactccacagttgtcacttttcgtcctcatccccaagagttttttacaggacaagcccgtacttggttaactcctctagatgaaaaagtacaacaattgcgatcgcttggggtagatcaactagtactactaccctttgacaaagaattaactgccttgtcaccggaagagtttgtcgaaaaaattcttgtgcaacaactacgctgtcaacgaattagcgtcgggcaagatttttgttttggcaaacaacgccgtggtactgccagggacttgcagttaattgcagccaaataccatatccctgttagcatagttcctttacaaacttctgatgggcagtttcttgaagacggcaactgtggtagctttgagtctctagaatatgctcctattagtacttcattaattcgccaagctctagaaaccggtgatatcaaaactgccaatcaattcttaggaagaccctacattctcatgggcgtagtcgttgaaggcgaacaacttggtagaaccattggttttcctacagccaacttggaactaccaaaagataaatttatcccccgtcaaggagtttacgccgtccgtgtcaaaattctcggtgagagcgcagatgctaatgtaccaccggaaattttgggggtgatgaatattggcaaccgccccacagttaatggtacttattcatcggtagaagtgcatcttctagattggtctggggatttatatggcaaggaaatagtagtgcagttagtggactttctgcgaccagaacaaaaatttccctctctagaagccttaaaagcgcaaattcaacaagactccactgtcgctagacaaattttgtcaagggagaattga

SEQ ID NO: 59100 - protein, 352 aa, Anabaena variabilis ATCC 29413
MWVASTTEMVLTPTAVALGKFDGVHLGHQRVIQPVLQSTRSAQTWGDALDSSAQSANPPAAPQERIYSTVVTFRPHPQEFFTGQARTWLTPLDEKVQQLRSLGVDQLVLLPFDKELTALSPEEFVEKILVQQLRCQRISVGQDFCFGKQRRGTARDLQLIAAKYHIPVSIVPLQTSDGQFLEDGNCGSFESLEYAPISTSLIRQALETGDIKTANQFLGRPYILMGVVVEGEQLGRTIGFPTANLELPKDKFIPRQGVYAVRVKILGESADANVPPEILGVMNIGNRPTVNGTYSSVEVHLLDWSGDLYGKEIVVQLVDFLRPEQKFPSLEALKAQIQQDSTVARQILSREN

SEQ ID NO: 59101 - DNA, 945 bp, Desulfovibrio desulfuricans G20
  CDS (1)..(945): transl_table=11
atgcagatcgcaagacagcttcaggaaataacccttgatctttccggcgggtcgtgtgtcaccatcggcaattttgacggtgtgcacaacggccaccgcaagcttataggccgcatgatggccaaagccgccaaggcttcgttgccgggtgtggtggtcacgttctgtccgcatccgctaagggtgcttgtgggcccgcatacccccccgttcattactgattatgaaaaaaaacttgacctgctggaagcgctgggggttgatctgacccttatgctgcagttcacgcgggaactggcggcgctggagcctgaagaatttgtgcgcagtattctggtggacggcctgaatgtgaaggagctggtcgtagggtacgattactcctttggcaaagggcgcaagggacactttgagctgctggtggaactgggagaaaaatacggcttttcatgtgagcggctggaccctgtcatcatcgacggtgccgtggtaagttccacgcgcatacgtgatatgattaaggccggtgatgtatggggagtgcggcctctcatggacaggttctatgtggtgcggggcactgttgtgcacggtaaaaaacgcggaggccggctgctgggttttcccacggccaaccttgaggtgagggacgagcttgttccgggaccgggcgtatacgccgtgtgggttgaagtggacggcaacctgtacaagggtgtcaccaatatcgggtacaatcccacattcggcaacgagacgctgagtgtggaaacatatattatggattttgaccgcgacatctacggatgggagctgcggttgaattttgtgcacaggctgcgggatgaacgcaagttttcgggtcttgacgatctgatgacgcagattcgcagcgatgtggaactggggcggcagatactggattctcaggaagccggactgtag

SEQ ID NO: 59102 - protein, 314 aa, Desulfovibrio desulfuricans G20
MQIARQLQEITLDLSGGSCVTIGNFDGVHNGHRKLIGRMMAKAAKASLPGVVVTFCPHPLRVLVGPHTPPFITDYEKKLDLLEALGVDLTLMLQFTRELAALEPEEFVRSILVDGLNVKELVVGYDYSFGKGRKGHFELLVELGEKYGFSCERLDPVIIDGAVVSSTRIRDMIKAGDVWGVRPLMDRFYVVRGTVVHGKKRGGRLLGFPTANLEVRDELVPGPGVYAVWVEVDGNLYKGVTNIGYNPTFGNETLSVETYIMDFDRDIYGWELRLNFVHRLRDERKFSGLDDLMTQIRSDVELGRQILDSQEAGL

SEQ ID NO: 59103 - DNA, 948 bp, Synechococcus elongatus PCC 7942
  CDS (1)..(948): transl_table=11
gtgagaattcttgatgacctagacccagtttctggtcccactgcgatcgcgctgggcaactttgatggcatccacctagggcatcagcaagtcatcgcgccggttcgggcagctcatcgcagccatcccgactggatgccgtcggtggtgaccttcaacccccacccccaagctttcttctccggcgatcgcctgccctccattacccccgttgctgaaaaggcagaactgctgcaagggttgggcatcgaacagttggtcttgctgcccttcacccgcgagctggccaacctgacgcccgaacagtttgtctcagaggtattggttcaacacctccaagcgaggcaaattagcgttggccaagattttcggtttgggcgaggacggagcggctcggcgcaggatctgcaagcgattgcccagggccgaggtattcccaccacgatcgtgccgctgtttaagcaccgtgacttgcgggtcagcagctctgcgattcgcaaagccctcgaccaaggtcagcctgagctggcagcggcttggttaggacgcccctatcgcctgaccggttgtgtgattctgggacagcagctcggacggcaattggggacaccaactgccaatctccagcttccggccgataagttgttgccccgttggggagtctatgctggccgcgctcatctacccgagcaaggactgcacaatttacccgccgtgctgaatgtcggtcagcgacccaccgtaactggcgatcgtagcgtcagtgtcgaagtccatcttctggactggcagggcgattgctacggtcagctgctgcaggttgatctgctgcactttttgcgacctgaacagaaatttgactcgctcagtgctttgacgcagcaaattcagcaagactgtcgcttggcgcgatcgcagcttgcaacagagtcatcgagcttggcttga

SEQ ID NO: 59104 - protein, 315 aa, Synechococcus elongatus PCC 7942
MRILDDLDPVSGPTAIALGNFDGIHLGHQQVIAPVRAAHRSHPDWMPSVVTFNPHPQAFFSGDRLPSITPVAEKAELLQGLGIEQLVLLPFTRELANLTPEQFVSEVLVQHLQARQISVGQDFRFGRGRSGSAQDLQAIAQGRGIPTTIVPLFKHRDLRVSSSAIRKALDQGQPELAAAWLGRPYRLTGCVILGQQLGRQLGTPTANLQLPADKLLPRWGVYAGRAHLPEQGLHNLPAVLNVGQRPTVTGDRSVSVEVHLLDWQGDCYGQLLQVDLLHFLRPEQKFDSLSALTQQIQQDCRLARSQLATESSSLA

SEQ ID NO: 59105 - DNA, 954 bp, Rhodospirillum rubrum ATCC 11170
  CDS (1)..(954): transl_table=11
atgcgtatccttcgccatccctacgagctacccgcctccctgctcgggggctcgctggccttgggcaatttcgacggcgtccaccgtggccatcagcgggtcatcggctcggcccgggccatcgccgcccagcagggcctgccccttggcgtcatgaccttcgccccccatccacggcgcttcttccagcccgacctgccgcccttcaccctgacctccttccgcctgaaggcccatctgatcagcgaggaaggcgccgatttcctttatgtccaggccttcgacgaggcgctgtccaagggctcggccgaatggttcgtcaccgaggtgctggtcaagggcctgcatgtcgcccatgtcgtcgtcggccaggattacgcctttggccaccgccgccagggcacggtcagcctgttgcagaagatggcgcttgatctcggctttggcgtcaccgccgtcgccccggtcaaggacgagggcggcgccatctattcctcgacccgggtgcgcgcctgcctgcaagagggcgacgtcaccaccgcggcgcaaattctgggccatccctgggaggtcgaaggccgggtcgagcatggcgacaagcgcggacggaccatcggcttccccaccgccaacctgaagcttggcgactatcagcggccgcgcgccggcgtctatgcggtcaccgccgggcttgatgacggcgcccagacccgctttcgcccaggcgtggccaacttcggccgccgcccgacgtttgataacggcgacgccctgcttgaagtccatttgttcgatgtcagccctgatctctacggccgccacctgcgggtgcgcttccacgacttcctgcgccccgaacagaccttcccgggccttgaggccctgaaggcccagatcggccaggacgccgcccaagcccgcgccctgttcggactcccccccgccgccccttaa

SEQ ID NO: 59106 - protein, 317 aa, Rhodospirillum rubrum ATCC 11170
MRILRHPYELPASLLGGSLALGNFDGVHRGHQRVIGSARAIAAQQGLPLGVMTFAPHPRRFFQPDLPPFTLTSFRLKAHLISEEGADFLYVQAFDEALSKGSAEWFVTEVLVKGLHVAHVVVGQDYAFGHRRQGTVSLLQKMALDLGFGVTAVAPVKDEGGAIYSSTRVRACLQEGDVTTAAQILGHPWEVEGRVEHGDKRGRTIGFPTANLKLGDYQRPRAGVYAVTAGLDDGAQTRFRPGVANFGRRPTFDNGDALLEVHLFDVSPDLYGRHLRVRFHDFLRPEQTFPGLEALKAQIGQDAAQARALFGLPPAAP

SEQ ID NO: 59107 - DNA, 963 bp, Moorella thermoacetica ATCC 39073
  CDS (1)..(963): transl_table=11
atgcaggtctggcagggactgcccgccgaaagggcgatgaatggttgcaatctggccctggggaattttgacggcgtccaccggggtcaccagcacttaataggcagtgttgtccagaaatcccgctccggagggggcgagggggtggttattaccttcgtcccccacccggcccgggttcttgaaggtagcccgccagggttgttgacaaccacgaaacggaaaattgaacttattggccagctgggtatagaccacctgtttttattaccctttaccccctccctggcagccttggaaccggaggcctttgtacgggagattttatgggctcatttccatcccagtctggtggcggtgggctttaactttacctttggccacaggggagcaggcacgccggccctcctccggcgcctgggggaggagttgggctttaaggttgaagtgatggggccggtaaccttgcggggtctcaccgtcagtagcacggccatccgtaatgccctggaaaatggtgacatcggcctggcgcgggatctcctcggttactggccggtcctggctggcagggttgttgccggcgatcagcgcggcaggcaactgggtttccctactgccaacctggccgtacccccggagttgaagttgcctgcctacggcgtttatgcctgcttagcctccttccggggccggaaatggcaggcagtggtaaacataggccgacggccaaccttcggctcggccctgccggcgaccattgaagcccatttactggattttagcggcaatctttacaatgaagaaatggaattggaattccgggctttcctccgccaggagcggaaattcgccagccccggggagttaaaggcccaaatggaggctgatcgggaacaggcccgtaacatactgggaggacatcggttttcaattcttgagcagagggaccggcaggcgtaa

SEQ ID NO: 59108 - protein, 320 aa, Moorella thermoacetica ATCC 39073
MQVWQGLPAERAMNGCNLALGNFDGVHRGHQHLIGSVVQKSRSGGGEGVVITFVPHPARVLEGSPPGLLTTTKRKIELIGQLGIDHLFLLPFTPSLAALEPEAFVREILWAHFHPSLVAVGFNFTFGHRGAGTPALLRRLGEELGFKVEVMGPVTLRGLTVSSTAIRNALENGDIGLARDLLGYWPVLAGRVVAGDQRGRQLGFPTANLAVPPELKLPAYGVYACLASFRGRKWQAVVNIGRRPTFGSALPATIEAHLLDFSGNLYNEEMELEFRAFLRQERKFASPGELKAQMEADREQARNILGGHRFSILEQRDRQA

SEQ ID NO: 59109 - DNA, 978 bp, Saccharophagus degradans 2-40
  CDS (1)..(978): transl_table=11
atgacctcccaccaatttgcctgtggccgctttaaacaagcgcaatttttgccaccgtttgatgctactcacaaggcttgtgtggtaaccattggctcgttcgatggggtgcatttggggcatcagcagctattgcagcaagtggttgctcaggcggcgcacttgcagctaccttcggtagtgattgtttttgaaccgcaacctcacgagttcttttcgaaagaaaacgcccccgcacgcttaatgcgcctgcgcgagaaggtgcaggccctgtttgctgcgggggtagataaggtgttgtgtttaaggtttaaccagcagcttcgcaatctaacggcgaatgattttgtggaacaggtgctggtaaaggggctaggggttaaataccttgtagtaggggacgattttaagtttggctgtgatcgcagtggcgactttgcagccttacagcagcagggcgagaaacacggttttagcgtggtagacacgcaaacccagctagcgactaccgaacacgatggtaccgatagaattagtagtacgcgcatacgtgcgttgctagaaaccgataagtttgatcaagccgctgcattattgggcgcgccttttagcgttgctgggcgggttgtatacggcaaacagttgggccgaaccctggggtttcctacggcaaacattggtttggggcgttatcgttcgccggtaaatggtgtgtatggcgtagtgctaatcgccaatgaccagcgctacaacgcggtagcgaatgttggggtaaggcctaccctgggtgggcgcaataaaccaattttagaagtacatgcacttacgcctaccggcaatttgtatggcgagtttgtgcgggttgaatttaaattcaaaattcgccaagaaatgaaatttacttcgttagatgctttaaaaaatcaaatagctgacgatgtgagcacagcgaaacgttattttcaatctaacgattaa

SEQ ID NO: 59110 - protein, 325 aa, Saccharophagus degradans 2-40
MTSHQFACGRFKQAQFLPPFDATHKACVVTIGSFDGVHLGHQQLLQQVVAQAAHLQLPSVVIVFEPQPHEFFSKENAPARLMRLREKVQALFAAGVDKVLCLRFNQQLRNLTANDFVEQVLVKGLGVKYLVVGDDFKFGCDRSGDFAALQQQGEKHGFSVVDTQTQLATTEHDGTDRISSTRIRALLETDKFDQAAALLGAPFSVAGRVVYGKQLGRTLGFPTANIGLGRYRSPVNGVYGVVLIANDQRYNAVANVGVRPTLGGRNKPILEVHALTPTGNLYGEFVRVEFKFKIRQEMKFTSLDALKNQIADDVSTAKRYFQSND

SEQ ID NO: 59111 - DNA, 921 bp, Methylobacillus flagellatus KT
  CDS (1)..(921): transl_table=11
atgcaggtatttcgtcatttccaccaggctgcccatcatccgcttgcggttgctattggaaatttcgatggcgtgcacctgggccaccaggcattgttgcgtcgcctgatcgaggtggcgtctgcacaaggactgaagtcggcagtcatgactttcgagccgcatccgcgggagtttttcgcgcctgacaaggcgcctgcaaggctgacttcgttgcgtgagaagttggagttgtttgcggaagctggtgtcgattatgtctatgtctgtcatttcaaccgccgtttcgccgccatcacggtggaagccttcatgcaggacatcctacgcaatgcgctggatgcccggactatcctggtgggagaggacttccgttttggtgccgggcgccagggcagtatggaggattttgcacgcgcaggattcaatctgcaaagccagccgcaggtcaacctggacggcaagcgtgtttccagcaccgccatccgcgaggcgctggcgaaggggcagctcgatgaagctgcgcgcctgctggggcgcccctacagtatcagcggcaaggtggtgcatggcgacaagcttgcacgcgagcttggctatcctacggcgaatattcacatgctgcatgataggccgccgcttttcggcatctatgcggtaaaattggaaggtttggccgagggcggcgattggccgggtgtagctagcctcggtgtgcgacctaccgtaaagcaggatggcaagccgacgctggaggcgcacctgtttgatttcagcggcgatatctatggccgtcatgtacgcgtgaaattcatgcacaaaatacgcgatgaaatgaaattcgacagcctggaaacattgaagtactggattgccagggatgccgagatggcgcgtgagtattttcgtgccaatccctga

SEQ ID NO: 59112 - protein, 306 aa, Methylobacillus flagellatus KT
MQVFRHFHQAAHHPLAVAIGNFDGVHLGHQALLRRLIEVASAQGLKSAVMTFEPHPREFFAPDKAPARLTSLREKLELFAEAGVDYVYVCHFNRRFAAITVEAFMQDILRNALDARTILVGEDFRFGAGRQGSMEDFARAGFNLQSQPQVNLDGKRVSSTAIREALAKGQLDEAARLLGRPYSISGKVVHGDKLARELGYPTANIHMLHDRPPLFGIYAVKLEGLAEGGDWPGVASLGVRPTVKQDGKPTLEAHLFDFSGDIYGRHVRVKFMHKIRDEMKFDSLETLKYWIARDAEMAREYFRANP

SEQ ID NO: 59113 - DNA, 945 bp, Haemophilus somnus 129PT
  CDS (1)..(945): transl_table=11
atgcaacttattcgtggttttcataatttacccgagcctttaaaacagcagggttgtgctgtaactattggtaattttgatggtgttcatttagggcatcaatctattttgcaacatttaaaagcgaaagcaaaacaactgaatttgcccgttgtagtgatgttatttgaacctcaaccttatgagtattttcaaggtgatcaggcaccggcaaggcttatgcgtttacgagataaactcgcctatctggcacagttaggtgtagattatgttttctgcgttaaattcaaccgcacttttgcccaattaagtgcggagcaatttatttcagattgtttagtgaaacatctgaagatgaagtttttaagcattggtgatgactttcggtttggtttaaatcgagaaggcgactttcgacttctgcaaaaaaaagggcaacaacaaagctttatagtggaagataatcgaagtttacaattaaatgaccagcgtattagtagcaccgccattcgccaagccttatcagaagataatttagcgttggcagaaaagttactgggtaagccatatcgtatttatggacgagttgctcatggcaataaattaggacgaactattggttttcccactgcaaacatttatttacatcggcaagttaatccaattaaaggtgtatacgttgtaaaagtgcggttaaaaaatggcgatatttttcaaggagttgccaacattggcaagcgacctactatcaatggcgtaaaacaattattggaagtgcatttgtttaactttgatcgtgatttgtatggtcaatccttacaaattgaattttgccataaaattcgccatgaaaaaaaatttccttctctaaatgcccttaaaaatcagattgaaaatgatgttgttgtggcaaaaaagtattttcagcaagtcttgaacctttga

SEQ ID NO: 59114 - protein, 314 aa, Haemophilus somnus 129PT
MQLIRGFHNLPEPLKQQGCAVTIGNFDGVHLGHQSILQHLKAKAKQLNLPVVVMLFEPQPYEYFQGDQAPARLMRLRDKLAYLAQLGVDYVFCVKFNRTFAQLSAEQFISDCLVKHLKMKFLSIGDDFRFGLNREGDFRLLQKKGQQQSFIVEDNRSLQLNDQRISSTAIRQALSEDNLALAEKLLGKPYRIYGRVAHGNKLGRTIGFPTANIYLHRQVNPIKGVYVVKVRLKNGDIFQGVANIGKRPTINGVKQLLEVHLFNFDRDLYGQSLQIEFCHKIRHEKKFPSLNALKNQIENDVVVAKKYFQQVLNL

SEQ ID NO: 59115 - DNA, 1107 bp, Trichodesmium erythraeum IMS101
  CDS (1)..(1107): transl_table=11
gtgtggataacttcttctttagctacagctctaactccaacagcagttgccttaggaaactttgatggtttacatcaaggacataggcaagtaatagaaccaattttaaacttaaagggtagatcaaagttactttctgtttgtccatcagaattgacaagaactacagaagtagatgaagatacaaagcttaaattatggcatcaagattcaaaattatcatcatggcattttgaaaatgaattgggaaaaaatgatgattacctaaggcaaaaaatttattccactgttgttacttttaatcctcatccacaagagttttttagtggaaaaccaaaaaaattgttagctccactagaagaaaaattggcaatatttaaacatatcggagttgaacaagtagtattattgccatttgatcgaaatttggccgatctaactcctaataaatttgtagaagaaattttagtaaaaggcttacaagtacatcaaataagcgtggggtgtgatttttgttttggacaaaaaagagcaggaaaggccaaagatttgcaggcgatcgctggttactatgatatagatgtaacaactgtacctctatatcatagtgaaaatggagagcgtattagtagttctataattcgtcaagctttagaaaaaggagatctagataaatcaaatcgtttattaggtcgtccttacagtttaattggtgaagtggtgcatggacaacaactaggtagaactttaggatttcctacagcaaatcttcagctagcagcacaaaaattcttgcctcgttttggggtttatgctgtggaagtctatctttctcgacaaaaacaacctcaagaaatacttcatgctgagagcccctatttaggagtaatgaacgttggttgccgccctacattaaatagtttagatccaactgttgaagttcacctattagatatgtctcaagatttatatggtcaaactttaactgtaaatttgatagagtttttgcgacctgaacaaaaattcgcttctctagatttactgaaagctcaaatatatgaagattgtagaattgctagaagtatacttaaaaatcaaactatataa

SEQ ID NO: 59116 - protein, 368 aa, Trichodesmium erythraeum IMS101
MWITSSLATALTPTAVALGNFDGLHQGHRQVIEPILNLKGRSKLLSVCPSELTRTTEVDEDTKLKLWHQDSKLSSWHFENELGKNDDYLRQKIYSTVVTFNPHPQEFFSGKPKKLLAPLEEKLAIFKHIGVEQVVLLPFDRNLADLTPNKFVEEILVKGLQVHQISVGCDFCFGQKRAGKAKDLQAIAGYYDIDVTTVPLYHSENGERISSSIIRQALEKGDLDKSNRLLGRPYSLIGEVVHGQQLGRTLGFPTANLQLAAQKFLPRFGVYAVEVYLSRQKQPQEILHAESPYLGVMNVGCRPTLNSLDPTVEVHLLDMSQDLYGQTLTVNLIEFLRPEQKFASLDLLKAQIYEDCRIARSILKNQTI

SEQ ID NO: 59117 - DNA, 936 bp, Shewanella sp. MR-7
  CDS (1)..(936): transl_table=11
atggaattaatccgcggtatacataacattttgtcatctcaccatggctgtgtgctgacgataggtaattttgatggcgtgcatcgcggccatgcacaggtggttgccaatctggtgcaaaaggccaagcagctctcattacctccgacagtgatgacatttgagcctcaaccacaggagttattccgtggtgagaatgcgcccgcgcgtctgagcttactgcgggataaaatcatcctgttagatgagttaggcgttgaacggttagtgtgtgttaacttcaaccgtgcctttgctgatcaaccggcggagcatttcatcgaagaactgttggtgcgcaagctcggggtgaaatacctcgtcgttggcgatgacttttgcttcggtcaaggccgaaaaggcaattttgaaatgctgatgcaggcgggagctcgttatggctttaccgtggttagcactcaaagttttatggtgggctcgcaacgtgtgagttcgaccgcggtaagagaacaattggctaaagggaacctagagcaggcgagacgcctactcggtcatccctttaccttaagcggtcgcgtggcccatggccaaaaaattggccgaaccataggttttcccaccgccaatattgccctcaaacgcaatgtggtgcccgtgcgcggggtgtttgcggtgaaactctattgggatgagagcgatatttatgaaggggttgccaacattggtttccgcccgaccgtaaatggtcaagtttgtcagctcgaggtgcatctttttgattttgaaggtgacatttatggcaagcatgttgaggttgagttagtggcaaaacttcgcgatgaacaaccctttgattcattggatgcactaaaacaacagattttgaatgatgcaaatgaggccagagctttatttggtaacgatgcaggctga

SEQ ID NO: 59118 - protein, 311 aa, Shewanella sp. MR-7
MELIRGIHNILSSHHGCVLTIGNFDGVHRGHAQVVANLVQKAKQLSLPPTVMTFEPQPQELFRGENAPARLSLLRDKIILLDELGVERLVCVNFNRAFADQPAEHFIEELLVRKLGVKYLVVGDDFCFGQGRKGNFEMLMQAGARYGFTVVSTQSFMVGSQRVSSTAVREQLAKGNLEQARRLLGHPFTLSGRVAHGQKIGRTIGFPTANIALKRNVVPVRGVFAVKLYWDESDIYEGVANIGFRPTVNGQVCQLEVHLFDFEGDIYGKHVEVELVAKLRDEQPFDSLDALKQQILNDANEARALFGNDAG

SEQ ID NO: 59119 - DNA, 969 bp, Alkalilimnicola ehrlichei MLHE-1
  CDS (1)..(969): transl_table=11
atggaactggtacgcggcctccacaatctgcagccccgccaccgcgggtgcgcgctgaccatcggcaatttcgatggcgtgcacttaggccatcaggccatgctcgacaccctggggcttgcggcgcagcgcttgggtgtaccgccgctgctgcttaccttcgagccgcacccgctggaggccctgcgcccggagcaggcgcccacgcgcatcacccccctgcgcgacaagctcgcggcgttggccgagaccccgctgcagcgggtggtggtggcacgcttcggcgcggccctcgccggcatgtcggcagaggccttcgtcgacgagctgctgatcggccggttgggcgtgcgccacctgctgatcggtgacgacttccgcttcggccgcgcccgccggggcgattatgccatgctggccgaggcctcgcgccggcacggcttcgagctggaccgcctggagaccctggccaccgaggacggtgagcgcatcagcagcacccgcgtacgtgccgccctggctgccggtgacctgggtgaggccgaggacctcctgggccgcccgtacaccctctccggccgggtggtgcggggtgatgccatcggccggcggcttggcttccgcaccgccaacatcgcctttcgcgccaaccagcggccggccctggggggcatcttcaccgtgagtgtggagggcgtggccgaccggccgctgcccggggtggccaatgtcgggacccgcccggcggtggggggcaaacggcacctgctggaggtgcatttgctggactggcaaggcagactatacggctgccatctgcaagtgcgattcctccagcggctgcgcgaggagtggcatttcgactcgctggatgcgctcagcgcccagatcggccgggacgtggaccaagcccgggccctgttcaatgacaaccctctttccgatccgaccccaaggaccgcgacgtga

SEQ ID NO: 59120 - protein, 322 aa, Alkalilimnicola ehrlichei MLHE-1
MELVRGLHNLQPRHRGCALTIGNFDGVHLGHQAMLDTLGLAAQRLGVPPLLLTFEPHPLEALRPEQAPTRITPLRDKLAALAETPLQRVVVARFGAALAGMSAEAFVDELLIGRLGVRHLLIGDDFRFGRARRGDYAMLAEASRRHGFELDRLETLATEDGERISSTRVRAALAAGDLGEAEDLLGRPYTLSGRVVRGDAIGRRLGFRTANIAFRANQRPALGGIFTVSVEGVADRPLPGVANVGTRPAVGGKRHLLEVHLLDWQGRLYGCHLQVRFLQRLREEWHFDSLDALSAQIGRDVDQARALFNDNPLSDPTPRTAT

SEQ ID NO: 59121 - DNA, 927 bp, Hyphomonas neptunium ATCC 15444
  CDS (1)..(927): transl_table=11
atggccgtctatgccgaatatcgcgggctgccccaggcggcgcggggcgcgtcgattgcgctgggtaatttcgatggcctgcatgccggccaccgcgccgtcatggacgccgcccgcacggccgggcatggcaaattctcggtcgcgacgtttgagccgcccccgcgcgcctatttccgccccggcgatccgcccttccgcatcctgcggccggaacggcgcaacgcgctgatcctcaaagcgggcgcagacacggtgttcgagctgccatttaacggcgagatggcggcgatgacggatgaacagttcgttcgccaggtgctggtggacgggctcggcgtatcgcacatctcggtgggtttcgatttccgctttggccgcggccgcatgggccatgcccagcgcctcgccagccttggccgcgcgctcggctttggcgtgaccatcgttgaggaagtctccggccacggcgccaaggcctcctccaccgccatccgccaggccctgatggccggcgagccggatgtggccgcagagctgctcggcagcccctggattgccgatggcattatcgagccgggcgagcagaacgggcgcaccttcggcttccccaccgccaatatggcgctcggcgatctcatccatcccaagatgggcgtctatgcggtccgcctgcggatcgagggcgaggatgtgtggcgcgacggcgtggccaatttcggccgcacgcccaccaccggcctgcgcgacccgctgctggaaaccttcatcttcgactttgaccgcgagatttatggcgagcgggtcgaagtccagctcatcgcctatcagcgcccggaactgaaattcccgtcgctggacgcgatgatcgagcagatgcaccgggatgcggccaaggcaaaagacatcctcgcggcgcgccgctag

SEQ ID NO: 59122 - protein, 308 aa, Hyphomonas neptunium ATCC 15444
MAVYAEYRGLPQAARGASIALGNFDGLHAGHRAVMDAARTAGHGKFSVATFEPPPRAYFRPGDPPFRILRPERRNALILKAGADTVFELPFNGEMAAMTDEQFVRQVLVDGLGVSHISVGFDFRFGRGRMGHAQRLASLGRALGFGVTIVEEVSGHGAKASSTAIRQALMAGEPDVAAELLGSPWIADGIIEPGEQNGRTFGFPTANMALGDLIHPKMGVYAVRLRIEGEDVWRDGVANFGRTPTTGLRDPLLETFIFDFDREIYGERVEVQLIAYQRPELKFPSLDAMIEQMHRDAAKAKDILAARR

SEQ ID NO: 59123 - DNA, 939 bp, Pseudomonas aeruginosa UCBPP-PA14
  CDS (1)..(939): transl_table=11
atgcagctgcttcgcggactacacaacctgcagcccctggccgggggctgcgtcgccaccatcggtaacttcgacggcgtccacctcgggcaccaggctatcctggcgcgtctgcgcgagcgctcgctggagctgggcgtacccagctgcgtggtgattttcgagccgcagccgcgcgagttcttctcccccgattcggcgccggtgcgtctgacccgcctgcgcgagaaactcgagttgctgcgtgggcagggcgtcgacgtggtgctctgcctggccttcaaccgccgcttgcgcgagctgtcggcagccgagttcgtccgccaggtcctggtcgatggactggcggtgcggcaccttgaagtgggcgacgatttccgtttcggctgcgaccgctccggtgacttcgccttcctggtgaacgccagtcgcgagcaggggttcaccgtcgaggcggccgccaccgtcgaactggacggcgtgcgggtgagcagcacgcgggtccgccaggccctggccgagggcgacctgcatctcgccgagcgccttctggggcgtcccttcagcctgagcggacgggtcctgcatggacagaaactcggccggcaactgggctcgcccacggccaacattcaactgaaacggcgcaaggcgccgttgaacggggtctacctggtcagtacgctggtcgatggccagcgttgccagggggtggcgaacatcggcacccgcccttcggtgaacggcgacggccgtccccatctggaagtgcacctgctcgatttcgccggcgatctatacggccggcatctgcaggtgaccttccaccagaagctgcgcgacgagcagcgttttgcctccctggaggcactcaaggcggcgattctcgcggatatcgccgccgcccgggcctactggctgggccaaccgcttgattga

SEQ ID NO: 59124 - protein, 312 aa, Pseudomonas aeruginosa UCBPP-PA14
MQLLRGLHNLQPLAGGCVATIGNFDGVHLGHQAILARLRERSLELGVPSCVVIFEPQPREFFSPDSAPVRLTRLREKLELLRGQGVDVVLCLAFNRRLRELSAAEFVRQVLVDGLAVRHLEVGDDFRFGCDRSGDFAFLVNASREQGFTVEAAATVELDGVRVSSTRVRQALAEGDLHLAERLLGRPFSLSGRVLHGQKLGRQLGSPTANIQLKRRKAPLNGVYLVSTLVDGQRCQGVANIGTRPSVNGDGRPHLEVHLLDFAGDLYGRHLQVTFHQKLRDEQRFASLEALKAAILADIAAARAYWLGQPLD

SEQ ID NO: 59125 - DNA, 930 bp, Crocosphaera watsonii WH 8501
  CDS (1)..(930): transl_table=11
gtgtgggtaacatcatcaactagcaacgttaaaacaccaacggccattgcgttgggcaactttgacggtatccatctaggacatcgacaagttatcaagccaattatagaacttgaggcggagtatatccccacccttgtaacttttactccccaccctcaagaattttttactggtaaaaccagacagttattaacgcctctgacagagaaggtcaaacggttagagtctcttaagatcagacaattagtgcgtttaccttttgatagcagtctagcctctctgggaccacaagcgtttgtagaagatattttagtcaagcaacttaatgtaaaatatatcagtgtgggacaagatttccgttttggcaaggggagagaaggaaatgcccaaatgttacaagaattagccaacaatttgggaatattcgtctatattaccaagttaaaaactcttgtcagtggagagagtggtttacgcattagtagttcgagaattcgtcaatgtttagctgttggcaatgttagacaggcaaaagaaatgttgagttatccttactcattagaagggatggtagttagaggacaacaagtggggagaactatcggttttcctactgctaacctccaaattcctgccgataaattattaccccgtcgtggggtttattgtgtccgtgttattttagccacagaagaagtaattaagggtgtgattaatattggtagtcgtcctacagtcaatggtcaagtgccaacagtagaagttcatttgttggattggtctggaaacttatatgcaactttcttaagagttcagttggaaaaatttttacgctcggagcaaaaatttccttctttggatgctctgaaaaaccaaattacccaagactgtatgatagctcgtcaaacactaagccaggatgtttag

SEQ ID NO: 59126 - protein, 309 aa, Crocosphaera watsonii WH 8501
MWVTSSTSNVKTPTAIALGNFDGIHLGHRQVIKPIIELEAEYIPTLVTFTPHPQEFFTGKTRQLLTPLTEKVKRLESLKIRQLVRLPFDSSLASLGPQAFVEDILVKQLNVKYISVGQDFRFGKGREGNAQMLQELANNLGIFVYITKLKTLVSGESGLRISSSRIRQCLAVGNVRQAKEMLSYPYSLEGMVVRGQQVGRTIGFPTANLQIPADKLLPRRGVYCVRVILATEEVIKGVINIGSRPTVNGQVPTVEVHLLDWSGNLYATFLRVQLEKFLRSEQKFPSLDALKNQITQDCMIARQTLSQDV

SEQ ID NO: 59127 - DNA, 966 bp, Prosthecochloris aestuarii DSM 271
  CDS (1)..(966): transl_table=11
atgcatgttgcggagtatcataacggcagtgtttcatacacaactaccggtcaggataacccttttccactgatggcttcggctgtaaccgtcggttcatatgacggggtgcatgtcgggcaccggaggataatcggcagaatgctggatatcgcctctcaggagcgccttcgcagtgttgtcgttacctttgagcctcatccccgacaggtgattgcttcaggacgcagcagcgctattgagcttcttaccctgccctcagagaaacggcttcttatggagtcactcggtatagacgtgttgttcgtggtgcgtttcgatgctctttttgcatcaagaagttccgaatggtttatacagcatattcttcttgatcttattggtgccaggcatatcgtgatcggttatgatcacggtttcggtcgggacaggacaggggggcgcaggacgctggagaagctggccggcgaacgtggattcagtgttgatgtcgtcgatgaggtacgccttcatgacgagcacttttccagtaccaggatccgtaccctgcttcatgaaggacggctcagagaggcaaacgcatttttgggggcgccttatatgatttcaggacaggttgttcatggccaggggcttggccgaaagattggctttccgactgtcaatatcaagcttgccgatcccgataaactgcttccccgacatggggtatatatagcagaaacgcatcttgacgggcagaaatacaaggtgatgatgaatatcggtatcagacctaccgtgtcggacggatcgggcgcggttatagaggcacacattcttgggtattcgtcatcactgtacggacgagaagtacatctttggctatttgagcgtttgcgggacgaaaaaaaatttgagtctcttgatgcgctcagggagcagttgcagaaagataaaaaaatggtggagctatttcagaaataa

SEQ ID NO: 59128 - protein, 321 aa, Prosthecochloris aestuarii DSM 271
MHVAEYHNGSVSYTTTGQDNPFPLMASAVTVGSYDGVHVGHRRIIGRMLDIASQERLRSVVVTFEPHPRQVIASGRSSAIELLTLPSEKRLLMESLGIDVLFVVRFDALFASRSSEWFIQHILLDLIGARHIVIGYDHGFGRDRTGGRRTLEKLAGERGFSVDVVDEVRLHDEHFSSTRIRTLLHEGRLREANAFLGAPYMISGQVVHGQGLGRKIGFPTVNIKLADPDKLLPRHGVYIAETHLDGQKYKVMMNIGIRPTVSDGSGAVIEAHILGYSSSLYGREVHLWLFERLRDEKKFESLDALREQLQKDKKMVELFQK

SEQ ID NO: 59129 - DNA, 948 bp, Xylella fastidiosa Dixon
  CDS (1)..(948): transl_table=11
atgggcagcgtgtttagacatatcgaaggcgggatgctgttcccgcaaggaagtgtaacctgcatcggtgcttttgatggcctgcacctggggcatcgtgcccttgtacgtcatgccttacaacgtgcaactgcattgcacctgcctaccgttgccctgagctttgaaccgcttccacgtgaatacttcgcctccgccaccccgcccccgcgtttgaccctgacacgtgccaaaattcagggcttgcaccgctttggtgctgacagcgtcggcttgctacgttttgacagccgcttggcatccatgagccctcaaacctttgtcgagcgtgttttgctcggacgcttgggagtgcgtgaagtgctgatcgggccacagttccgctttggacatcagcgcagcggtgatatcgccttattgcagcgactgggcctggagcacggttttacagctaccgagatcccacccttacacctgaataatgaacgcatctccgcaacaaaaatccgcgccttgctggcagcgggcgactttgctcatgcggccgaactactgggtcgaccttacatgatcggtggccgcgtcgtgcgcggccagcagcttggcagcaccctaggctacccgaccgcgaatctgcgtttcccccatcccatcgcactgtccggcatttatgccacctgggtgcatggcatcttcgaacaaccctggccttccgtctccagcttcggcacccggcccaccgtcgccggcgtggaaccactcctagaagtgcatctattcgacttccacagcgatctctatggacgtcgtatcgacgtcgaattcatcgccaaactacgtgacgaagaaacattccccgacctccacacaatgaccgcacaaatacatcgtgacgcccaacaggcgcgccacatcctttccgaacatcgattgcgagccaccgcgtga

SEQ ID NO: 59130 - protein, 315 aa, Xylella fastidiosa Dixon
MGSVFRHIEGGMLFPQGSVTCIGAFDGLHLGHRALVRHALQRATALHLPTVALSFEPLPREYFASATPPPRLTLTRAKIQGLHRFGADSVGLLRFDSRLASMSPQTFVERVLLGRLGVREVLIGPQFRFGHQRSGDIALLQRLGLEHGFTATEIPPLHLNNERISATKIRALLAAGDFAHAAELLGRPYMIGGRVVRGQQLGSTLGYPTANLRFPHPIALSGIYATWVHGIFEQPWPSVSSFGTRPTVAGVEPLLEVHLFDFHSDLYGRRIDVEFIAKLRDEETFPDLHTMTAQIHRDAQQARHILSEHRLRATA

SEQ ID NO: 59131 - DNA, 939 bp, Roseovarius nubinhibens ISM
  CDS (1)..(939): transl_table=11
atgaggatcatccgcgaccacagctatgttgatgccgccgaccggggcgcatccgtggccatcggcaatttcgatggcgtccatctcggccaccaggcggtgatcgaccttgcgcgcaaggccggagaggccgccgatgccccgctcggcgtactcacgttcgagccccacccgcgccagtatttcgcccccgaggccccgccctttcgcctgatgagcgccgaggctcgcgccaaccggctcgaaaagctcggcgtcgagcggctctacgagctcaatttcaacgccgccctctcggcgctcagccccgaggagttcgcccgcaatgtgctctgcgacgggctcggcctcgcgcatgtggtggtcggggcggatttctgctttggcaagggccgcaccggcaatgccgccgatctcaaacgctttggcgcagagatgggctttggcgtcaccgtggccgaactgctcgaaggcgatcagggcgaggtcagctcgaccgccatccgtcaggccctctccgaaggccgcccgcgcgacgccgccgctatgcttggccattggcaccggatcgacggaccggtggtgggcggcgaacagcgcggccgcgagctgggctatcccaccgcgaacatgtccatcgccgggctgcacccgccgaaattcggcgtctacgcggtgcagatcgaggtcatggatggcccccacaaggggcgctaccatggcgcggcaagcctcggcatccgcccgatgttcaatggcgaggtgcccaatctcgaaaccttcctctttgatttctccggcgatctctatggcgcgcatctctcggtggcgctggccgactatctgcgccccgaagaggtgttcgacagtctcgaggccttcatcgcccagatggatgccgattgcgcccgcgcccgcgagattctcgaggcatcatga

SEQ ID NO: 59132 - protein, 312 aa, Roseovarius nubinhibens ISM
MRIIRDHSYVDAADRGASVAIGNFDGVHLGHQAVIDLARKAGEAADAPLGVLTFEPHPRQYFAPEAPPFRLMSAEARANRLEKLGVERLYELNFNAALSALSPEEFARNVLCDGLGLAHVVVGADFCFGKGRTGNAADLKRFGAEMGFGVTVAELLEGDQGEVSSTAIRQALSEGRPRDAAAMLGHWHRIDGPVVGGEQRGRELGYPTANMSIAGLHPPKFGVYAVQIEVMDGPHKGRYHGAASLGIRPMFNGEVPNLETFLFDFSGDLYGAHLSVALADYLRPEEVFDSLEAFIAQMDADCARAREILEAS

SEQ ID NO: 59133 - DNA, 939 bp, Oceanicola batsensis HTCC2597
  CDS (1)..(939): transl_table=11
atgaagatcgtgcgcgactatcagttcaccacgcccggcgaccggggcgccgccgtcgccatcggcaatttcgacggtgtccacatcggccaccgtgcggtcatcgacctcgcccgggccgaggcccggcggctgcacgcgccgcttggcgtgatgacgttcgaaccgcacccgcgccagctcttcgcgcctgacgccccgccgttccgcctcaccgggccggccgcccgggcgcaccggctcgagaagatcggggtcgaaattctctacgagctgaacttcaacccggccctcgccggcctgacgcccgaagccttcgtccggcgcgtcctggtggaagggctcggcgtgcgccatgtcgtggtcggcgccgattttcacttcggcgcgaaacgcgcaggcaccaccgagacactgcgcgccttcggccaggaactcggcttcggcgtcaccgtggcggatctggtcgcggaaggcaccgaagaggtgtcatcgaccgccattcgcgacgcgctggccgagggccgcccccgcgacgccgccgcgatgctgggccactggcaccggatcgagggtcccgtcatccggggcgatcagcgcggccgcgacctgggctatccgaccgccaacatgtcgatcgccggcctgcatcgtccccggttcggcgtctatgcggtgctggtcgatgtgctgaccggaccgcaccggggcacctatcgcggcgccgcctctctcggcatgcggccgcaattcgggggcgagacgccgaacctcgaaacctacctgttcgatttccagggcgatctttatggcgagaccgtctcggtcgggcttgtcgaatacctgcggcccgaggcgaaattcgattcgctggacggcctgatccggcaaatggaggcggattgcgaccgggcccgcgcgatcctggcggcgcaatga

SEQ ID NO: 59134 - protein, 312 aa, Oceanicola batsensis HTCC2597
MKIVRDYQFTTPGDRGAAVAIGNFDGVHIGHRAVIDLARAEARRLHAPLGVMTFEPHPRQLFAPDAPPFRLTGPAARAHRLEKIGVEILYELNFNPALAGLTPEAFVRRVLVEGLGVRHVVVGADFHFGAKRAGTTETLRAFGQELGFGVTVADLVAEGTEEVSSTAIRDALAEGRPRDAAAMLGHWHRIEGPVIRGDQRGRDLGYPTANMSIAGLHRPRFGVYAVLVDVLTGPHRGTYRGAASLGMRPQFGGETPNLETYLFDFQGDLYGETVSVGLVEYLRPEAKFDSLDGLIRQMEADCDRARAILAAQ

SEQ ID NO: 59135 - DNA, 963 bp, Photobacterium sp. SKA34
  CDS (1)..(963): transl_table=11
atggaattaattcgaggtatacataatattcaaccccagcatcatggctgtgtgttgactataggcaactttgacggtgttcatttagggcaccaagcattgctacgtcaagtggtagctaaagcccatgcgatgcaactttccgctacggtaatgacatttgagcctcagccgttagaattgtttgcaggagataaagcgccagcacgcttaacccgttttagagataaatatttacagctaaaaaaggtcggtattgatcgtttgttatgcgtgaattttaatcatcattttgccaccatgagcgctgaagatttcgtcgagtgcttgttggttaagcaattgggtgttaagtttcttgttattggcgatgattttcgctttggacaaggccgtaatggtgatttttccatgctagtggaagcgggacgaaaacatggctttgaggtagtaagtacccaaagtttttgtgtttcagagcagcgagtaagcagcactgccattcgtcaagcactagcaaagaatgaacttgaacaagctgaaatgatgcttggtcgaccttacagtattcgcggacgtgtctctcacggacgaaagttaggtcgaacgattggttttcctactgccaatatacctttaaaacgacgtgtaacgccggtagctggtgtttatgctgttgaagtgtatggtgcagatagtcgccctgttatgggggtggctaatgttggtcatcggccaaccgtaaaaggtgtacgccaacaacttgaagtgcacttatttgattttcaagctgatctctacggacatcagcttgaagtcgtgttacgccataaattgcgtgacgaaaagaaatttgaatccttcgatgcgcttaaacgccaaatcgagcgagatgctcaagcagcacgggtgtggctgtctgagcgtaataatgtccaacttcgcccaagtaacggaatctag

SEQ ID NO: 59136 - protein, 320 aa, Photobacterium sp. SKA34
MELIRGIHNIQPQHHGCVLTIGNFDGVHLGHQALLRQVVAKAHAMQLSATVMTFEPQPLELFAGDKAPARLTRFRDKYLQLKKVGIDRLLCVNFNHHFATMSAEDFVECLLVKQLGVKFLVIGDDFRFGQGRNGDFSMLVEAGRKHGFEVVSTQSFCVSEQRVSSTAIRQALAKNELEQAEMMLGRPYSIRGRVSHGRKLGRTIGFPTANIPLKRRVTPVAGVYAVEVYGADSRPVMGVANVGHRPTVKGVRQQLEVHLFDFQADLYGHQLEVVLRHKLRDEKKFESFDALKRQIERDAQAARVWLSERNNVQLRPSNGI

SEQ ID NO: 59137 - DNA, 933 bp, Oceanospirillum sp. MED92
  CDS (1)..(933): transl_table=11
atggaactgattcgcggattacataacctgcgcgaaaagcaccggggttgcgtggcaaccatcggtaattttgatggcgtgcatttaggccatcgtcaggtactggcacaggttaaagctaaggctcaagagctggggttgccttcggttgtgatcacgtttgagcctcagccgcgcgagttttttgccggtgataaggcgccgcctcgattgacccgttttagtgaaaagtaccgtttgctgcaagcggaaggtatggatcggcacctctgcctgactttcaatgaacgtttacgttcaatgactgctgagcagtttgtcgaagaattgctgctgcgagggcttgctgtagaacacttcgtggtgggtgatgactttcgctttggctgtgaccgctcgggtgattacgagatgttaagccaggcgggtgagcgtcacggctttacggtggtgaacactgagacctttctgagtgaagaagaacgggtcagtagtacgcgacttcgtcatgtgcttgaagcaaatgaccttgcgactgcagcagcgttacttggtcgtccgtataccgtgtctggacgcgtgatgcatggccagaaactcggtcgtcagttgggcgtacctactgcaaatgtgagaatgcaccgtttcccttgtccgctgcgtggtgtttatgcggtggaagtaaccgggcagacgttgaaagctcaaggtgtgtgtaatgttgggttaagaccgacggtatgtggtcagcagcctgttttggaaacacatctgtttgattttgataaagatatttatgggcagttactgactgtcgagtttaagcaatttatccgtgaggaacgaaagtttgacggcatagatcagcttaaagagcagatttttaaagatattgaagaagtgcgggactatttctcccgtaccagtcgttaa

SEQ ID NO: 59138 - protein, 310 aa, Oceanospirillum sp. MED92
MELIRGLHNLREKHRGCVATIGNFDGVHLGHRQVLAQVKAKAQELGLPSVVITFEPQPREFFAGDKAPPRLTRFSEKYRLLQAEGMDRHLCLTFNERLRSMTAEQFVEELLLRGLAVEHFVVGDDFRFGCDRSGDYEMLSQAGERHGFTVVNTETFLSEEERVSSTRLRHVLEANDLATAAALLGRPYTVSGRVMHGQKLGRQLGVPTANVRMHRFPCPLRGVYAVEVTGQTLKAQGVCNVGLRPTVCGQQPVLETHLFDFDKDIYGQLLTVEFKQFIREERKFDGIDQLKEQIFKDIEEVRDYFSRTSR

SEQ ID NO: 59139 - DNA, 951 bp, Xanthobacter autotrophicus Py2
  CDS (1)..(951): transl_table=11
atgacaggtgatctctcctccaacttcctcctggtgcgcggccacgcacagcttccgcccgccctggcgcggccggtggtggccatcggcaatttcgacggggtgcatcgcggccaccgggccgtgttcgacaccgcccgcgccatggccgccgaggccggcgtgccggccattgccgtcaccttcgagccccatccgcgcaccttcttcaatcccgcttcggcgccgttccgcctgacccccgaggcgcgcaagctgcgccacatcgccgaaagcgggctgcagggcgccgtcgtgctgcccttcgacgcccagcttgccgccatggaggcggaggatttcgtgcgcgaggtcctggtgggccgctacaatgtcaccggcgtgtcggtgggcttcgacttccatttcggccgcgcccgcgccggctccccggctttccttgaggacgcgggacggcggcacggcttcaaggtcaccgtggtgccccccatgcgcgacgaggacgacgccatctcctccaccgccatccgcagcgcgctggcatcgggacaggtgggccatgcggcgcacatgctgggccggccgttcgcggtggcggccgaggtgatccacggcgacaagcgcggccgcaccatcggctttcccaccgccaacctcgccctcgccgaggacatggacctcgccttcggcatctatgcggtgcgcgcggcaacgccgctcgggcgcttcgacggggtcgccaattacggccgccgtcccaccttcgacaatggacgccccctactggaggtgcacctgttcgacttttccggcgatctctacggcgcgacgctggaagtggaattccacgcctacctgcggccggagctgaaattcgacggtatcgacgccctcgtcgcccagatcgcggccgatgcgcggcaggcccgcgaggttctcgccaaggtttga

SEQ ID NO: 59140 - protein, 316 aa, Xanthobacter autotrophicus Py2
MTGDLSSNFLLVRGHAQLPPALARPVVAIGNFDGVHRGHRAVFDTARAMAAEAGVPAIAVTFEPHPRTFFNPASAPFRLTPEARKLRHIAESGLQGAVVLPFDAQLAAMEAEDFVREVLVGRYNVTGVSVGFDFHFGRARAGSPAFLEDAGRRHGFKVTVVPPMRDEDDAISSTAIRSALASGQVGHAAHMLGRPFAVAAEVIHGDKRGRTIGFPTANLALAEDMDLAFGIYAVRAATPLGRFDGVANYGRRPTFDNGRPLLEVHLFDFSGDLYGATLEVEFHAYLRPELKFDGIDALVAQIAADARQAREVLAKV

SEQ ID NO: 59141 - DNA, 936 bp, marine gamma proteobacterium HTCC2207
  CDS (1)..(936): transl_table=11
ttgacctttgttcgcggtttgcacaacctgcaaactccagatgaaaaatcggtggtcaccatcggttctttcgatggtgtgcatattggtcatcaggcaattttgcgtcaggtaaaagaggcctcgcagcgtttgcaactaccttcggtggccatgacctttgagccgcagccaaaagagtacttttctgctgagcaggcaccagcgcgattgatgagattgcgtgaaaaaattgatacgttgctcgaattgggcgtggattcagtggtttgtctgcagtttaatcgtcgactacgcaacctctctgcggcggattttattgatcaggtgttggtccgcggtttggcggtaagacatctaatcgtcggtgatgattttcattttggctgtgatcgcagcggtgactttgcccgtttgcagcaaaagggcgagcagtgcgggttcgatgtgcatgacacggccacggtcgaagttgaagggcagcgggtaagtagcaccttggtgcgcgaggtggttgagcaagcggattttccccgtgccgcggcgctgctcggacgacctttttcgattagcggtgttgtcggttatggccaacagctcggacgtgaactaggctttcccactgctaacgtgcagctatgtcgttttagtgcgccattgtctggtgtctttgcggtgcaggtaaatgttgcaggtacgctttaccgcggtgctgctaatgtcggcttgcgacccacagtgggggatttggtcaagccaattttagaggtgcacctgctggatttcgccggtgatctctacggtcagcgaatcgcagtcgagtttttgcacaaaatccgtgatgaagagaaatttaccacggttgaaaaactggtggagacaatcactgcagatatcaacattatccgccagtggtttttgcacaatgaaaaatag

SEQ ID NO: 59142 - protein, 311 aa, marine gamma proteobacterium HTCC2207
MTFVRGLHNLQTPDEKSVVTIGSFDGVHIGHQAILRQVKEASQRLQLPSVAMTFEPQPKEYFSAEQAPARLMRLREKIDTLLELGVDSVVCLQFNRRLRNLSAADFIDQVLVRGLAVRHLIVGDDFHFGCDRSGDFARLQQKGEQCGFDVHDTATVEVEGQRVSSTLVREVVEQADFPRAAALLGRPFSISGVVGYGQQLGRELGFPTANVQLCRFSAPLSGVFAVQVNVAGTLYRGAANVGLRPTVGDLVKPILEVHLLDFAGDLYGQRIAVEFLHKIRDEEKFTTVEKLVETITADINIIRQWFLHNEK

SEQ ID NO: 59143 - DNA, 933 bp, Rickettsiella grylli
  CDS (1)..(933): transl_table=11
atgactgaactgattcgcaatagttataatataaaaccgagacagtatggttgcgtagccactatcggaaactttgatggattgcaccgagggcaccaaaaggttatccaatcgttaatcaagcttgctcgacaatttcacagaccgacgtgtgtgattatttttgaaccacatccgcaagagtttttttatcgcgaaaatgcacctgcgcgtttaatgcggtttcgtgaaaaatttaaatctttacaagcgttaggaatcgatcgcgtgctttgcttacggtttaataaacgtctagcagaatgcagcgcaacggattttgttaaaaaaattttaattgaaaaattaggaataaaaggcttaatgattggggatgattttcgtttcggtaaagcgcgtcaaggtgattgggtgttgttgaaaaatctcggtcgcgaatatggatttaaagtgttttcaacgcccacccttttatttgacaacgaacgtattggtagctcgcgcgtaaggaatgcagtaaaacaagccgattttaaattagcagaacggttgctaggccattcgtttacactcagtggtcgagtcatttatggcgatcaacgtggacgattacttggttttccgacggctaacgttggattacatcggcggatagcccccctagaaggcgtatttattgtaaaggtttatggtttagcatcaatacccattgcgggagttgccaattgtggtacacgtccaacaatgaatggattgaaaaatttattagaagtttatttatttgattttaaccgaacgatttatggccaatttatcgaaatagaatttttagaaaaaatacgcgatgaaaaaaaatttgagagtatagaaacactcaaacaacgcattgcgaaagatgtagcgacagcaaaagaatattttataaaaaattaa

SEQ ID NO: 59144 - protein, 310 aa, Rickettsiella grylli
MTELIRNSYNIKPRQYGCVATIGNFDGLHRGHQKVIQSLIKLARQFHRPTCVIIFEPHPQEFFYRENAPARLMRFREKFKSLQALGIDRVLCLRFNKRLAECSATDFVKKILIEKLGIKGLMIGDDFRFGKARQGDWVLLKNLGREYGFKVFSTPTLLFDNERIGSSRVRNAVKQADFKLAERLLGHSFTLSGRVIYGDQRGRLLGFPTANVGLHRRIAPLEGVFIVKVYGLASIPIAGVANCGTRPTMNGLKNLLEVYLFDFNRTIYGQFIEIEFLEKIRDEKKFESIETLKQRIAKDVATAKEYFIKN

SEQ ID NO: 59145 - DNA, 972 bp, Oceanobacter sp. RED65
  CDS (1)..(972): transl_table=11
gtggataaagtcccttataatgcggccttttatcctgaagacgttatgctgttttatcgcggactacacaatacgagacccggttcagaaggctgtgtgctgaccattggtaatttcgatggtgttcacttgggccaccaagcattactggataaagtaaaagccaaaggcgaagagttgagcctgcagacagcggtcatgatattcgagccgcagccgaaagaatttttcgatcccgatggtgcgccggctcggctttgcaatcttgcagaaaagatacaattatttcagcggcaaaatatcgatgtcttggcctgcatggcgttcaacccacgttttcgacaactcaccgcggaagccttcgtacaacaggtactgattgatgcgctcaatgtgaaggcattaatcgtaggcgatgatttccgctttggttgcgaccgttccggtgatttcgcatttttgcaggaggccggtgaacgttatgggttcagcgttgaggatactcaaaccattgctcaatcgggtaatcgcgttagcagtacccgtgtccgccaagctttagaagagggtcgtttgctggacgctgccgagttattggggcgtccttatagtatcagtgggcgtatagctcatgggcaaaagcttggacggactataggaacgcccacggctaatgtgattctcaaacgagagaaagcaccgttacggggtgtatttgcagtgaaagtgatctgcaagcaaggtgagttcaagggtgtagctaatatcggtacacgcccaaccgttggcggagtgaaagccaatttagaagcacacctttttgatttttccggcgacctttatggtcaaaggatagacgtgattttttgtgaaaaaattcgtgatgagaaacgctttgacggcattgatgctttaaaagcggccatcgaacaagatagacaattggccaaggcctattttaacaaacagtaa

SEQ ID NO: 59146 - protein, 323 aa, Oceanobacter sp. RED65
MDKVPYNAAFYPEDVMLFYRGLHNTRPGSEGCVLTIGNFDGVHLGHQALLDKVKAKGEELSLQTAVMIFEPQPKEFFDPDGAPARLCNLAEKIQLFQRQNIDVLACMAFNPRFRQLTAEAFVQQVLIDALNVKALIVGDDFRFGCDRSGDFAFLQEAGERYGFSVEDTQTIAQSGNRVSSTRVRQALEEGRLLDAAELLGRPYSISGRIAHGQKLGRTIGTPTANVILKREKAPLRGVFAVKVICKQGEFKGVANIGTRPTVGGVKANLEAHLFDFSGDLYGQRIDVIFCEKIRDEKRFDGIDALKAAIEQDRQLAKAYFNKQ

SEQ ID NO: 59147 - DNA, 951 bp, Alteromonadales bacterium TW-7
  CDS (1)..(951): transl_table=11
atggagttaattagaggtatacacaatattcgcccacaccattttgggtgtgtgttaactattggtaattttgacggcgttcacttaggtcatgcgcaagtattaaaaggcttgttagccgacgcaaaagcacacaatttacccagcacggtgttgttgtttgagcctcaacctcaagagttttttgcaaaaaataatgccccagcaaggctaactcgtttgcgcgacaagttgcgtttattaagtgatttaggcattgaacgtgtaatttgtattagctttaatcagcggtttgcaaatatgcatgcagaacagtttgtaaacgagatactaataaaaaaactcggtgttaaagcgttaacggtgggtgacgactttagatttggccaacaacgtaaaggtaattttaatttacttgtaaatatgggcaaacaagcaggcatggatgtacaaagcactgcgagttttcatcagttaaatgctagagtaagtagcacgttaatacgtgaggcattggcatgtggcaacttagccgatgcaaaagtgatgcttggtcataattatgcgatttctgggcgtgttatacacggttggaaacgaggccgtgaacttggctttagaactgcaaatatagcgctaaagcgccaagtttgccccgtgaatggggtatttgctgtgcaagcgactattgcagggaaacaggtttttggggttgctaatataggcaataaacccacatttaatgggacacgtgcacttctggaagttcatctttttgactttgcacaagacatttacggacaatttatgcacgttgagttgatacaaaaactccgcgatgaaaaaaaattcgagacattaacacaattaacggcgcaaatagcaacagacgttgccgccgctaaacagtgttttggtttaaatcaggtagccgatagagacggaatgtag

SEQ ID NO: 59148 - protein, 316 aa, Alteromonadales bacterium TW-7
MELIRGIHNIRPHHFGCVLTIGNFDGVHLGHAQVLKGLLADAKAHNLPSTVLLFEPQPQEFFAKNNAPARLTRLRDKLRLLSDLGIERVICISFNQRFANMHAEQFVNEILIKKLGVKALTVGDDFRFGQQRKGNFNLLVNMGKQAGMDVQSTASFHQLNARVSSTLIREALACGNLADAKVMLGHNYAISGRVIHGWKRGRELGFRTANIALKRQVCPVNGVFAVQATIAGKQVFGVANIGNKPTFNGTRALLEVHLFDFAQDIYGQFMHVELIQKLRDEKKFETLTQLTAQIATDVAAAKQCFGLNQVADRDGM

SEQ ID NO: 59149 - DNA, 933 bp, marine gamma proteobacterium HTCC2143
  CDS (1)..(933): transl_table=11
atggagcttattcgcggcttgcacaatctgcgcccacgtcaccggggttgcgttacaacgatcggcgcctttgatggtgttcatcatggccatagggctgtgctgcagcgcctcatcgataaaggtggcgaaatgggactgcctaccaccgtcgtggtatttgagccgttaccgaaggagttctttgctcctcagcaggctcctgcgagattaatgagctttcgagagaaatttaaagcgctgaaagcgttgggtatcgatagaatattgcgaattagatttaacgaatcgctccgagagatggatgggggtgagttcgtccgcaaagtgttcgttgagggattaggtgcgaagcatataattattggtgatgatttgcggtttggtcgagatcgcggcggcaattttgaattgttgagaaaatttggtttagaaaagggttttactgttgaagcaacggagaccctgaccatggatgatgagcgggtgagcagcactcgaatccgaaaggcactagaagacattgattttgatttggcgaatactcttttaggccgcccttttagtatttctgggaaggtaattgtgggtaagcagctgggtcggcaattgggtgcacccacggctaatatggaattacatcgcttgcgctcaccgttgtcaggtgtttttgccgtcgacgcaatcattgacgcggagaccgttcatggcattgctaacgtcgggactcgcccaaccgtcggcgatggtttgaaggcgatactcgaagttcatttgttagattttgaccgtgatatttatggcaaaaatattgaagtgatctttcgtacgaaaattcgcgatgaaaaaaagtttgattcgattgataacttgaaacaacaaatacacgaagatttcgaaactggccgacggtactttgccagcgtaagctag

SEQ ID NO: 59150 - protein, 310 aa, marine gamma proteobacterium HTCC2143
MELIRGLHNLRPRHRGCVTTIGAFDGVHHGHRAVLQRLIDKGGEMGLPTTVVVFEPLPKEFFAPQQAPARLMSFREKFKALKALGIDRILRIRFNESLREMDGGEFVRKVFVEGLGAKHIIIGDDLRFGRDRGGNFELLRKFGLEKGFTVEATETLTMDDERVSSTRIRKALEDIDFDLANTLLGRPFSISGKVIVGKQLGRQLGAPTANMELHRLRSPLSGVFAVDAIIDAETVHGIANVGTRPTVGDGLKAILEVHLLDFDRDIYGKNIEVIFRTKIRDEKKFDSIDNLKQQIHEDFETGRRYFASVS

SEQ ID NO: 59151 - DNA, 942 bp, marine gamma proteobacterium HTCC2080
  CDS (1)..(942): transl_table=11
atggatttgatccgcggcctgcataacttacgatcggagcaccgtggatgcgctgtaaccgtgggggcttttgatggtattcatcttgggcatcaggcggttcttacacatctgtcttcctgtgcgcgagatcgcgatttattgtcgacggtcattgtttttgagccgttgccgcgagaatatttccgaccattggaagcgccgcctcgtatcactaactttcgtgagcgactggcgcttctcgccagaaccggtattgaccgtgtgttagtgcttaaatttaatgaagagctgcggggcatgagtgctgaagatttcgtcagtcgcgtctttgtggagggcctaggggcgcgctatattgctctcggtgatgattttcgatttggtaacagccgtgagggcgattacgattatgtgcgaaggcttgcggcaaaatttaattacgaggtgcaaccgacaggtaccttggaaatagcagacatccgggtcagcagcacccgcattcgcacagccttagctgatggccaatttgtcgaggcgcaggcgttacttggacggccttttacgatgacgggacgagtagagcatgggcgtaaactggggcgtgagttaggcgcgcctacggccaatattcgtattaatcgaattcgcagccccttgtccggtgtatttgctgttcgtgtagacggacctgggctggaggcggtggcggcagtagccaatgttggtacgcggcccaccgtcgatgatggattgaaagcgaatcttgaggttcatctgttggatcgcaagtgtgacctttacggacagcgacttgaggtccgttttttgcataagttgcgagaagaaattaagtacgaatccctcgatgccttaaaggaaggtatcgcgaaggatattgataatgcccgccactggttggctcaacccggtcatagctag

SEQ ID NO: 59152 - protein, 313 aa, marine gamma proteobacterium HTCC2080
MDLIRGLHNLRSEHRGCAVTVGAFDGIHLGHQAVLTHLSSCARDRDLLSTVIVFEPLPREYFRPLEAPPRITNFRERLALLARTGIDRVLVLKFNEELRGMSAEDFVSRVFVEGLGARYIALGDDFRFGNSREGDYDYVRRLAAKFNYEVQPTGTLEIADIRVSSTRIRTALADGQFVEAQALLGRPFTMTGRVEHGRKLGRELGAPTANIRINRIRSPLSGVFAVRVDGPGLEAVAAVANVGTRPTVDDGLKANLEVHLLDRKCDLYGQRLEVRFLHKLREEIKYESLDALKEGIAKDIDNARHWLAQPGHS

SEQ ID NO: 59153 - DNA, 969 bp, Pseudomonas putida GB-1
  CDS (1)..(969): transl_table=11
atgagcaagaagcgcgttatgcagctggttcgaggtcttcacaacctgcgccccgagcaccggggctgtgtcgccaccattggcaacttcgacggggttcaccgcggccaccaggcaatcctggcgcgtctgcgcgagcgcggccaggccttgggcctgccgacctgcgtggtgatcttcgaaccgcaaccacgcgagtacttcgcccctgaaaccgcgccggcgcgcctggcccgcctgcgcgacaaggtcgagctgctggccgccgagggcattgaccgggttttgtgcctggcgttcaatcagcgcctgagcaagctcagcgccgatgccttcgtcaaggccatcctggtcgacggcttgggtgtgcgtcatctcgaagtgggcgatgacttccgctttggctgcgaccgtgctggcgatttcgccttcctgatcgaggccggcaagcagtacggctttaccgtcgaggccgccaacacggtaatccaggacggcctgcgggtcagcagcaccgaagtgcgcaaggccctgtccgagggcaacttcgaactggccgagcacctgctgggtcgcccgtacagcatcactggccgcgtactgcatggccagaagctggcccgccagctcggcacacctaccgccaatatccagctcaagcgccgccgcgtgccgctgtccggggtctacctggccagcatcgaaatcgacggcaaggcctggccgggtgtcggcaatattggcgtgcgtcccaccgttgccggtgatgggcgcccgcacctggaaattcatctactggattatgccggtgacctgtatggccggcgcctgacggtggagttccaccacaagctgcgtgaagagcagcgattcgcctccctggaggcgctgaagtcggcgatcgatgcggatatcgccgccgcacgtgcacattggcacgctcaaccgctaacgaagagcctgaaatga

SEQ ID NO: 59154 - protein, 322 aa, Pseudomonas putida GB-1
MSKKRVMQLVRGLHNLRPEHRGCVATIGNFDGVHRGHQAILARLRERGQALGLPTCVVIFEPQPREYFAPETAPARLARLRDKVELLAAEGIDRVLCLAFNQRLSKLSADAFVKAILVDGLGVRHLEVGDDFRFGCDRAGDFAFLIEAGKQYGFTVEAANTVIQDGLRVSSTEVRKALSEGNFELAEHLLGRPYSITGRVLHGQKLARQLGTPTANIQLKRRRVPLSGVYLASIEIDGKAWPGVGNIGVRPTVAGDGRPHLEIHLLDYAGDLYGRRLTVEFHHKLREEQRFASLEALKSAIDADIAAARAHWHAQPLTKSLK

SEQ ID NO: 59155 - DNA, 924 bp, Rhodobacter capsulatus
  CDS (1)..(924): transl_table=11
atgcagacctatacccactggacggggctttcgcccgaggcgcgcggcgcctcggtggcgatgggcaatttcgacggggtgcatctggggcatcaatcggtgatcgacctggcccgcggccgcgagcctttgggcatcatcacctttgaaccccatccgcgcgaggtctttgcccccgaggccgcgccgttccggctgatgaatgccgaagcccgcgaacaccggctggcgaaactgggcgtgacgcggctttacgagctgcccttcggccccgagctggcggggatggaccccgagaccttcgcaggcaaggtgctggccgaggggctgggcgtcgcccatgtcacggtggggggcgatttccgctttggcaagggccgcgcggcgggcacggccgagctgatcgcgctgggtcaacgcctgggctttgacgtcacggtggcgccgcttctgcacatcgacgggatcgaggtctcctcgaccaatatccgcaaggcgctggccgaggggcgggtgcgcgatgcggcgaagatgctcggtcacctgcaccggatcgagggcgaggtgatgcacggcgacaagcgcggccgcgacctgggctttccgaccgcgaacatgtcggtggcgcggctgcatctgcccaagctcggcgtctatgcggtcaaggtcgatgtgctgaccgggccgcaggcgggggcatactttggcgcggccagccttggcgtgcggccgatgtttggcgaaaacgcccccaatctggagactttcctgtttgatttcgaaggcgatctttacggccagcatctttccgtcgcgctggtcgagtatctgcgcccggaaatgaagttcgacggcctgcccgccctgatgaaacagatggcagccgattgcgaaaccgcgcgcgagatcctgcgcacagcctga

SEQ ID NO: 59156 - protein, 307 aa, Rhodobacter capsulatus
MQTYTHWTGLSPEARGASVAMGNFDGVHLGHQSVIDLARGREPLGIITFEPHPREVFAPEAAPFRLMNAEAREHRLAKLGVTRLYELPFGPELAGMDPETFAGKVLAEGLGVAHVTVGGDFRFGKGRAAGTAELIALGQRLGFDVTVAPLLHIDGIEVSSTNIRKALAEGRVRDAAKMLGHLHRIEGEVMHGDKRGRDLGFPTANMSVARLHLPKLGVYAVKVDVLTGPQAGAYFGAASLGVRPMFGENAPNLETFLFDFEGDLYGQHLSVALVEYLRPEMKFDGLPALMKQMAADCETAREILRTA

SEQ ID NO: 59157 - DNA, 924 bp, Gluconobacter oxydans
  CDS (1)..(924): transl_table=11
atgatcctgcatacggactggcgcaatattcctgccgctgcgcgcaatacggttgcggccctgggcaatttcgacggtgtgcatcgcgggcatgtccatctgctcgacacgctgcggatggcgcgtcccgatcatccgctttcggtcgtcacgttcgatccccatccccgcacgctgttccgaccgcaggatccgccgttccgcctgatgctgccggatgtccgtgccgccgctcttggcgagcagggcgtggatcatgtcttccagattccgttcgatgcggagttttcccgtctgagcgccgagcagttcgtgaacgatgttctggtcaacggccttggcgtggcgcatgtggcctgcggggcggatttcgcgttcggccaccgtcgcaccggcaatatcgagcgccttgaaacccttctggcaccccatggaatcgggctgaccatcgtgccccagctttccgatgagggcggtccgatctcttcaagccgcatccgtcgcctgctgcaggaaggttatcccgaacgcgcggcgcaggaacttggccgtccctggagcatcactggtcccgtcatgcacggagaccagcgcggacgcctcctcggtttcccgactgccaacatccccctgacccagcatgtcgagcccgcacgcggcgtctatgccgcgcgcgtcacgctgcccgatggccgcgtcattcccggcgtcgccaatatcggccgccgtccgaccatcaatgatggtcaggaaagccggctcgaagtccatctctttgatttcaacgaggacctgtacggccagattctcagtgtcgccctgatcgccctgctgcgtgaggaaaagcggttctccggtctggacgaactcaagacccagatcgccgcagatgctgcgcaggcccggtccatcctgaacgcctga

SEQ ID NO: 59158 - protein, 307 aa, Gluconobacter oxydans
MILHTDWRNIPAAARNTVAALGNFDGVHRGHVHLLDTLRMARPDHPLSVVTFDPHPRTLFRPQDPPFRLMLPDVRAAALGEQGVDHVFQIPFDAEFSRLSAEQFVNDVLVNGLGVAHVACGADFAFGHRRTGNIERLETLLAPHGIGLTIVPQLSDEGGPISSSRIRRLLQEGYPERAAQELGRPWSITGPVMHGDQRGRLLGFPTANIPLTQHVEPARGVYAARVTLPDGRVIPGVANIGRRPTINDGQESRLEVHLFDFNEDLYGQILSVALIALLREEKRFSGLDELKTQIAADAAQARSILNA

SEQ ID NO: 59159 - DNA, 21 bp, Artificial sequence
  primer
atggtgttgcgtcaggtgatg

SEQ ID NO: 59160 - DNA, 21 bp, Artificial sequence
  primer
ttaaggaatcgccccatccag

SEQ ID NO: 59161 - protein, 389 aa, Artificial sequence
  consensus sequence
  Variant (2)..(2): Xaa in position 2 is any amino acid
  Variant (8)..(8): Xaa in position 8 is any amino acid
  Variant (11)..(21): Xaa in position 11 to 21 is any amino acid
  Variant (22)..(78): Xaa in position 22 to 78 is any or no amino acid
  Variant (80)..(81): Xaa in position 80 to 81 is any amino acid
  Variant (83)..(83): Xaa in position 83 is any amino acid
  Variant (85)..(85): Xaa in position 85 is any amino acid
  Variant (87)..(89): Xaa in position 87 to 89 is any amino acid
  Variant (91)..(96): Xaa in position 91 to 96 is any amino acid
  Variant (97)..(109): Xaa in position 97 to 109 is any or no amino acid
  Variant (111)..(123): Xaa in position 111 to 123 is any amino acid
  Variant (125)..(132): Xaa in position 125 to 132 is any amino acid
  Variant (134)..(144): Xaa in position 134 to 144 is any amino acid
  Variant (146)..(148): Xaa in position 146 to 148 is any amino acid
  Variant (149)..(149): Xaa in position 149 is any or no amino acid
  Variant (151)..(151): Xaa in position 151 is any amino acid
  Variant (152)..(153): Xaa in position 152 to 153 is any or no amino acid
  Variant (155)..(161): Xaa in position 155 to 161 is any amino acid
  Variant (163)..(163): Xaa in position 163 is any amino acid
  Variant (166)..(166): Xaa in position 166 is any amino acid
  Variant (169)..(170): Xaa in position 169 to 170 is any amino acid
  Variant (172)..(172): Xaa in position 172 is any amino acid
  Variant (174)..(174): Xaa in position 174 is any amino acid
  Variant (175)..(177): Xaa in position 175 to 177 is any or no amino acid
  Variant (179)..(184): Xaa in position 179 to 184 is any amino acid
  Variant (185)..(188): Xaa in position 185 to 188 is any or no amino acid
  Variant (190)..(198): Xaa in position 190 to 198 is any amino acid
  Variant (199)..(218): Xaa in position 199 to 218 is any or no amino acid
  Variant (221)..(222): Xaa in position 221 to 222 is any amino acid
  Variant (223)..(223): Xaa in position 223 is any or no amino acid
  Variant (225)..(226): Xaa in position 225 to 226 is any amino acid
  Variant (228)..(234): Xaa in position 228 to 234 is any amino acid
  Variant (236)..(238): Xaa in position 236 to 238 is any amino acid
  Variant (241)..(246): Xaa in position 241 to 246 is any amino acid
  Variant (248)..(248): Xaa in position 248 is any amino acid
  Variant (250)..(251): Xaa in position 250 to 251 is any amino acid
  Variant (253)..(255): Xaa in position 253 to 255 is any amino acid
  Variant (257)..(257): Xaa in position 257 is any amino acid
  Variant (259)..(260): Xaa in position 259 to 260 is any amino acid
  Variant (262)..(262): Xaa in position 262 is any amino acid
  Variant (267)..(273): Xaa in position 267 to 273 is any amino acid
  Variant (274)..(276): Xaa in position 274 to 276 is any or no amino acid
  Variant (278)..(278): Xaa in position 278 is any amino acid
  Variant (279)..(279): Xaa in position 279 is any or no amino acid
  Variant (282)..(299): Xaa in position 282 to 299 is any amino acid
  Variant (300)..(325): Xaa in position 300 to 325 is any or no amino acid
  Variant (327)..(327): Xaa in position 327 is any amino acid
  Variant (331)..(338): Xaa in position 331 to 338 is any amino acid
  Variant (339)..(341): Xaa in position 339 to 341 is any or no amino acid
  Variant (343)..(346): Xaa in position 343 to 346 is any amino acid
  Variant (348)..(352): Xaa in position 348 to 352 is any amino acid
  Variant (353)..(353): Xaa in position 353 is any or no amino acid
  Variant (356)..(359): Xaa in position 356 to 359 is any amino acid
  Variant (361)..(366): Xaa in position 361 to 366 is any amino acid
  Variant (368)..(368): Xaa in position 368 is any amino acid
  Variant (370)..(371): Xaa in position 370 to 371 is any amino acid
  Variant (373)..(377): Xaa in position 373 to 377 is any amino acid
  Variant (379)..(384): Xaa in position 379 to 384 is any amino acid
  Variant (386)..(388): Xaa in position 386 to 388 is any amino acid
GXFDGVHXGHXXXXXXXXXXXXXXXXXXXXXXXXXXXXXXXXXXXXXXXXXXXXXXXXXXXXXXXXXXXXXXXXXXXXVXXFXPXPXXXFXXXXXXXXXXXXXXXXXXXLXXXXXXXXXXXXXGXXXXXXXXFXXXXXXXXXXXFXXXXLXXXLXXXXXXXGXDFXFGXXRXGXXXXLXXXXXXXXXXVXXXXXXXXXXXXXXXXXXXXXXXXXXXXXSSXXXRXXLXXXXXXXAXXXLGXXXXXXGXVXXGXXXGXRXXGXPTANXXXXXXXXXXPXXGVXXXXXXXXXXXXXXXXXXXXXXXXXXXXXXXXXXXXXXXXXXXXGXRPTXXXXXXXXXXXEXXXXDXXXXXXYGXXXXVXXXXXXRXEXXFXXXXXLXXXXXXDXXXA

SEQ ID NO: 59162 - protein, 15 aa, Artificial sequence
  protein pattern
  Variant (2)..(4): Xaa in position 2 to 4 is any amino acid
  Variant (5)..(5): Xaa in position 5 is Ala or Gly
  Variant (6)..(6): Xaa in position 6 is Arg or Ser
  Variant (7)..(8): Xaa in position 7 to 8 is any amino acid
  Variant (10)..(10): Xaa in position 10 is any amino acid
  Variant (15)..(15): Xaa in position 15 is Ile, Leu, Met or Val
GXXXXXXXGXPTANX

SEQ ID NO: 59163 - protein, 17 aa, Artificial sequence
  protein pattern
  Variant (2)..(2): Xaa in position 2 is any amino acid
  Variant (3)..(3): Xaa in position 3 is Asp or Asn
  Variant (4)..(5): Xaa in position 4 to 5 is any amino acid
  Variant (8)..(9): Xaa in position 8 to 9 is any amino acid
  Variant (11)..(11): Xaa in position 11 is any amino acid
  Variant (13)..(16): Xaa in position 13 to 16 is any amino acid
  Variant (17)..(17): Xaa in position 17 is Leu, Met or Val
GXXXXFGXXRXGXXXXX

SEQ ID NO: 59164 - protein, 21 aa, Artificial sequence
  protein pattern
  Variant (2)..(3): Xaa in position 2 to 3 is Ser or Thr
  Variant (4)..(4): Xaa in position 4 is any amino acid
  Variant (5)..(5): Xaa in position 5 is Ile or Val
  Variant (7)..(8): Xaa in position 7 to 8 is any amino acid
  Variant (9)..(9): Xaa in position 9 is Leu or Val
  Variant (10)..(16): Xaa in position 10 to 16 is any amino acid
  Variant (18)..(20): Xaa in position 18 to 20 is any amino acid
SXXXXRXXXXXXXXXXAXXXL

SEQ ID NO: 59165 - DNA, 882 bp, Synechocystis sp.
  CDS (1)..(882): transl_table=11
atgaaaactgcatgggtattccccggccaaggttcccaagctgtgggcatgggggtagatctgctctcaacggcgatcgccaaggaaaaatatcagcaagccgaagaaattcttggctggtcagtggtggaaaaatgccaaggggatgaagctagcctggccctgacccaaaatacccaaccctgtttgtacgttattgaagcaattttggctgatttgctcagggataaaggttttcagcccgattacgtagccggtcatagtctgggggaatattccgccctctacgccgctggggtatttgattttgccacgggtttgcaactggttaaacaacggtcagaggtgatggccagcgcttccgggggcatgatggccgccctgatgaagttcgatcaaacccagttacagcaagccctgacggataatacagaggttgtattagctaacgataacagccccgaacaggtagtaatttccggtactgtggccggtgtagaagcaattttagccaacgtcaaggcacgccgagccgtgcctctgaaggtttccggtgctttccactccagctttatggcccaaccttcccaatccttcgcccaaaccctgacagcttgccatttcaacgacgccactgtgcccgtactctccaacgttgatcctagccctacccaaaacggcgatcgcctgaaagaaaaactaattcaacaaatgaccggttccgtgcgctggcgggaaaccatggttaacctaggagaaattggggcaacggattattgggaagtgggcccaggcaaagtactgactggtctatgtaaacgaacttgccctgatctgaacctgaaaaatattggccaattagacgacttgaattccctgtaa

SEQ ID NO: 59166 - protein, 293 aa, Synechocystis sp.
MKTAWVFPGQGSQAVGMGVDLLSTAIAKEKYQQAEEILGWSVVEKCQGDEASLALTQNTQPCLYVIEAILADLLRDKGFQPDYVAGHSLGEYSALYAAGVFDFATGLQLVKQRSEVMASASGGMMAALMKFDQTQLQQALTDNTEVVLANDNSPEQVVISGTVAGVEAILANVKARRAVPLKVSGAFHSSFMAQPSQSFAQTLTACHFNDATVPVLSNVDPSPTQNGDRLKEKLIQQMTGSVRWRETMVNLGEIGATDYWEVGPGKVLTGLCKRTCPDLNLKNIGQLDDLNSL

SEQ ID NO: 59167 - DNA, 1357 bp, Arabidopsis thaliana
  CDS (79)..(1182)
atgcgttcactgcttcaccgtactatcttactcacatctccgtctcattctcttatccggcgcacttctctctccgccatggccaccaccgcctcctcttccttgctcctcccttccatatctctcaacaatctctcctcctctaaaaatgcctcctttggcttcgccgccaagaatctcagccgatctaggatttctatgagcgtctctgctggatctcagagtactactgttcacgattctctgttcgctgattacaaacccacctctgcttttctctttcccggtcagggagctcaagcagtaggaatgggaaaagagtctcagagtgttggagcagctggagagttgtataagaaagctaatgatatcttagggtatgatcttttggatatttgtgttaatggaccaaaagagaagcttgattctacggtcataagccagcctgctatttatgtcacaagtttagcagcagttgaattgctccgtgttcgtgaaggcggagaacaaataattaactcggttgatgtgacttgcggtctcagtttgggagagtatactgctctggcttttgctggagccttcagcttcgaggacgggctgaagcttgtaaaacttagaggagaagctatgcaggctgctgcagatgctgctaagagtgccatggttagtatcatagggttggactcagaaaaggttcagcagttgtgtgatgcagcaaatcaagaagtagatgaagctgacaaagttcagatcgcaaattacttatgtccgggtaattacgcagtatctggaggtcttaaaggaatcgaagttgttgaagccaaagctaagtcattcaaagcacgaatgacggtgcgtctagctgttgcaggtgctttccacactagtttcatggaaccagcagtctcgagattagaagctgcattggcagccacagagatcagaagtccgaggatcccagtgatctcgaatgtcgatgcacagcctcatgcagatccagacacgatcaagaagatacttgcacgccaggtgacatctccagtccaatgggagacaacagtaaagactctcttatccaaaggacttaaaagcagctacgaattgggacctggaaaggtaattgcagggatattcaagagagtagataaaagcgcaagtttcgaaaacatcagtgcttgagagtattgctagctttttgttcacatgtatttgagttgagaatcattgataataagtaaatttacaacgtatgtctgtggatctctctagtgcttcaatagtttggaattcaaagttttgtatggaatatttatgtgacactttacaggatatatgtattgagatatctttttag

SEQ ID NO: 59168 - protein, 367 aa, Arabidopsis thaliana
MATTASSSLLLPSISLNNLSSSKNASFGFAAKNLSRSRISMSVSAGSQSTTVHDSLFADYKPTSAFLFPGQGAQAVGMGKESQSVGAAGELYKKANDILGYDLLDICVNGPKEKLDSTVISQPAIYVTSLAAVELLRVREGGEQIINSVDVTCGLSLGEYTALAFAGAFSFEDGLKLVKLRGEAMQAAADAAKSAMVSIIGLDSEKVQQLCDAANQEVDEADKVQIANYLCPGNYAVSGGLKGIEVVEAKAKSFKARMTVRLAVAGAFHTSFMEPAVSRLEAALAATEIRSPRIPVISNVDAQPHADPDTIKKILARQVTSPVQWETTVKTLLSKGLKSSYELGPGKVIAGIFKRVDKSASFENISA

SEQ ID NO: 59169 - DNA, 1357 bp, Arabidopsis thaliana; identical to SEQ ID NO: 59167
  CDS (199)..(1182)

SEQ ID NO: 59170 - protein, 327 aa, Arabidopsis thaliana
MSVSAGSQSTTVHDSLFADYKPTSAFLFPGQGAQAVGMGKESQSVGAAGELYKKANDILGYDLLDICVNGPKEKLDSTVISQPAIYVTSLAAVELLRVREGGEQIINSVDVTCGLSLGEYTALAFAGAFSFEDGLKLVKLRGEAMQAAADAAKSAMVSIIGLDSEKVQQLCDAANQEVDEADKVQIANYLCPGNYAVSGGLKGIEVVEAKAKSFKARMTVRLAVAGAFHTSFMEPAVSRLEAALAATEIRSPRIPVISNVDAQPHADPDTIKKILARQVTSPVQWETTVKTLLSKGLKSSYELGPGKVIAGIFKRVDKSASFENISA

SEQ ID NO: 59171 - DNA, 897 bp, Synechococcus sp. WH 7803
  CDS (1)..(897): transl_table=11
atgtcgatcgcctgggtgtttcctggtcaggggtctcagaaagtcggaatggctgatgcggtgctcagcctccctggcgccgaagagcgcttcgccttggcgtcgaggctgctgggtcgtgatctgctggcgatttgtcgcggcgaggctggagacggggatgatcccgttgatttgaatgacacgcgcaacacccagcccgcgctgttcgtggtcgaatcgctgatcgtggatgagttgcggcggcaggggcgcgagcctgcgctcgtcgccggccacagcctcggtgaactggtcgccctctatgccgctggggtcttcgatgccgacaccggtcttgaactgatgcaacgccggtctgagttgatggccggcgctggcggcggagccatggccgccgtgatcggattcgaacgcagtcagctcgacgaactggtcaatgcaacggaaggggtggtgatcgccaacgacaacagtgcagcccaggtggtgttgtcaggcacagctgacgctgtggcggcggttggcgacgccctcacctgcaaacgggtgatccccctggctgtgtcgggtgcctttcattcgcccttcatgcaagacgcggcggatgccttctcgcagcacttgaacgatctggcctttgaggatgcgcgcgtccctgtgctgagcaacacggatcccaccccttgcgtggatgcggttgaactcaagcgccgcctgcaccgccagatgatcacaggcgtccgctggcgtgaaaccatgctggcgatgggcgaagccggggtggagaccctggtggaagtcggtccaggggctgttctcagcggattggccaaacgcgccatgcccgggatcacgctgtctcagctcgctggagccgacgatctcggtctctga

SEQ ID NO: 59172 - protein, 298 aa, Synechococcus sp. WH 7803
MSIAWVFPGQGSQKVGMADAVLSLPGAEERFALASRLLGRDLLAICRGEAGDGDDPVDLNDTRNTQPALFVVESLIVDELRRQGREPALVAGHSLGELVALYAAGVFDADTGLELMQRRSELMAGAGGGAMAAVIGFERSQLDELVNATEGVVIANDNSAAQVVLSGTADAVAAVGDALTCKRVIPLAVSGAFHSPFMQDAADAFSQHLNDLAFEDARVPVLSNTDPTPCVDAVELKRRLHRQMITGVRWRETMLAMGEAGVETLVEVGPGAVLSGLAKRAMPGITLSQLAGADDLGL

SEQ ID NO: 59173 - DNA, 1164 bp, Oryza sativa (japonica cultivar-group)
  CDS (1)..(1164)
atgctccgctgcccgcctcctcgccgcctctgcctccgcctcggctcgccggtgtctacgatggcctccacgctcgccttcctcaggccctccgcgccggccccgctcgcagcctcgcgcggcgccgcgaggggcgtccccgcggccgtgagggtgccgtgcagatctagggtctcggcggccggcgtgtccctcggatcggaggtggcggtgggctccgacgcgctcttcgccgactacaagcccaccaccgcattcctcttccccggccagggtgctcagactgttgggatgggtgcagaagcagtgaatgttcctgcagctgccaaactatttgataaggcaaatgatatacttgggtatgacttgttggatttttgcaccaatggaccaaaagaaaagcttgactcgacagtaatcagtcagccagctatatatgtcaccagccttgcagccgtagaggtactacgctcacgtgatggaggccaaaatgtaattgactctgtagatgtcacatgcggtctcagcttaggggaatacactgcacttgcatttgctggtgcctttagctttgaggatggtctgaagcttgtcaagcttagaggagaagccatgcaggatgcttcagatgctgccagcagtgctatggtcagtgtgattggtctagattcagagaaggtgcagcaattatgcgatgctgctaacgaggaagtagatgaaaaggaaagagttcaaatagcaaactttctgtgtcctgggaactatgcagtttctggtggtgtgaaggggattgaagcagtcgaagccaaagcaaagtcctttaaggccagaatgacggtgcgcctagctgttgctggtgctttccatacaagcttcatgcaacctgctgtttcaagattggaatctgcattagctgagacagagataaaaacaccaagaatcccagttatctccaatgtggatgcatcaccccactcagatcctgacacaatcaagaagattttggcgcgacaggtaacttcccctgtgcaatgggagagtaccgtgaagactctgatgggtaaaggacttgagaaaagctatgaacttggtcctggaaaggttatagcaggaattcttaaaaggattgacaaaggcgcaagcattgagaacattggtgcatga

SEQ ID NO: 59174 - protein, 387 aa, Oryza sativa (japonica cultivar-group)
MLRCPPPRRLCLRLGSPVSTMASTLAFLRPSAPAPLAASRGAARGVPAAVRVPCRSRVSAAGVSLGSEVAVGSDALFADYKPTTAFLFPGQGAQTVGMGAEAVNVPAAAKLFDKANDILGYDLLDFCTNGPKEKLDSTVISQPAIYVTSLAAVEVLRSRDGGQNVIDSVDVTCGLSLGEYTALAFAGAFSFEDGLKLVKLRGEAMQDASDAASSAMVSVIGLDSEKVQQLCDAANEEVDEKERVQIANFLCPGNYAVSGGVKGIEAVEAKAKSFKARMTVRLAVAGAFHTSFMQPAVSRLESALAETEIKTPRIPVISNVDASPHSDPDTIKKILARQVTSPVQWESTVKTLMGKGLEKSYELGPGKVIAGILKRIDKGASIENIGA

SEQ ID NO: 59175 - DNA, 948 bp, Mesorhizobium loti MAFF303099
  CDS (1)..(948): transl_table=11
atggccgtcgcattcacctttccgggacaaggcagccaggctgtcggcatgggcaaggacctcgccgatgcctttcccgaggcgcgcagggtcttccaggaagtcgacgacgcgctcggcgagaacctgtcgaagctgatctgggaaggtccggaggagaccttgacgctgacggccaatgcgcagccggcgctgatggcggtttcgttggcggcgatcagggcgctggaagcgcgcggtttttcgctgaaggacaaggtcgcctatgtcgccggccattcgctgggcgaatattcggcccttgccgcagccggcttcgtttccgtcgccgatgcggcccggctgctgcgcattcgtggcaacgccatgcaggcggcggtgccggccggcgagggcgccatggcggcgatcatcggactggagcagccagatgtcgaagccgcttgcatcgaggccgcgcaaggggccagcaaggtctgccagatcgccaatgacaatggcggcggccagctggtcatctccggcgccaaggccgcggtcgagctggctgccaaattgtgcaccgaaaagggcgccaagcgggctctgatgctgcaggtctcggcgcccttccattcggcgctgatggcaccggctgccaatgtcatgcgcgaggcgctcgccggtgtgacgaagcatgcgccgggggtgccagtggtgtccaacgtcacggtgaccccgaccagcgatcccgacgagatcgcccggcgcctggtcgagcagatcaccggccgcgtgcgctggcgcgaaacagtcgaatggttcggcgccaacggcgtcaccacgctttacgagatcggcgccggcaaggtgctgtcgggcctggctcggcgcatcaaccgcgacatcgcgacatcggccgtcggcacgccggccgatgtcgaggccgcgctggccacattcgcataa

SEQ ID NO: 59176 - protein, 315 aa, Mesorhizobium loti MAFF303099
MAVAFTFPGQGSQAVGMGKDLADAFPEARRVFQEVDDALGENLSKLIWEGPEETLTLTANAQPALMAVSLAAIRALEARGFSLKDKVAYVAGHSLGEYSALAAAGFVSVADAARLLRIRGNAMQAAVPAGEGAMAAIIGLEQPDVEAACIEAAQGASKVCQIANDNGGGQLVISGAKAAVELAAKLCTEKGAKRALMLQVSAPFHSALMAPAANVMREALAGVTKHAPGVPVVSNVTVTPTSDPDEIARRLVEQITGRVRWRETVEWFGANGVTTLYEIGAGKVLSGLARRINRDIATSAVGTPADVEAALATFA

SEQ ID NO: 59177 - DNA, 939 bp, Pasteurella multocida subsp. multocida str. Pm70
  CDS (1)..(939): transl_table=11
atgaaaaaatttgcaatggtttttccaggacaaggctctcaagctgtaggaatgttagcagaattagccacagaatatcctgtggtggaagagacctttaaacaagcttcggatgtgttaggttatgacttgtggcaacttgtgcaacaaggacctgcggaagaactgaataaaacttggcaaactcaaccagcactgttagccgcatctgttgctatttatcgtgtatggcaagagaaatatcctcatttgaagccagacgtgatggctggacatagtttaggtgaatattctgctttagtatgcgcgggcgcacttgatttccaagatgcagtcaaattagtggagctgcgtggtaaattaatgcaacaagcggttcccgaagggaccggtgcgatgtatgcgattattggtttagataatgaagccatcatcagtgcctgtgccgacgcagcgcaaggcgaggtggtgtctgcggtgaattttaactcgccggggcaagtggtgatcgcgggagcaaaagcagcggttgaacgtgctgcagctgcttgtaaagacgccggggcaaaacgtgccctgcctttagcggtaagtgtgccttctcattgtgcgttaatgaaaccagcagcagatcaattagccgtgtctttagataatattgcgattagaacaccaactacagcggttatcaataatgtggatgtcgcgtgtgaaacggaaaatagtgaaattcgtcacgcacttgttcgtcaattatatagtccagtgcgttggacagaaaccgttgaacgtatggcaaaagatggcgtgcaggttttagttgaagtcggtccaaacaaagtcttgacggggttaacaaaacgtatcgtcgctgatttacaagctactgcggttaatgatctgacatcattaaatgcggttgatgaactattcgcttaa

SEQ ID NO: 59178 - protein, 312 aa, Pasteurella multocida subsp. multocida str. Pm70
MKKFAMVFPGQGSQAVGMLAELATEYPVVEETFKQASDVLGYDLWQLVQQGPAEELNKTWQTQPALLAASVAIYRVWQEKYPHLKPDVMAGHSLGEYSALVCAGALDFQDAVKLVELRGKLMQQAVPEGTGAMYAIIGLDNEAIISACADAAQGEVVSAVNFNSPGQVVIAGAKAAVERAAAACKDAGAKRALPLAVSVPSHCALMKPAADQLAVSLDNIAIRTPTTAVINNVDVACETENSEIRHALVRQLYSPVRWTETVERMAKDGVQVLVEVGPNKVLTGLTKRIVADLQATAVNDLTSLNAVDELFA

SEQ ID NO: 59179 - DNA, 939 bp, Pseudomonas aeruginosa PAO1
  CDS (1)..(939): transl_table=11
atgtctgcatccctcgcattcgtcttccctggccagggttcgcaatccctcggcatgctggccgagctgggcgcccagcaggcgctggtgcgcgataccttcgccgaggcctccgaggcgctcggttacgacctttgggcgctggtccagaatggtcctgaagagcgcctgaaccagaccgacaagacccagccggccatccttacggtttcgatcgcgctctggcgcctctggctggccgagggcggtgcgcgcccggcgttcgtcgccgggcacagcctgggcgaatattccgcgctggtcgcggccgaaagcctggcgttcgccgatgcggtcaagctggtcgagcgtaggggccaactgatgcagcaggcggttccggcggggcagggcggcatggccgcgatccttggcctggaagacgccgatgtattggcggcctgtgccgaggcggcccagggcgaggtggtcagcgcggtcaacttcaacgcgccggggcaggtagtgatcgccggtgccgcggctgccgttgagcgtgccatcgaggcatgcaaggcacgcggcgccaagcgcgcggtggcgttgccagtcagcgtgccgtcgcattgcgaactgatgcgtccggccgccgagcagttcgccgcctcggtcgaaagcctgcagtggcaggcgccgaagatttcgctggtgcagaacgtcagcgccgccgtgccggctgatctcgatacgctgcgccgcgacctgctggcacagctgtacagcccggttcgctgggtggagagcatccagctgctggcggaaaagggcgtcaccgagctggtcgagtgcgggccgggcaaggtcctggcaggcctcaacaggcgctgcgcgaagggcatcaatacccatggcctggatggcgtcgaggcgttcgccgccacgcgcgccgccctggcctga

SEQ ID NO: 59180 - protein, 312 aa, Pseudomonas aeruginosa PAO1
MSASLAFVFPGQGSQSLGMLAELGAQQALVRDTFAEASEALGYDLWALVQNGPEERLNQTDKTQPAILTVSIALWRLWLAEGGARPAFVAGHSLGEYSALVAAESLAFADAVKLVERRGQLMQQAVPAGQGGMAAILGLEDADVLAACAEAAQGEVVSAVNFNAPGQVVIAGAAAAVERAIEACKARGAKRAVALPVSVPSHCELMRPAAEQFAASVESLQWQAPKISLVQNVSAAVPADLDTLRRDLLAQLYSPVRWVESIQLLAEKGVTELVECGPGKVLAGLNRRCAKGINTHGLDGVEAFAATRAALA

SEQ ID NO: 59181 - DNA, 996 bp, Agrobacterium tumefaciens str. C58
  CDS (1)..(996): transl_table=11
atggaagtccgaaagaataaaggcaaggccagacaagaaggacgacatcccatgggtattgcattcacatttcccggtcagggaagccaggccgtcggcatgggcaaggagctggcggacacctacccggaagcgcgcgccgtgtttcaggaagtcgacgacgcgctcgaccagaagctttccgacatcatgtggaacggaccggaagaaacgctgacgctgacggccaacgctcagccggcgctcatggccgtttcgatggcggtgatgcgcgttctggaagcgcgtggcctgaagctgtccgatacggtgtcttatgtggccggccattcgctcggtgaatattcggcgctctgtgccgccggcaccttctcgattgccgataccgcccgtcttctgcgcatccgcggcaatgccatgcaggccgccgtgccggtcggcgagggtgccatggctgcaatcatcgggctcgagcacgatgccgtttccgccatttgcgaggaagccggcattctcggcgtctgccagatcgccaacgacaatggcggcggccagctggtcatttctggtagcaagactgccgttgaaaaggccgcagcgatcgcttccgaaaagggcgccaagcgcgccatcatgctgccggtttccgcccccttccactccgcgctgatggcgccggcggcggaagcgatgcgcgaggcgctggcgaaagttgaaaagcacaatccggtcgtgcctgttgtcgccaatgtgcgcgccgctcccgtttccgacgccaatgagattgccgctttgctggtcgagcaggtgacgggccaggtgcgctggcgcgagacggtggaatggtttgccgccaataacgtgacccagctttacgaaatcggctccggcaaggtgctgacaggccttgcccgccgtatcgacaagacggtgaacggcgttgccgtcaacggtgcggccgatatcgaccagctgctagccacgcttatcggctaa

SEQ ID NO: 59182 - protein, 331 aa, Agrobacterium tumefaciens str. C58
MEVRKNKGKARQEGRHPMGIAFTFPGQGSQAVGMGKELADTYPEARAVFQEVDDALDQKLSDIMWNGPEETLTLTANAQPALMAVSMAVMRVLEARGLKLSDTVSYVAGHSLGEYSALCAAGTFSIADTARLLRIRGNAMQAAVPVGEGAMAAIIGLEHDAVSAICEEAGILGVCQIANDNGGGQLVISGSKTAVEKAAAIASEKGAKRAIMLPVSAPFHSALMAPAAEAMREALAKVEKHNPVVPVVANVRAAPVSDANEIAALLVEQVTGQVRWRETVEWFAANNVTQLYEIGSGKVLTGLARRIDKTVNGVAVNGAADIDQLLATLIG

SEQ ID NO: 59183 - DNA, 867 bp, Bacillus subtilis subsp. subtilis str. 168
  CDS (1)..(867): transl_table=11
atgatcacatatgtttttccaggtcagggttcacaaaaacagggaatgggcagcggcctattcgatgaatttaaagaactgacggatcaggcagatgagatcttaggatattctatcaaacgtctttgcctggaaaatccttattccaatttaaacaaaacgcaatttactcagccggcattatatgtggtaaacgcactaagctatctgaaaaaaatcagggatgaagaagttaaacctgactttgtcgccgggcacagcttgggtgaatacaatgcgttatttgcagctgaagcctttgattttgagacaggtttacagcttgtcagaaaaagaggcgagctgatgagtctgataagcaacggcggtatggcagctgttatgggactaaatgaagagcaggttgcaaaggctctgaaagaatatcatttacatgatgttgatatcgctaatgtgaatgccccatatcaaattgtaatttcaggaaaaaaagatgagattgaaaaagccgcatctctttttgaaacgatgactgaagttacaatggtactccccttaaacgtaagcggcgcgtttcattccagatacatgaataaagcaaaagaagaattcgaggagttccttcatgccttttatttttcgcctccgtctatcccggttatttctaatgtgtatgccaaaccgtatacatacgaattcatgaaacagacgctggctgatcaaattaatcattcagtgaaatggactgacagcataagctacttaatgaaaaaaggccatatggagtttgaggaggtagggcctggaaatgttttaactgggttaattcatcgcataaagaaagatgcggaagcaatgccccgctaa

SEQ ID NO: 59184 - protein, 288 aa, Bacillus subtilis subsp. subtilis str. 168
MITYVFPGQGSQKQGMGSGLFDEFKELTDQADEILGYSIKRLCLENPYSNLNKTQFTQPALYVVNALSYLKKIRDEEVKPDFVAGHSLGEYNALFAAEAFDFETGLQLVRKRGELMSLISNGGMAAVMGLNEEQVAKALKEYHLHDVDIANVNAPYQIVISGKKDEIEKAASLFETMTEVTMVLPLNVSGAFHSRYMNKAKEEFEEFLHAFYFSPPSIPVISNVYAKPYTYEFMKQTLADQINHSVKWTDSISYLMKKGHMEFEEVGPGNVLTGLIHRIKKDAEAMPR

SEQ ID NO: 59185 - DNA, 945 bp, Caulobacter crescentus CB15
  CDS (1)..(945): transl_table=11
atgagcatcgccttcattttcccgggtcagggcagtcagtcggtcggcatgggcgccgatctcgccgaagcgttcagcgcggcgcgcgaagtcttccaggaggttgatgacgccctgggccaaaagctgttcgccctgatgaaggaaggtcccgaaggcgacctgacgctgaccgagaacgcccagccggccctgatggccgtcagcctggcggtgacgcgcacgctggagaaggaattcggcgtcggcatcgacaaggccgccttcgtcgccggtcactcgctgggtgagtactcggccctggccgccgccggcgccatcagcctgtcggacactgcgcgcctcctgaagctgcgcggccaggccatgcagcgcgccgtgccggtgggcgagggcgcgatggcctcgctgatcgggcccaagacggatctggccttggccgaagccgccgccgccgccggctcggaagtcggcgtctgcgtcgtggccaatgacaacaacaacggcaatgtcgtgatctcgggcgccaaggccgccgtcgacaaggccatcgagaaggccaaggaactgggcgcacgggccattccgctgaacgtctcggcgcccttccactgcccgctgatgcagccggccgccgacgagatggcgaccgccctggccgccgcgaccatcgtcgccccgcgcgcgccgctggtggccaatgtcaccgccgcgccgatccatgatccggacgtgatccgcaagctgctggtcgagcaggtcaccggccgcgtccgctggcgcgaaagcatgacctggatggcgaccgaaggcggtgtcacgcgtttcgccgaggccggcgccggcaaggtgctgtcgggcatggccaagcgcatcgccccggacgctgaagctgttcccctcaacacgccggcggacctcgaagcgttcgccaagtcgctctaa

SEQ ID NO: 59186 - protein, 314 aa, Caulobacter crescentus CB15
MSIAFIFPGQGSQSVGMGADLAEAFSAAREVFQEVDDALGQKLFALMKEGPEGDLTLTENAQPALMAVSLAVTRTLEKEFGVGIDKAAFVAGHSLGEYSALAAAGAISLSDTARLLKLRGQAMQRAVPVGEGAMASLIGPKTDLALAEAAAAAGSEVGVCVVANDNNNGNVVISGAKAAVDKAIEKAKELGARAIPLNVSAPFHCPLMQPAADEMATALAAATIVAPRAPLVANVTAAPIHDPDVIRKLLVEQVTGRVRWRESMTWMATEGGVTRFAEAGAGKVLSGMAKRIAPDAEAVPLNTPADLEAFAKSL

SEQ ID NO: 59187 - DNA, 942 bp, Listeria monocytogenes EGD-e
  CDS (1)..(942): transl_table=11
atgactaaaattgcatttgtatttcccggtcaaggagcacaaaaagttggcatgggacaagatgtagcagcggaatatcctgaagcaaaaaaaatctatgatgatgctgacgaaagactagggttttcaatcacagaaattattacagaaggtccaattgaattattaacgaaatccgaaaacgcacaaccagcattagtttccacaagtgtcgctattttacgtgcactggaaacgtatggtgtgaaagctgattacgtagcgggacatagtcttggtgaatatagtgcacttgttgcaggcggatttttagaagcaagtgatgcgatttatcttgtacgtaaacgcggtgaattaatggaagcagctgtaccaaatggtgctggcgcaatggctgcagttcttggtgtagaccgggaaacattaaaaacaatcaccgaagaagtaactaaagaaggcgatgcagtacaacttgctaaccttaactgcccaggacaaatcgttatttccggaacaacagctggcgttgaaaaagcaggcgaaaaagcaaaagaaagtggcgcaaaacgcgtattaccacttgctgttagcggacctttccactctagcttaatggaaccagccgcacttgctttccgtgatgttttagcagaggttaaaatttctgatggtcagattccagtggttaataacgtggatgctaaagaaactacggataaatccgaaattagcgataaactaatcaagcaaatctattctccagtattatgggaagatatcgtcgaagaattaattaaaaacggcgtagatacgtttgtcgaaattggttctggaaaagtcttagcaggtttaattaagaaaatcaatcgtgatgtaactgtactgtcagcaggtgacgctgaatcagtgaaaagcgttgcagcaactttgaaaggagaataa

SEQ ID NO: 59188 - protein, 313 aa, Listeria monocytogenes EGD-e
MTKIAFVFPGQGAQKVGMGQDVAAEYPEAKKIYDDADERLGFSITEIITEGPIELLTKSENAQPALVSTSVAILRALETYGVKADYVAGHSLGEYSALVAGGFLEASDAIYLVRKRGELMEAAVPNGAGAMAAVLGVDRETLKTITEEVTKEGDAVQLANLNCPGQIVISGTTAGVEKAGEKAKESGAKRVLPLAVSGPFHSSLMEPAALAFRDVLAEVKISDGQIPVVNNVDAKETTDKSEISDKLIKQIYSPVLWEDIVEELIKNGVDTFVEIGSGKVLAGLIKKINRDVTVLSAGDAESVKSVAATLKGE

SEQ ID NO: 59189 - DNA, 879 bp, Nostoc sp. PCC 7120
  CDS (1)..(879): transl_table=11
atgacaaaaaccgcatgggtgttccccggacaaggttctcaagcactggggatgggaacagacttactagatataccaactgccaaagaaaaatttgctcaagctgaagcaatcttaggctggtctgtaagcgaaatctgccaaaacgaagaaaaattatcacagacactctacacccaacccagtctttatgtagtagagagtatccttgcagacctgacaaaagaacggggacaccagccagatttagttgctggtcatagtttaggagaatacatcgccctttacgttgccggcgtttttgagtggtcagctggtttaaaactagtcaagcgacgagctgaactcatggatagcgccgcaggcggcatgatggcggctatgatgaattttgaccgcgaacagttggaaacagtaatttcccagactcctgatgtggtgctagcaaacgataatagtccggcgcaagttgttatatccggtactccagaagctgtgcagacagttatgtctcaagtcaaagccaagcgtgctgtcccgttgaaagtttcgggagcatttcattcacacctcatgaatacggctgctgtagagttccaagaaattctggaaactgtagaatttcaacaggctagtgtacccgtattatcaaacgtcgagccagcgccggctgttgatgccgctattttaaaacaacgccttagccaacagatgactggttcagtgcgctggcgagaaatttctttaacattaccagccaacggcattgagaaagtcgtggaaatcggccctggtaatgtactaacaggtttgattaaacgcactactgctgatttaattttaaaaaacatccgcaacgctgcggaattaccaaattag

SEQ ID NO: 59190 - protein, 292 aa, Nostoc sp. PCC 7120
MTKTAWVFPGQGSQALGMGTDLLDIPTAKEKFAQAEAILGWSVSEICQNEEKLSQTLYTQPSLYVVESILADLTKERGHQPDLVAGHSLGEYIALYVAGVFEWSAGLKLVKRRAELMDSAAGGMMAAMMNFDREQLETVISQTPDVVLANDNSPAQVVISGTPEAVQTVMSQVKAKRAVPLKVSGAFHSHLMNTAAVEFQEILETVEFQQASVPVLSNVEPAPAVDAAILKQRLSQQMTGSVRWREISLTLPANGIEKVVEIGPGNVLTGLIKRTTADLILKNIRNAAELPN

SEQ ID NO: 59191 - DNA, 945 bp, Brucella melitensis 16M
  CDS (1)..(945): transl_table=11
atggcggtagcattcactttcccagggcagggcagccaggcggttggcatgggcaaggctctggccgaacaatttgccgaagcgcgcgccgttttcgatgaagtggatgaggcgctgggcgaaaagctttccgccaccatgttcgaggggccggaagatgtgctgacgctgacggccaatgcgcagcctgcgctgatggcggtttccatggcggtccagcgcatcatggaagcgcgcggcttttcgctgaaggacaaggtttcttatgtcgccggtcattcgcttggcgaatattcggctctgtgcgctgctggcacgttttcacttgccgacacggcgcgtctcttgcgcattcgcggcaatgccatgcagaaggcggttccggtcggcgaaggcgctatggcggcgatcatcggtctggaacacggcgatgtggaggctgtctgcatggaagcaaaggcttccggcccggtccagatcgccaatgacaatggcggcggccagcttgtcatatccggggccagggcggccgttgaactggccgcgaagcttggctctgaaaagggtgcaaagcgcgccatcatgctgccggtatccgctcccttccattcgaccctgatggcaccggcggctgatgccatgcgcgaggcgcttgcagcggttgaaaagcatgattcggtcgtgccgcttatcgccaatgtgcgcgcggcccccgtgaccgacgctaacgagatcgccgccctgctggtcgagcaggtgacgggccaggtgcgctggcgcgaaactatcgagtggttttctgccaatggtgtaaccacgctttatgaagtaggctgcggcaaggttctgacgggtttggcgcggcgcatctccaaggatgtatccggcgctgccgttggttcggctgaggaaatcgaagcagcgcttgctgctcttaacgcttga

SEQ ID NO: 59192 - protein, 314 aa, Brucella melitensis 16M
MAVAFTFPGQGSQAVGMGKALAEQFAEARAVFDEVDEALGEKLSATMFEGPEDVLTLTANAQPALMAVSMAVQRIMEARGFSLKDKVSYVAGHSLGEYSALCAAGTFSLADTARLLRIRGNAMQKAVPVGEGAMAAIIGLEHGDVEAVCMEAKASGPVQIANDNGGGQLVISGARAAVELAAKLGSEKGAKRAIMLPVSAPFHSTLMAPAADAMREALAAVEKHDSVVPLIANVRAAPVTDANEIAALLVEQVTGQVRWRETIEWFSANGVTTLYEVGCGKVLTGLARRISKDVSGAAVGSAEEIEAALAALNA

SEQ ID NO: 59193 - DNA, 1182 bp, Arabidopsis thaliana
  CDS (1)..(1182)
atgcgttcactgcttcaccgtactatcttactcacatctccgtctcattctcttatccggcgcacttctctctccgccatggccaccaccgcctcctcttccttgctcctcccttccatatctctcaacaatctctcctcctctaaaaatgcctcctttggcttcgccgccaagaatctcagccgatctaggatttctatgagcgtctctgctggatctcagagtactactgttcacgattctctgttcgctgattacaaacccacctctgcttttctctttcccggtcagggagctcaagcagtaggaatgggaaaagagtctcagagtgttggagcagctggagagttgtataagaaagctaatgatatcttagggtatgatcttttggatatttgtgttaatggaccaaaagagaagcttgattctacggtcataagccagcctgctatttatgtcacaagtttagcagcagttgaattgctccgtgttcgtgaaggcggagaacaaataattaactcggttgatgtgacttgcggtctcagtttgggagagtatactgctctggcttttgctggagccttcagcttcgaggacgggctgaagcttgtaaaacttagaggagaagctatgcaggctgctgcagatgctgctaagagtgccatggttagtatcatagggttggactcagaaaaggttcagcagttgtgtgatgcagcaaatcaagaagtagatgaagctgacaaagttcagatcgcaaattacttatgtccgggtaattacgcagtatctggaggtcttaaaggaatcgaagttgttgaagccaaagctaagtcattcaaagcacgaatgacggtgcgtctagctgttgcaggtgctttccacactagtttcatggaaccagcagtctcgagattagaagctgcattggcagccacagagatcagaagtccgaggatcccagtgatctcgaatgtcgatgcacagcctcatgcagatccagacacgatcaagaagatacttgcacgccaggtgacatctccagtccaatgggagacaacagtaaagactctcttatccaaaggacttaaaagcagctacgaattgggacctggaaaggtaattgcagggatattcaagagagtagataaaagcgcaagtttcgaaaacatcagtgcttga

SEQ ID NO: 59194 - protein, 393 aa, Arabidopsis thaliana
MRSLLHRTILLTSPSHSLIRRTSLSAMATTASSSLLLPSISLNNLSSSKNASFGFAAKNLSRSRISMSVSAGSQSTTVHDSLFADYKPTSAFLFPGQGAQAVGMGKESQSVGAAGELYKKANDILGYDLLDICVNGPKEKLDSTVISQPAIYVTSLAAVELLRVREGGEQIINSVDVTCGLSLGEYTALAFAGAFSFEDGLKLVKLRGEAMQAAADAAKSAMVSIIGLDSEKVQQLCDAANQEVDEADKVQIANYLCPGNYAVSGGLKGIEVVEAKAKSFKARMTVRLAVAGAFHTSFMEPAVSRLEAALAATEIRSPRIPVISNVDAQPHADPDTIKKILARQVTSPVQWETTVKTLLSKGLKSSYELGPGKVIAGIFKRVDKSASFENISA

SEQ ID NO: 59195 - DNA, 951 bp, Streptomyces coelicolor A3(2)
  CDS (1)..(951): transl_table=11
gtgctcgtactcgtcgctcccggccagggcgcccagacgcccggcttcctgactgactggctcgccctccccggtgccgctgaccgcgtcgccgcgtggtcggacgccatcggactcgatctcgcccacttcggcaccaaggccgacgcggacgagatccgagacacgtccgtggcccagccgctgctggtcgccgccggaatcctgtccgccgcggcactcggtacgcagacatctgtcgctgacgcgacgggccccgggttcacccccggcgcggtcgccggacacagcgtcggcgagatcaccgccgccgtcttcgcgggcgtcctcgacgacaccgccgcgctgtccctcgtacgccgtcgcggcctggccatggccgaggccgcggcggtcaccgagaccggcatgtcggcgctgctcgggggcgaccccgaggtgagcgtcgcgcacctggagcggctcggcctgaccccggcgaacgtgaacggcgccggtcagatcgtggcggcgggcaccatggagcagctggccgcgctgaacgaggacaagcccgagggtgtgcgcaaggtcgtcccgctgaaggtggccggcgcgttccacacccgccacatggcccccgccgtggacaagctcgccgaggccgccaaggcgctgacgccggccgacccgaaggtgacgtacgtctccaacaaggacgggcgggccgtcgcctccggcaccgaggtgctggaccggctggtcggccaggtcgccaacccggtgcgctgggacctgtgcatggagacgttcaaggagctgggcgtcaccgcgatcatcgaggtgtgtccgggcggcacgctgaccgggctggccaagcgggcgctgcccggagtgaagacgctggccctgaagacccccgacgacctcgacgcggcccgtgagctcgtcgccgagcacacccaggcctga

SEQ ID NO: 59196 - protein, 316 aa, Streptomyces coelicolor A3(2)
MLVLVAPGQGAQTPGFLTDWLALPGAADRVAAWSDAIGLDLAHFGTKADADEIRDTSVAQPLLVAAGILSAAALGTQTSVADATGPGFTPGAVAGHSVGEITAAVFAGVLDDTAALSLVRRRGLAMAEAAAVTETGMSALLGGDPEVSVAHLERLGLTPANVNGAGQIVAAGTMEQLAALNEDKPEGVRKVVPLKVAGAFHTRHMAPAVDKLAEAAKALTPADPKVTYVSNKDGRAVASGTEVLDRLVGQVANPVRWDLCMETFKELGVTAIIEVCPGGTLTGLAKRALPGVKTLALKTPDDLDAARELVAEHTQA

SEQ ID NO: 59197 - DNA, 930 bp, Yersinia pestis KIM
  CDS (1)..(930): transl_table=11
atgtcgaaatttgcaatggtatttccaggtcagggttctcagtccctcggcatgctggccgatttggccgcacaatttccgatagttgaagcgaccttcagtgaagcgtcgtctgtcctgggctatgatctctggcaattagtacaacaaggccctgcagaagagctgaataaaacgtggcaaacacagcccgcattgctgaccgcatctgtggcaatttggcgtatctggcagcatcaggggggcaaattgccatcactgatggcgggtcatagtttgggtgaatattcagcgttggtttgtgctggtgttctggattttaaacaggccgttagcttggttgaactgcgtgggaaactcatgcaggaggcggtacctgaaggtaccggtgccatgtatgccattattggtttggataatgaatccattgccaaagcgtgtgaagaatcagcccagggccaggtcgtgtcaccggtaaactttaattcacccggtcaggtggttattgctggcaacaaagacgctgtcgaacgtgctggcgcagcatgtaaagccgctggcgcaaagcgggctttgccattgcctgtcagtgtgccttcccattgtgcgctaatgaaacctgcggccgacaagctggcagtcgcacttgagaagattgattttcaggagccgctcttcccagtggtgaacaacgtcgatgtgaaagctgaggtgtccccagtcgctatccgtagcgcattggtccgtcagctgtataatccggtacgttggactgaaagtgttgaatttattgcagctgaaggtgttgaactgctgttagagattgggccaggtaaagtattgaccggcctgaccaagcgtatcgttgattcattggctgccgcggcagtcaacgatgttgtcacgctgaacagtgcgcttgaacactaa

SEQ ID NO: 59198 - protein, 309 aa, Yersinia pestis KIM
MSKFAMVFPGQGSQSLGMLADLAAQFPIVEATFSEASSVLGYDLWQLVQQGPAEELNKTWQTQPALLTASVAIWRIWQHQGGKLPSLMAGHSLGEYSALVCAGVLDFKQAVSLVELRGKLMQEAVPEGTGAMYAIIGLDNESIAKACEESAQGQVVSPVNFNSPGQVVIAGNKDAVERAGAACKAAGAKRALPLPVSVPSHCALMKPAADKLAVALEKIDFQEPLFPVVNNVDVKAEVSPVAIRSALVRQLYNPVRWTESVEFIAAEGVELLLEIGPGKVLTGLTKRIVDSLAAAAVNDVVTLNSALEH

SEQ ID NO: 59199 - DNA, 897 bp, Thermosynechococcus elongatus BP-1
  CDS (1)..(897): transl_table=11
gtgccgatgacaaagacagcgtggttatttcccggccaagggtcgcaacatccagaaatgatggcggatttgctgacggcctatcccccagccaaggcgcgctgcgaacaggcagcggccattttagggtggtcggtcattgactgctgtggagggcgcatcggcaatttagaccaaacgctctatacccagcccagtttgtttctcgtcgagagcctactggtggatgccctcaaggaacggggagcgaaggcggactttgtggcaggacatagtctcggtgaatatgttgctctctatgcggcagaagtctttgattttgaaacgggactccaattggtgcagcggcgcgccgcactgatgaatgctgctggtggcggcaagatggtggccttgattggctttgaccgcgaggagttgcagcaggcgatcgcccgcatccccaatgtggttctggccaatgataaccatccgggacaagtggtgatttcagggctgcccgaggccgttgacgccctactggcaaagataaaagtcaaacgggcagttcccttgaatgtcagtggtgcctttcattccccctttatggcggaggccgcggcaacttttgccacactgttggatgagtgccagtttcaagaggctgtctttcctgtcctgaacaatgtcgaacccgaaccaacaacggatgcagcgctgatcaaggcacggttgcgatcgcaaatgacgggttctgtgcgttgggtggacacttgctatgcccttgcggcggcgggagtaacccaagctctggagattgggcccgggaatgtcttagctggcttggtcaagcgcaccactccagagatcacagtcacaggggtggcaacgatcgccagtttggagagcctggtgtga

SEQ ID NO: 59200 - protein, 298 aa, Thermosynechococcus elongatus BP-1
MPMTKTAWLFPGQGSQHPEMMADLLTAYPPAKARCEQAAAILGWSVIDCCGGRIGNLDQTLYTQPSLFLVESLLVDALKERGAKADFVAGHSLGEYVALYAAEVFDFETGLQLVQRRAALMNAAGGGKMVALIGFDREELQQAIARIPNVVLANDNHPGQVVISGLPEAVDALLAKIKVKRAVPLNVSGAFHSPFMAEAAATFATLLDECQFQEAVFPVLNNVEPEPTTDAALIKARLRSQMTGSVRWVDTCYALAAAGVTQALEIGPGNVLAGLVKRTTPEITVTGVATIASLESLV

SEQ ID NO: 59201 - DNA, 939 bp, Oceanobacillus iheyensis HTE831
  CDS (1)..(939): transl_table=11
ttgaaaaaagtagcattcatgtttcctggacaaggttcacaaacagtcgggatgggtaaggaattatatgatgcacatccaatgattcaagagctttattcagaagcaaaccagatattagataaagatattcaagaattaatgtttgaagggcctgagaaagagttaacccagacagaaaacacacaaccagctcttttattatcaagtgtagctgttcaaaaattattagaagaacgaggagtaactccagcaatgacagtcggtcatagtctaggggaatatagtgctctagttgcttcaggagcatttacttggcaagacgctttaacattagtgcaaatacgtggacgattaatggaagcagcatttccgaaagggcagggaacgatggctgcagtactaggtcttgatgcaactacgattgaatcgactttatcagaaattaaagatcaagtagttgatattgctaacctgaattgtccaggccaagttgttatttctggatctgtaaaaggtgtagaacaggcaactattcttttgaaagataaaggagcaaaacgagtacttccgttaaatgtaagtggaccattccattcaaagctaatgaaggcagcaaatgatgagttcgctacttatttagatgatgtagaaattagtgatgcaaaaccaccagtatatgcaaatgtatcagcaagtgctacatcagatagcggagaattaaaggaattactacttaaacaactatattctccagtcagatttgaagagtcgataaatcatatgattgaaagtggtgtcgatgcctttgtcgaaattgggacagggaaagttttatcggggttagtaaagaaaatcaaccgccgaatgcctacttttgcaattcaagaccaggcatctctagataaatttatggaatggtacgaggaggaagtataa

SEQ ID NO: 59202 - protein, 312 aa, Oceanobacillus iheyensis HTE831
MKKVAFMFPGQGSQTVGMGKELYDAHPMIQELYSEANQILDKDIQELMFEGPEKELTQTENTQPALLLSSVAVQKLLEERGVTPAMTVGHSLGEYSALVASGAFTWQDALTLVQIRGRLMEAAFPKGQGTMAAVLGLDATTIESTLSEIKDQVVDIANLNCPGQVVISGSVKGVEQATILLKDKGAKRVLPLNVSGPFHSKLMKAANDEFATYLDDVEISDAKPPVYANVSASATSDSGELKELLLKQLYSPVRFEESINHMIESGVDAFVEIGTGKVLSGLVKKINRRMPTFAIQDQASLDKFMEWYEEEV

SEQ ID NO: 59203 - DNA, 930 bp, Shigella flexneri 2a str. 301
  CDS (1)..(930): transl_table=11
atgacgcaatttgcatttgtgttccctggacagggttctcaaaccgttggaatgctggctgatatggcggcgagctatccaattgtcgaagaaacgtttgctgaagcttctgcggcgctgggctacgacctgtgggcgctgacccagcaggggtcagctgaagaactgaataaaacctggcaaacccagccagcgctgttgactgcatctgttgcgctgtatcgcgtatggcagcagcagggcggtaaagcaccggcaatgatggccggtcacagcctgggggaatactccgcgctggtttgcgctggcgtgattgatttcgctgatgcggtgcgtctggttgagatgcgcggtaagttcatgcaagaagccgtaccggaaggcacgggcgctatggcggcaatcatcggtctggatgatgcgcctattgcgaaagcgtgtgaagaagctgcagaaggtcaggtcgtttctccggtaaactttaactctccgggacaggtggttattgccggtcataaagaagcggttgagcgtgctggcgctgcctgtaaagctgctggcgcaaaacgcgcgctgccgttaccagtgagcgtaccgtctcactgtgcgctgatgaaaccagcagccgacaaactggcagtagaattagcgaaaatcacctttaacgcaccaacagtttctgttgtgaataacgttgatgtgaaatgcgaaaccaatggtgatgccatccgtgacgcactggtacgtcagttgtataacccggttcagtggacgaagtctgttgagtacatggcagcgcaaggcgtagaacatctctatgaagtcggcccgggcaaggtgcttactggcctgacgaaacgcattgtcgacaccctgaccgcctcggcgctgaacgaaccttcagcgatggcagcggcgctcgagctttaa

SEQ ID NO: 59204 - protein, 309 aa, Shigella flexneri 2a str. 301
MTQFAFVFPGQGSQTVGMLADMAASYPIVEETFAEASAALGYDLWALTQQGSAEELNKTWQTQPALLTASVALYRVWQQQGGKAPAMMAGHSLGEYSALVCAGVIDFADAVRLVEMRGKFMQEAVPEGTGAMAAIIGLDDAPIAKACEEAAEGQVVSPVNFNSPGQVVIAGHKEAVERAGAACKAAGAKRALPLPVSVPSHCALMKPAADKLAVELAKITFNAPTVSVVNNVDVKCETNGDAIRDALVRQLYNPVQWTKSVEYMAAQGVEHLYEVGPGKVLTGLTKRIVDTLTASALNEPSAMAAALEL

SEQ ID NO: 59205 - DNA, 927 bp, Shewanella oneidensis MR-1
  CDS (1)..(927): transl_table=11
atggaaaatgtagcttttgtattcccaggccaagggtcacaggccttaggcatgttagccgagctggctgctgtacagccgattgtgggacaaacctttgccgaagcgagtgaggttttaggatatgacctatgggcgttagtgcaagatggcccagtagaaaccttaaacgaaacggataaaacccaaccggcgttattagcggcaagtgttgccatttggcgcgcttatctcgcctctggcaaggcaatgcctgcggtgttagcgggtcacagccttggtgaatattccgcattagtctgtgctggtgtcatcgattttaaagatgcaattaaattagttgagctgcgtggtcaattgatgcaacaagccgtgcctgctggtactggtgctatgtatgcgattattggccttgataatgacggtattgccaatgcttgtattgaagcagctcaaggtgaagtcgttagcccggttaactttaacagccctggtcaagtggtgatcgccggtcaaaaagacgcggttgaacgtgctgctgctgcgtgtaaagcatctggcgccaaaatggcggtggcgctgcctgtcagcgtgccatcacactgtgcattaatgaaacctgccgctgataaattagcccttgccttaaacaatgtgcagtttaacgcgcctagtattactgttatcaataacgtagatgtggcatcgccaactgcggtagccgacattaaagatgcgctggtgcgtcaactctattgcccagtgcgctggagcgaaaccgttgaattgatggcggaaaaaggcattacccaattagttgagtgtggcccaggtaaagtgctgacgggtcttacaaaacgcattaataaatcgctttctgcccaagcagttaacgatgttgcatcccttgcggcgttaactgaataa

SEQ ID NO: 59206 - protein, 308 aa, Shewanella oneidensis MR-1
MENVAFVFPGQGSQALGMLAELAAVQPIVGQTFAEASEVLGYDLWALVQDGPVETLNETDKTQPALLAASVAIWRAYLASGKAMPAVLAGHSLGEYSALVCAGVIDFKDAIKLVELRGQLMQQAVPAGTGAMYAIIGLDNDGIANACIEAAQGEVVSPVNFNSPGQVVIAGQKDAVERAAAACKASGAKMAVALPVSVPSHCALMKPAADKLALALNNVQFNAPSITVINNVDVASPTAVADIKDALVRQLYCPVRWSETVELMAEKGITQLVECGPGKVLTGLTKRINKSLSAQAVNDVASLAALTE

SEQ ID NO: 59207 - DNA, 939 bp, Pseudomonas putida KT2440
  CDS (1)..(939): transl_table=11
atgtctgcatccctcgcattcgtctttcccggtcaaggttcccagtcgctgggcatgctcgccgagctcggcgccgagaagccagtgatcatcgaaaccttcaaggaagcgtccgaagcgctcggctacgacctgtggaagctggtccaggacggcccggaagagcaacttaaccagaccgacaagacccagccggcgatccttactgcgtccatcgcactgtggcgcctgtggctggaagagggcggtgccaagccggccttcgtttccggtcacagcctgggcgaatacagcgccctggtcgccgccggcagcatcagcctgaaagatgccgttcgcctggtcgagcgccgcggtcagctgatgcaggaagccgtaccggccggtcacggcgccatggctgccattctcggcctggacgatgctgtggtcgtggaactctgcgccgaagccgctgaagatgaagtggtcagcgccgtgaacttcaactcgcctggtcaggtggtcatcgccggtaacaaggcggcggtagaccgcgccatggagctgtgcaaggccaaaggtgccaagcgcgccctgccactggcggtgagcgtcccgtcgcactgcgccctgatgaagccagccgccgagcgctttgccgaatcggtcaatgccatcgaatggaaggccccgcagattccggtggtgcagaacgtcactgcagccgtcgccgccgacctcgatgccctcaagcacgacctgctggcacagctgtaccagccggtacgctgggtcgagtgcgtgcagaccctggccgccaacggtgcggtcaacctggtcgagtgtggcccgggcaaggtgctggctggccttaacaagcgttgcgccgacggcgtgaccacctacaacctcaacacccctgacgccgttgctgccacccgcgcggcactggcctga

SEQ ID NO: 59208 - protein, 312 aa, Pseudomonas putida KT2440
MSASLAFVFPGQGSQSLGMLAELGAEKPVIIETFKEASEALGYDLWKLVQDGPEEQLNQTDKTQPAILTASIALWRLWLEEGGAKPAFVSGHSLGEYSALVAAGSISLKDAVRLVERRGQLMQEAVPAGHGAMAAILGLDDAVVVELCAEAAEDEVVSAVNFNSPGQVVIAGNKAAVDRAMELCKAKGAKRALPLAVSVPSHCALMKPAAERFAESVNAIEWKAPQIPVVQNVTAAVAADLDALKHDLLAQLYQPVRWVECVQTLAANGAVNLVECGPGKVLAGLNKRCADGVTTYNLNTPDAVAATRAALA

SEQ ID NO: 59209 - DNA, 939 bp, Nitrosomonas europaea ATCC 19718
  CDS (1)..(939): transl_table=11
atgaaagccgctttcgtttttcccggacagggatctcagtcagttggtatgatgaatagctattccgagctgccatcggtacgtggaactttcaatgaggcatcggatatcctgcaacaggatctatggtcgctggtcagtaacggacctgaagacagtctgaatctcactaccaatacccagcctgtcatgctggctgcagatgtatccatttaccgggcgtggcaacaggcagggggaattgagccgcattatctggccggccacagtcttggtgaatacgctgcgctggttgcagctgaagtactcacttttactgatgccctgaaactggttcgttatcgtgcaaaagtcatgcaggaaaccgttcccgaaggaaccggaggcatggcagctattgtcggactagatgatgatatcgtctcttcagtatgcaccgaagtaataaatgcgatgccagatacatcgcttgaaccggcaaatttcaatgcgcccggccaggtggtgattgccggccattcccaggcagttgcccgagcagtagtgctcgcaaaatcaaaaggagcaaagctggcggtcatactgccaatgagtattccttcacactgctcgctcatgcaatcggcagcagaaaagtttgctcttctactggaagaaattgcgctgcaacctccccgcattcctattttgcataatgctgacgtccagcaacattctgaaaccgcttccattcgtgagatacttgtgcgccagctctatcgtccggttcgctggacagagaccattcaggccatcgcggcacagaatgtaaaatatgtcgtggaatgcggtccgggtaaggtgctgtccggactgaaccggcgcatcgataagaatctggaaaatatcgcgctgaccgattccggctcacttctcaaaacggtagaaacgttgaaataa

SEQ ID NO: 59210 - protein, 312 aa, Nitrosomonas europaea ATCC 19718
MKAAFVFPGQGSQSVGMMNSYSELPSVRGTFNEASDILQQDLWSLVSNGPEDSLNLTTNTQPVMLAADVSIYRAWQQAGGIEPHYLAGHSLGEYAALVAAEVLTFTDALKLVRYRAKVMQETVPEGTGGMAAIVGLDDDIVSSVCTEVINAMPDTSLEPANFNAPGQVVIAGHSQAVARAVVLAKSKGAKLAVILPMSIPSHCSLMQSAAEKFALLLEEIALQPPRIPILHNADVQQHSETASIREILVRQLYRPVRWTETIQAIAAQNVKYVVECGPGKVLSGLNRRIDKNLENIALTDSGSLLKTVETLK

SEQ ID NO: 59211 - DNA, 882 bp, Streptomyces rochei
  CDS (1)..(882): transl_table=11
atggccggcgatgtcgtgatgttccccggacagggctcgcagcgcatcggcatgggcaaggaggtgttcgacgcctatccgcagctgtgcgacagggccgacgagatcgtcggccactcgctgcgcgagctgtgcctgaaggacccggacggacggctcaacgagacctcccgcacccaggaggcggtctatttcgtcagctgcctgatgtacctggcgtacgccgaggagcacggcgcggagcaggtgcgctgcctgacgggccacagcctcgggctgtacccggctctcttcgcggccggcgtcttcgacctcttcgagggactggagatcgtctcccggcgcggcgccctgatgcaggaggcgcgggacggggcgatggtggcggtcctcggaccgcgggcgagcgagatcgacgaccacctcgcccggctggagttcttcgacgtggacgtggccaactacaacagcccggagcaggtcgtgctcagcgccctgaagccgcgcctggaggagctggtgccgcggctggaggagaccggccaccgctgtgtgtggctgccggtcagcggggccttccactcccgccacatggagccggcccggctccggttcgcgcagttcctgcgggaccgcacgttcacgccgcccaccaagcccgtcgtctccacgacgagcggccggacgctgggagcccgtcacctgctggaggagatggtcttccagctcgtcaaaccggtgcggtggtggcagaccgtgacccatctgtcccgtaccggacacaagaccttcgacgaggtcggtcccggccgggtgctgaccaaattgagcgcagagatcctcggcgacgaaccctcgccgcaggccgagcccaggaagtga

SEQ ID NO: 59212 - protein, 293 aa, Streptomyces rochei
MAGDVVMFPGQGSQRIGMGKEVFDAYPQLCDRADEIVGHSLRELCLKDPDGRLNETSRTQEAVYFVSCLMYLAYAEEHGAEQVRCLTGHSLGLYPALFAAGVFDLFEGLEIVSRRGALMQEARDGAMVAVLGPRASEIDDHLARLEFFDVDVANYNSPEQVVLSALKPRLEELVPRLEETGHRCVWLPVSGAFHSRHMEPARLRFAQFLRDRTFTPPTKPVVSTTSGRTLGARHLLEEMVFQLVKPVRWWQTVTHLSRTGHKTFDEVGPGRVLTKLSAEILGDEPSPQAEPRK

SEQ ID NO: 59213 - DNA, 897 bp, Prochlorococcus marinus subsp. marinus str. CCMP1375
  CDS (1)..(897): transl_table=11
atgacaattgcgtgggcttttcctggacaaggatcacaaaaattgggaatggctgatgaagtgatttctcttaaaggggcaatagagaggtttaaatcagcatccgaaattttagggagggatttgttagctatttgtaggggccaaagtaattgtaaggatgaattgggagacttgaatgacactcggaatactcagccagcaatgtttgtaattgagtcattgttgatagatgatctgaaaaggcagggaaggaaggctgatttactcgctggccatagcttgggggaattcgttgctctttatgcagcagaagtgtttgatgtacaaactggattggttttacttaaaactcgctctgaattaatgtcagcagcgggagggggggctatgactgcggttttaggttttgataggaaacaacttgaagatttggttggaaatacatcaggagtagtaatcgctaatgacaacagttctgagcaagttgttctatctggtactccagatgctgtgaattcagttgctggacaattaacttgcaaaagaattgttccacttaaagtgtcgggcgcttttcattctccttttatgaaagcagcagcaaatgattttgcattgcagttggatgatgttttatttagtgatggagttgtacccgttcttagtaatgttgacccttctcctgttcaagatggagacttattgaaagaaagactgaagcgtcaaatgataacaggagttcgttggcgtgagaccatgaaaacaatggagactaaaggagtaaaaacatttgtagaaataggccctgggaaagtgcttagcggtcttgccaagcgatcaatgcaagggattactcttagtcaagtatcttctgcaaatgatttaggacattga

SEQ ID NO: 59214 - protein, 298 aa, Prochlorococcus marinus subsp. marinus str. CCMP1375
MTIAWAFPGQGSQKLGMADEVISLKGAIERFKSASEILGRDLLAICRGQSNCKDELGDLNDTRNTQPAMFVIESLLIDDLKRQGRKADLLAGHSLGEFVALYAAEVFDVQTGLVLLKTRSELMSAAGGGAMTAVLGFDRKQLEDLVGNTSGVVIANDNSSEQVVLSGTPDAVNSVAGQLTCKRIVPLKVSGAFHSPFMKAAANDFALQLDDVLFSDGVVPVLSNVDPSPVQDGDLLKERLKRQMITGVRWRETMKTMETKGVKTFVEIGPGKVLSGLAKRSMQGITLSQVSSANDLGH

SEQ ID NO: 59215 - DNA, 897 bp, Prochlorococcus marinus str. MIT 9313
  CDS (1)..(897): transl_table=11
atgtcgatcgcttgggtgttccctggtcagggctcacaaaagctgggcatggctgacccgatcatcagcctgcccgatgccgaagagcgctttgccctcgcctctcgactactgggacgtgatctccttgcgatttgccgtggtagcgaccaaaccaatcatgacccggccgaccttaatgacacccgcaatacccaacccgcactttttgtcgttgaatcattactggtggatgaactgcgcaggcagggtcgtgaggcatcgctcatcgcagggcacagcctgggtgaacttgtagccctctatgcggctgaggtttttgacgtaaacaccgccctgctgcttctgcgacgccgctcagaactgatggcctcagccggtggtggggccatgacagccatcttgggctttgaccgcacacagctaaaagctctggtagcagacacagaaggagtcgtgatcgccaatgacaacagtgctgcccaggtggttttatccggcaccccagaggctgttagcaaggtcagcagccagctgacctgcaagcgagcgattccgttgccagtctcgggagccttccattcgcctttcatggccacagcggccactgaatttgcagctgaactggatcaagtgactttcaaagacgcccgtgtccccgttctctgcaatgccgatccaatcccaacctgcgatgccaacttgcttaagcaacggctaaaagatcaaatgacaacaggcgtccgttggcgcgaaacgatggataccatggccagccaaggcgtcaacacagtggtcgaaatcggccctggcaatgtgctgagtggtctggtcaagcgatctcttccaggagttgcgaccatccagctgagctgtgctgcagacctggggaattga

SEQ ID NO: 59216 - protein, 298 aa, Prochlorococcus marinus str. MIT 9313
MSIAWVFPGQGSQKLGMADPIISLPDAEERFALASRLLGRDLLAICRGSDQTNHDPADLNDTRNTQPALFVVESLLVDELRRQGREASLIAGHSLGELVALYAAEVFDVNTALLLLRRRSELMASAGGGAMTAILGFDRTQLKALVADTEGVVIANDNSAAQVVLSGTPEAVSKVSSQLTCKRAIPLPVSGAFHSPFMATAATEFAAELDQVTFKDARVPVLCNADPIPTCDANLLKQRLKDQMTTGVRWRETMDTMASQGVNTVVEIGPGNVLSGLVKRSLPGVATIQLSCAADLGN

SEQ ID NO: 59217 - DNA, 897 bp, Synechococcus sp. WH 8102
  CDS (1)..(897): transl_table=11
atggcgatcgcctgggtttttcccggccagggctcacagaagctgggtatggcggatccggtgctcagcctcagcggcgccagccaacgctttgccatggcctccgagctgctgggccgtgatctgctggccatctgccagggcaacagcgttggcggcagcggtcccgacgacctcaacgacacccgcaacacgcaaccagccctgttcgtcgtggagtccctgctggtggacaacctgatcgagcaggggcgcgacgcagcgcttgtggctggccacagccttggggaactggtggcgctctatgccgccggcgtgttcgacctggaaacgggcctcaagctgatgcagacccgatcggaactgatggcagccgccggtggcggcgcgatgaccgccgtgatcggcttcgaccgcagccagctcgaagcattagtgaacgacaccgaaagggtgagcatcgccaacgacaacagcgacgcccaggtggtgatctcggggcagccggacgctgttcagagcgtgagcgagaagcttaagtgcaaacgggctattcccttggcggtttccggagcatttcactccccgttcatggccgaggcggcagaggccttcgccacaacgctggatggcgtcagcttccgcgatgcccggatcccggtcttgagcaacagcgatcccagcggttgcagcgatgcagccctgctcaagcaacgcttgaagcaacagatgaccaccggcgtccgctggcgggaaaccatggcctcgatggcggagcacggcatcgacaccctggtggagatcggtccgggcaatgtgctcagtggcctggccaaacgcagcatgaacggggtgaccaccgcgcagatcgccagctctggcgatctcggtcagtga

SEQ ID NO: 59218 - protein, 298 aa, Synechococcus sp. WH 8102
MAIAWVFPGQGSQKLGMADPVLSLSGASQRFAMASELLGRDLLAICQGNSVGGSGPDDLNDTRNTQPALFVVESLLVDNLIEQGRDAALVAGHSLGELVALYAAGVFDLETGLKLMQTRSELMAAAGGGAMTAVIGFDRSQLEALVNDTERVSIANDNSDAQVVISGQPDAVQSVSEKLKCKRAIPLAVSGAFHSPFMAEAAEAFATTLDGVSFRDARIPVLSNSDPSGCSDAALLKQRLKQQMTTGVRWRETMASMAEHGIDTLVEIGPGNVLSGLAKRSMNGVTTAQIASSGDLGQ

SEQ ID NO: 59219 - DNA, 888 bp, Gloeobacter violaceus PCC 7421
  CDS (1)..(888): transl_table=11
atggcgacagcctggatctttccagggcaaggttcgcaggtcgttgggatggccgatgcgctgagcggccatcccgacacggccgcactgtttgagcgggcatctgggatcttgggctggtcggtggcggcggtgtgcgccgggccgcaagagcgcctcgaccgtaccctctacacccagcctgctctatttaccgtctgtgtggccctcgcccagcgcgcgcgcaagcagggcgaacttggcgagccggcgctggtggccggccattcgctgggcgagtacgcggcgttgtgggcggcggcggtcttcgattttgagacgggtctggaactggtggccgagcgcgcccggctgatggacgcccagcaggccggggcgatgagcgccatcgtcggcttcgatcgcgacaaactcgaaaagctgtgcgccgagcggcccggggtggtgatcgccaatgacaacaacccgatgcaggtggtcatctccggcgagccggagcgcgtggcggaggtttccgcggccatccgggccaaacgggtgattccgcttgcggtaagcggcgcctttcattcgcctttgatggctccggccgccgccgaatttgccgccgtgcttgccagggccgagttgcatcccgcgcacatcccggtgctgttcaacgccgatccgacccggccagtggccgatgtcgcctcgatgcgcgagctgctgcgccggcagatcgatcatccggtgcgctggcgcgagacgatcttgcgcatggccgattcggggatcaccgagctggtggaaatcggccccggtgcggtgctcacgggccttgccaagcggacggtgcccgccctggcgttgcgcaacatcgagcctgccgccgctctggcggtgtag

SEQ ID NO: 59220 - protein, 295 aa, Gloeobacter violaceus PCC 7421
MATAWIFPGQGSQVVGMADALSGHPDTAALFERASGILGWSVAAVCAGPQERLDRTLYTQPALFTVCVALAQRARKQGELGEPALVAGHSLGEYAALWAAAVFDFETGLELVAERARLMDAQQAGAMSAIVGFDRDKLEKLCAERPGVVIANDNNPMQVVISGEPERVAEVSAAIRAKRVIPLAVSGAFHSPLMAPAAAEFAAVLARAELHPAHIPVLFNADPTRPVADVASMRELLRRQIDHPVRWRETILRMADSGITELVEIGPGAVLTGLAKRTVPALALRNIEPAAALAV

SEQ ID NO: 59221 - DNA, 933 bp, Photorhabdus luminescens subsp. laumondii TTO1
  CDS (1)..(933): transl_table=11
atgtctgaatttgcaatggtatttcctggtcagggttctcaagaccttggtatgttggccgatttggctacagcgttcccagttgtcgagcaaacttttgctgaagcgtctgatgtactgggatatgatctctgggctctggttcaacaggggccagaagaagaactgaataaaacatggcaaactcaacccgcgttgttggccgcatcggttgctatttggcgggtttggcaggaaaaaggtggaaaagcaccatcactgatggctggacatagccttggtgaatattctgcactggtttgtgcgggtgtcattgatttcaaacaagctattagacttgttgaactgcgtggcaaattgatgcaagaagctgtacctgaaggcactggtgcaatgtatgttattattggtttagataatgaatccattgatcgtgcttgtaaagaagtagctcaggggcaaattgtttctcctgttaactttaactcacctggtcaggttgttattgccggtgagaaagaggcggtagagcgtgctggagatgcatgtaaagccgcaggggcgaaacgtgcgctgcctttggcagtcagtgtaccgtcgcattgtgcactgatgaaacccgccgcagataagctggcagttgttttggaaggaattgaatttggctatcctcagttcccggtggtaaataatgttgatgtgaaaatagaacaatctgctgaagctatccgtcatgcactggtacgacaactctataaccctgttcgttggacagaaacagttgaatttattactgaacagggtgttggtcagctattagaaatagggccaggtagagttttgacaggtttaactaaacgaattgtcaataccttaagcgcagcagcagttaatgacacagcttcactaataactgcattggaaaataattga

SEQ ID NO: 59222 - protein, 310 aa, Photorhabdus luminescens subsp. laumondii TTO1
MSEFAMVFPGQGSQDLGMLADLATAFPVVEQTFAEASDVLGYDLWALVQQGPEEELNKTWQTQPALLAASVAIWRVWQEKGGKAPSLMAGHSLGEYSALVCAGVIDFKQAIRLVELRGKLMQEAVPEGTGAMYVIIGLDNESIDRACKEVAQGQIVSPVNFNSPGQVVIAGEKEAVERAGDACKAAGAKRALPLAVSVPSHCALMKPAADKLAVVLEGIEFGYPQFPVVNNVDVKIEQSAEAIRHALVRQLYNPVRWTETVEFITEQGVGQLLEIGPGRVLTGLTKRIVNTLSAAAVNDTASLITALENN

SEQ ID NO: 59223 - DNA, 924 bp, Vibrio vulnificus YJ016
  CDS (1)..(924): transl_table=11
atgagcaagtttgctatcgtatttccaggtcaaggttctcaagcagttggtatgctggcagatcttggcgaacagtatgaaatcgttaaacaaacatttgcacaagcgtcagaagcgcttggctacgatttatgggcactggtacaaaacggtcctgcggaagatttgaatcagacgttccgcactcaaccggcattgctggcttcgtcggtagcgatctggcgagtgtggcaagaattaggtcttgctcaaccagaaaacttggcaggccatagcttgggtgagtactcagcattagtgtgtgctggcgtgattgatttccaagaagcgatcaaacttgtcgagcttcgtggtcaacttatgcaagaagccgtaccagcagggactggcgcgatgtacgcgatcatcggcctagatgatgaagcgattgccaaagcttgtgaagaagcagcgcaaggcgaggtggtctctccagtgaacttcaactctcctggccaagtggtgattgcaggcagcaaagacgcagtagagcgtgcgggtgcactgtgtaaagaagcgggcgctaaacgtgctcttcctcttccagtttctgtgccttcacactgtgcactaatgaaaccagcagcagagaaacttgcggttgcactggaatctatcgaattcaaagccccacagctgccagtgatcaacaacgtggatgtggttgcagaaaccgacccagcgagaatcaaagatgccctagttcgtcaactgtacagcccagttcgttggactgaaagtgtggaactaatgagttcacagggtgtcgaaaaattgcttgaaatgggccctggtaaagtattgacaggtttgacaaaacgtattgtcaaatcactagaagcagcggtagtaaacgatgttgcatcgcttgacgctgtaaagtaa

SEQ ID NO: 59224 - protein, 307 aa, Vibrio vulnificus YJ016
MSKFAIVFPGQGSQAVGMLADLGEQYEIVKQTFAQASEALGYDLWALVQNGPAEDLNQTFRTQPALLASSVAIWRVWQELGLAQPENLAGHSLGEYSALVCAGVIDFQEAIKLVELRGQLMQEAVPAGTGAMYAIIGLDDEAIAKACEEAAQGEVVSPVNFNSPGQVVIAGSKDAVERAGALCKEAGAKRALPLPVSVPSHCALMKPAAEKLAVALESIEFKAPQLPVINNVDVVAETDPARIKDALVRQLYSPVRWTESVELMSSQGVEKLLEMGPGKVLTGLTKRIVKSLEAAVVNDVASLDAVK

SEQ ID NO: 59225 - DNA, 1368 bp, Magnaporthe grisea 70-15
  CDS (1)..(1368)
atgggaaacatcacggccgccacacggcgcatcgctgggaggagggctcacaaatgcacaataccaaccactactaattatttacctttaccattatcatcatcattgccaccgccatttctaccgtcaacatcatcgcaatcgcaacaacaccgtaatgcctccacatctacatccacctccacctccacttccccatcctcagcactgcccccctcatctatcaaacacacctccaccaccacagggaaacctcgccgcccaagaacggcaatattcttccccggccagggcgtccagaaagtaggcatgctgacgccctggctggagaacttcccctccacggcccggcctataatccaggagatcgacgactgtctgggttacaagctctcggacatcatccgggacgggcccaacaagctcctgacggccacccctcacgcccagcctgccatcatggccacgtccatcctgatcctccgcgtgctggagcgcgactttggcttctccccgctcgagcacaaggtcaactttgtgctgggccactccctgggcgagttcgccgccctggtcgcggggggttacctcacctttgccgacagcctgcggctcgtccagcggcgggctcaggccatggcggccgcgaccagggcggcgcgcgaggggaggcccgacgtcgagtacggcatggtggccattgtcacggagcccgagtacctgccgcggctagtgcaggcgatccgcgaattcctgggacactcgagcgagggcgccaaggccgagtcgtcggcctcggccgcacccatcgagcatgtctccatcgcaaatgtcaatagcaagaaccagatcgtgctgtcgggcgagctgggccgcataaagaccctcgtggcccacgtgaggcagtttctgggtcacgacccccgcgccgtccgcctaaacagcgacagccccttccactcgcccatcatgaggccagccgtcgcagtggtgcgagacatgctggctgccggcggtgagggcggcggcatggttacctttcccgccaagattccctgcgttagtaacatcagcgcccggccgttcgagagcgaggcccagctcaaggacctgctagcccgtcagtgcctggagaccgtcaggtggtgggacagcatacggtacctcgaccagcgggaaaaggtgagacgctggatcggcattgggcccggtaaggtagggaggaacctggttggcaaggaggtcggaatgcgtggtaagggcatcgtcaagggcgcgggggtgtggggcatcacggagcctagtgaggtcgaggaggtgttgaggggcctggaggagacggagtttgttgtcgatgagctggactga

SEQ ID NO: 59226 - protein, 455 aa, Magnaporthe grisea 70-15
MGNITAATRRIAGRRAHKCTIPTTTNYLPLPLSSSLPPPFLPSTSSQSQQHRNASTSTSTSTSTSPSSALPPSSIKHTSTTTGKPRRPRTAIFFPGQGVQKVGMLTPWLENFPSTARPIIQEIDDCLGYKLSDIIRDGPNKLLTATPHAQPAIMATSILILRVLERDFGFSPLEHKVNFVLGHSLGEFAALVAGGYLTFADSLRLVQRRAQAMAAATRAAREGRPDVEYGMVAIVTEPEYLPRLVQAIREFLGHSSEGAKAESSASAAPIEHVSIANVNSKNQIVLSGELGRIKTLVAHVRQFLGHDPRAVRLNSDSPFHSPIMRPAVAVVRDMLAAGGEGGGMVTFPAKIPCVSNISARPFESEAQLKDLLARQCLETVRWWDSIRYLDQREKVRRWIGIGPGKVGRNLVGKEVGMRGKGIVKGAGVWGITEPSEVEEVLRGLEETEFVVDELD

SEQ ID NO: 59227 - DNA, 1026 bp, Candida albicans SC5314
  CDS (1)..(1026): transl_table=12
atgtggccaataacgaccttatcaaaactgaaacagcacttccgattttttagcaaatatgcggtaacttgtcctggtcaaggattatacagaaacggggttttggaattagtcaaaactcagaaactgttatttcaacattacctagatgagttagatgcagcgttgaattgcaaattttcagacaagttgttcgctaatagttctgaaacagaagctaagcagtggttgagcaagactgcaaacgctcaaccggcgatattagcatcaacctgtatactttcaaacttggtcgaaactgaacatcaaatatctattattgacaatgcttcttatttattaggtcactcgttaggcgaatatactgctcttgtgctaagtggaattattgattttactactggtataaaggttgttagacgaagggggcaattgatggaagatttatgtctgggccaaaactacggtatgattgcattgttaataaaacccaagtttgccaaagaagttattgaactagctcaagaacacaacgtgttaggaaatattaattcaaattatcaagtagtgatatcaggtgagattaccaagctaaaagagtttattgacatactaagaaagatccaaaagatggctttaataaaagcagtgcaattacctgtatcaataccattccatagtgagattttgaaacccgttgtccctgagttgaaactgctattggacggtgcactcaatgatcaaaaaattccaataatatctaacttgaatggccaggtgtcgtatgaaaaggagtctactatccgtaatatattggaggccaactaccaaccagttcagtggcagaaatcaatagcgtatttagaaaattcacccgtgagtacaattttcaatcttggacctggtgaagccttacatgggattaataaaaagtataacgtcaagtctgttagtctagacgatgtgaaatcgcttgataaaaattcagagtttatggaactaaaacagcagctaaagcaaaattga

SEQ ID NO: 59228 - protein, 341 aa, Candida albicans SC5314
MWPITTLSKSKQHFRFFSKYAVTCPGQGLYRNGVLELVKTQKSLFQHYLDELDAALNCKFSDKLFANSSETEAKQWLSKTANAQPAILASTCILSNLVETEHQISIIDNASYLLGHSLGEYTALVLSGIIDFTTGIKVVRRRGQLMEDLCSGQNYGMIALLIKPKFAKEVIELAQEHNVLGNINSNYQVVISGEITKLKEFIDILRKIQKMALIKAVQLPVSIPFHSEILKPVVPELKSLLDGALNDQKIPIISNLNGQVSYEKESTIRNILEANYQPVQWQKSIAYLENSPVSTIFNLGPGEALHGINKKYNVKSVSLDDVKSLDKNSEFMELKQQLKQN

SEQ ID NO: 59229 - DNA, 1251 bp, Strongylocentrotus purpuratus
  CDS (1)..(1251)
atgaagattagctctagcattggctgggttcaaccttcaaatcaattttccatctcgtcttcacatcgtgatacaacaagtggaaaaaaggatgatgctgatgtaccatcctctacagagggcagcagagaggctgacgaagaggtagctgcttcgaaggagagacaggcatcggtaagaacattacttgatgaagccaagagtgacaagaagattccagatgagtttgactttgatggtgacctagggactagtcccggtgagaggaaacagcagcccagtaagcctaggatcgatcctgctgagacatctgttcttctgtttccaggccaaggctctcagtttgtcggaatggggagagacttgctcaagtatccaaacgtggaagatatgtttgcggttgcatctgaaattcttgggtatgaaaagctacaattatgtctgaacggacccgttgaagaactcaatcgaaccatacactgtcagcctgctgtggtggtcacatcactagctgctgtagagaaactcaaagatgaacaaccaaaggcaatagagaactgtgtagccacggcaggattcagtgtaggagagtttgctgctctggtgtttggtggatctatctccttccaagatgccatatacctgatcaaggtacgagcggaagcgatgcagcgtgcctccgaggccgtctccagtgggatgatatcagtgatgggagggaagaaggcaaggtacaagtacgtttgcaaggaagccgagaaccactgcaggaatcgccatggcatcactcatcccgtgtgccgggtagccaactatctctaccccgatgctagagtgctggcaggacacacagaggctctttccttcatcaaagaggagtccaagtcattctacctacgagcggtcaagcccatcccggtcagcggtgccttccatacatccctcatgtccagcgctcagcagcccatttcaaaagcgctgaatgcagttaccatagaaacaccagtcatctgcatccactccaacgtggacggtaaaccgtacggcagtccagcgcacatccgcaagcaactcaagaagcaggttgtggagccagtgttgtgggaacagaccatgcattgcatctacgagagagggaaaggaacgccgtttccgttcacctacgagatgggaccgggacaccagttgggaagtatgcttaaaagaaacaatttgaaggcatctaattcctgtacaaatgtgaaagtatga

SEQ ID NO: 59230 - protein, 416 aa, Strongylocentrotus purpuratus
MKISSSIGWVQPSNQFSISSSHRDTTSGKKDDADVPSSTEGSREADEEVAASKERQASVRTLLDEAKSDKKIPDEFDFDGDLGTSPGERKQQPSKPRIDPAETSVLLFPGQGSQFVGMGRDLLKYPNVEDMFAVASEILGYEKLQLCLNGPVEELNRTIHCQPAVVVTSLAAVEKLKDEQPKAIENCVATAGFSVGEFAALVFGGSISFQDAIYLIKVRAEAMQRASEAVSSGMISVMGGKKARYKYVCKEAENHCRNRHGITHPVCRVANYLYPDARVLAGHTEALSFIKEESKSFYLRAVKPIPVSGAFHTSLMSSAQQPISKALNAVTIETPVICIHSNVDGKPYGSPAHIRKQLKKQVVEPVLWEQTMHCIYERGKGTPFPFTYEMGPGHQLGSMLKRNNLKASNSCTNVKV

SEQ ID NO: 59231 - DNA, 1221 bp, Tribolium castaneum
  CDS (1)..(1221)
atgatgtttactaaaattattacacgaaattttctgaaagactgcgatcgtgttttggtagggcttcgccccttctccctgtcctcaaatcgtaactgtgatgagaaaaaaacgcaagaatctcccctaaagaaactcctcgacgaatcagcaacctttgaagacttgcacccccagacacaagaacaacaatgggctactttgccataccctcaaggcaccaaaattcgcaaacagggtgtctcatttatcgaaaaacctaaatatgatccacgcgagtcctcgataattttatttcccggtcaggggagccaatttgtcggtatgtgcaatgacttgctcaagtaccccatggctagggatttgtttgagttagcgaattatattttaaagtacgatttgttaaaattgtgtcttgagggtcccaaagacaaattggaccaaacaaaatatagtcaaccggcaataatggtcagttctttagcggcaattgaacgactgaaagaggagagacctagggctattgagagttgtgtggggacagcagggttcagtttgggggaaattacagcgttagtgtttgcgggggcgattggttttgagcgagggttacgattggtgcaaattcggggggaagcaatgcaattggctagtgaggcgtacaagggggggatggtcacagtaatgtacggtcctgacacgaagttaaaccaggcactagtcaaagccaaggaatgggcaactgataaaggcgacttaatgcccgaatgtcaaattgccaattatttgtacccccattgtaaagtcatctcggggagcgaatctgcgcttgattatttggaaaaaaatgccaaagaattaaatttacgtaaagttaaaagacttgcggttagtggagctttccattccaatttaatgttaccagcggttgaaccgtttcgaaaggcattaaataaatcagaagtgagcaatcctgtaattagtgtttattcaaatgttgacgggaaaaagtacaaagacgcagcgcagatcaaaaaacaattgccgaaacagattgttaaacctgtaaagtgggaacaacttcttcatgttgtttatgagaggagtcaaggggattatttcccaaggacgtttgagtgtggcccaggcacgtccctaagggctatccttaaacaagtgaatgccaaagcatggactacgtgttttaatattcaagtgtag

SEQ ID NO: 59232 - protein, 406 aa, Tribolium castaneum
MMFTKIITRNFLKDCDRVLVGLRPFSLSSNRNCDEKKTQESPLKKLLDESATFEDLHPQTQEQQWATLPYPQGTKIRKQGVSFIEKPKYDPRESSIILFPGQGSQFVGMCNDLLKYPMARDLFELANYILKYDLLKLCLEGPKDKLDQTKYSQPAIMVSSLAAIERLKEERPRAIESCVGTAGFSLGEITALVFAGAIGFERGLRLVQIRGEAMQLASEAYKGGMVTVMYGPDTKLNQALVKAKEWATDKGDLMPECQIANYLYPHCKVISGSESALDYLEKNAKELNLRKVKRLAVSGAFHSNLMLPAVEPFRKALNKSEVSNPVISVYSNVDGKKYKDAAQIKKQLPKQIVKPVKWEQLLHVVYERSQGDYFPRTFECGPGTSLRAILKQVNAKAWTTCFNIQV

SEQ ID NO: 59233 - DNA, 987 bp, Acinetobacter sp. ADP1
  CDS (1)..(987): transl_table=11
atgtctgctaaacgactcgatcaagtcgctcaagcaactaaaactgcatttgtgtttcctggtcagggttcgcaaaaagtcggcatgctcgctgaacttgcagaacagtttagtggtgtgcaagaaacctttgccgaggcttctgatgcagtcggttttgatttgtggcacattgcgcaaagtggtgaagggttagatcaaactgaaaatactcaacccgtgttactaactgccagtattgcattgtggcgtgtatggctagacttgggtggtttagcgcctaaatatatggctggacactctttgggtgaatacagtgctttggttgccgcaggtgctttatcattaggtgatgcagcaaagcttgttaatctgcgcggtaaactgatgcagagtgctgtacctcagggtgttggtgcaatggctgcaattttggggttgcctgacgaaaaagtcattgaattgtgtcaggctgtcactgcttcaggtgacggttctgttgaggctgccaattataattcacaaggtcaggtggtgattgctggttctgctgctttggtcaatgaagtcatgactcaggcaaaagagcagtcgggcaaagccattgcattgcctgtttcggttccatcacactgttcattgatgaagccagcggcagaaaaatttgccgaagcattggaacaaactgccattgagctaccaagccttcctgtaatacaaaatgtaaatgcaggaattgcgacagatgtgactcaattgcgccaagctttaactgcgcaattgtatcagtctgtacagtggactcgtaccatgcaatatttgcaagatcagggaattcagtacgtggttgaatgtggtcccggtacagtactgagtaatcttgcaaaacgtttaccaaatatagaaaaagcatttgcgattgatagcaaaagtcgtatggaagatgccctaaacgcagttttagtggctgaaggaaaaattgcatga

SEQ ID NO: 59234 - protein, 328 aa, Acinetobacter sp. ADP1
MSAKRLDQVAQATKTAFVFPGQGSQKVGMLAELAEQFSGVQETFAEASDAVGFDLWHIAQSGEGLDQTENTQPVLLTASIALWRVWLDLGGLAPKYMAGHSLGEYSALVAAGALSLGDAAKLVNLRGKLMQSAVPQGVGAMAAILGLPDEKVIELCQAVTASGDGSVEAANYNSQGQVVIAGSAALVNEVMTQAKEQSGKAIALPVSVPSHCSLMKPAAEKFAEALEQTAIELPSLPVIQNVNAGIATDVTQLRQALTAQLYQSVQWTRTMQYLQDQGIQYVVECGPGTVLSNLAKRLPNIEKAFAIDSKSRMEDALNAVLVAEGKIA

SEQ ID NO: 59235 - DNA, 930 bp, Erwinia carotovora subsp. atroseptica SCRI1043
  CDS (1)..(930): transl_table=11
atgacgcaatttgcaatggtgtttcccggtcagggatcgcagacggtagggatgttggctgaacttgcagcagaatacccggtcgttaccgaaacgtttgctcaagcttccgaagtgttaggttatgacttgtggcagcttacccagcaagggccagctgaagagttgaataaaacctggcagacacagcctgtgttactgaccgcttctgttgctatctggcgtgcctggcagcagcagggaggaaaaactcctgcgttgatgtctggtcatagcctcggtgagtattctgcactggtttgtgcgggtgttctggatttccaacagactgttcgtctggttgaattgcgtggcaaactgatgcaagaagcggtgcctgaaggcactggtgcgatgtatgccattatcggcctcgataacgatgcgattgccaaagcgtgtgaagaatccgcgcaggggcaggtggtatcgccggtaaacttcaactcaccggggcaggtagtgattgcgggtaataaagatgccgttgagcgtgctggtgctgcgtgtaaagctgctggcgcgaagcgcgcgttgcctttgcctgtcagcgtaccgtcacactgcgcgttgatggagcccgctgcgaagaagctttctgtggcactggaatccgtgacatttaattctccggtcatcccagttgtaaataatgtagatgcaagtatcgaaaccacaccagaagcgattcgcaatgcgctggtgcgacaacttcattgcccagtacgttggactgactgtgttgaattcatggcctctcagggcgttgagtcactattagaagtcgggccgggtaaagtattgactggcttaaccaaacgaatcgtcgataccctgacagcagctgcggtgaacgatcctgcttctctatcagcggcgattgagaaataa

SEQ ID NO: 59236 - protein, 309 aa, Erwinia carotovora subsp. atroseptica SCRI1043
MTQFAMVFPGQGSQTVGMLAELAAEYPVVTETFAQASEVLGYDLWQLTQQGPAEELNKTWQTQPVLLTASVAIWRAWQQQGGKTPALMSGHSLGEYSALVCAGVLDFQQTVRLVELRGKLMQEAVPEGTGAMYAIIGLDNDAIAKACEESAQGQVVSPVNFNSPGQVVIAGNKDAVERAGAACKAAGAKRALPLPVSVPSHCALMEPAAKKLSVALESVTFNSPVIPVVNNVDASIETTPEAIRNALVRQLHCPVRWTDCVEFMASQGVESLLEVGPGKVLTGLTKRIVDTLTAAAVNDPASLSAAIEK

SEQ ID NO: 59237 - DNA, 939 bp, Mannheimia succiniciproducens MBEL55E
  CDS (1)..(939): transl_table=11
atgaaaaaatttgcaatggttttcccgggtcagggatcgcaatcagtaggtatgctggctgaacttgccgaacaatttcccgttgttcaagaaacctttaaacaagcttccgaagtcttaggttatgacttatggcaactcgtgcaacaaggtcctgccgaagaacttaacaaaacctggcaaactcagcccgcacttttagcagcttcagtggcaatttaccgtatttggcaacaacaatacccggaattaaaacccgaagtgatggccggccatagcttgggtgaatattccgctttagtttgcgcaggcgttattgattttcaggatgctattaaattagttgaattacgcggtaaattaatgcaacaagccgtgccggaaggtacaggcgcaatgtacgcaatcatcggtttagataacgaatctattattaacgcctgtaaagccgccgaacaaggcgaagtggtttccgcagtaaactttaactctcctggacaagttgttattgccggtagcaaagccgctgtcgagcgtgccgcggctgcttgtaaagaagctggcgcaaaacgtgcgttaccattagcggtaagcgttccttctcattgcgcattgatgaaaccggcggcggatcagcttgcggtttccttagaaagtatttcgttcaaagcgcctgaaattgccgttatcaacaatgtcgacgtgaaagcggaaaatgatgcggaagcaattcgaaccgcccttgttcgccaactttacagccctgttcgctggactgaaatcgttgaacgtatggctaaaaataatatcgaagttttacttgaaatgggaccgggtaaagtattaaccggtttaaccggccgaatcgttaaagaactttcggcacaacaagtaaatgatgcgaaatcattagaaacggtaaaagaaattttagcttaa

SEQ ID NO: 59238 - protein, 312 aa, Mannheimia succiniciproducens MBEL55E
MKKFAMVFPGQGSQSVGMLAELAEQFPVVQETFKQASEVLGYDLWQLVQQGPAEELNKTWQTQPALLAASVAIYRIWQQQYPELKPEVMAGHSLGEYSALVCAGVIDFQDAIKLVELRGKLMQQAVPEGTGAMYAIIGLDNESIINACKAAEQGEVVSAVNFNSPGQVVIAGSKAAVERAAAACKEAGAKRALPLAVSVPSHCALMKPAADQLAVSLESISFKAPEIAVINNVDVKAENDAEAIRTALVRQLYSPVRWTEIVERMAKNNIEVLLEMGPGKVLTGLTGRIVKELSAQQVNDAKSLETVKEILA

SEQ ID NO: 59239 - DNA, 960 bp, Bacillus licheniformis ATCC 14580
  CDS (1)..(960): transl_table=11
atgggcaagattgcttttctattcccgggccaaggttcgcagcatatcggcatgggacacgaattgtatgaaaaagaaccgaatgcgaagaagatttttgaagaagcggatcaaacgcttgaaacaaaactgagcaccctcatgtttgaaggggatgcaaaggaactgacgcttacatacaacgcgcagccaagccttttaacggcgagcatcgcagcgcttgaaaaactgaaggaatacggcattaaagccgactatgcggcaggtcacagcctcggcgaatacagcgcattggtcgctgccggcgccttgtcgtttaaagatgcggtttatgccgtcagaaagcgcggcgaattcatgaatgaagccgtgccggcgggagaaggcgcgatggcggccattctcggcatggacagccaggcgctgaaagaagtgacggacaaaatttccgaagaaggaaaccttgttcagctcgccaatttgaactgccctgggcaaatcgtcatctcgggaacagctaaaggcgtggagctcgcttcagagcttgcgaaagaaaagggcgcaaaacgcgcgattcctctcgaagtcagcgggccgttccattctgagctgatgaagccggcagctgataagcttcgtgaagttcttgatgcgtgcacgatcaacgacgcagccattccggtcgtctccaacgtaacggccgactttgtaacggataaagacgacattaagaataaactgattgaacagctgtattcccctgtacgctttgaagaaacaatcagccgcctgattgacgaaggcgtcacgaccttcattgaaatcggtcccggaaaggttttgtcagggcttgtgaagaaagtgaaccgcagagtcaaaacgattgctgtatcagacccgaacacaattgaacttgccgttcaaacgttgaaggaggaaaacgaaaatgctggaaaataa

SEQ ID NO: 59240 - protein, 319 aa, Bacillus licheniformis ATCC 14580
MGKIAFLFPGQGSQHIGMGHELYEKEPNAKKIFEEADQTLETKLSTLMFEGDAKELTLTYNAQPSLLTASIAALEKLKEYGIKADYAAGHSLGEYSALVAAGALSFKDAVYAVRKRGEFMNEAVPAGEGAMAAILGMDSQALKEVTDKISEEGNLVQLANLNCPGQIVISGTAKGVELASELAKEKGAKRAIPLEVSGPFHSELMKPAADKLREVLDACTINDAAIPVVSNVTADFVTDKDDIKNKLIEQLYSPVRFEETISRLIDEGVTTFIEIGPGKVLSGLVKKVNRRVKTIAVSDPNTIELAVQTLKEENENAGK

SEQ ID NO: 59241 - DNA, 957 bp, Methylococcus capsulatus str. Bath
  CDS (1)..(957): transl_table=11
atgcccaacatcgacaacagcctcgctttcctttttccggggcaaggctctcagtccatcggcatgctggcggatctcgccgcagtccatccggtggtcggcgagaccttcgctgaagcctcggaagtgctcggtttcgacctctggtgtctggtccaggagggccccgaggaagagctcaaccagaccgtcaacacccagccggcgatgctggccgccggggtcgcgacctggcggatctggtgcagtttgaccgatcgtcgccccgcctggatggctggccacagcctgggggagtattcggcattggtcgccgccggcgcgctcggcttcgccgatgcggtgaaactggtggcccagcgcggcagactgatgcaggaagcggtcccgccgggcgcgggatccatggccgccatcctcggtctggaagatccccaggtcgtcgcggcatgcaaagaggcatccacccgagattcggtggtgacgccggccaatttcaatgccccgggccaggtggtgatcgccggcgcgagccaggcggtggagcgtgcgatcgtggcggccaaggcgctgggggcgaaacgggcggtgctgctgccggtcagcgtaccctcgcattgtgcgctgatggcgccggcctcggaaaaattcgcggccctgctgtcggagacgtcgttcgaatcgccccgtgaccggatcggcgtgatccacaacgtcgacgtcgccatgcatccgtctcccgaggtgatccgggcggtgctggctcagcagatttcccagccggtgcgctggtcggaaaccatccgcttcctcagcgaccagggcgtgaggcgcttcgtggaatgcgggccgggcaaggtcctggccggcctcaacaagcggatcgtcagcagcgaagcgacgctcgccatcgtggatcaggattcgttgaatacagccttggagtcgattcaatga

SEQ ID NO: 59242 - protein, 318 aa, Methylococcus capsulatus str. Bath
MPNIDNSLAFLFPGQGSQSIGMLADLAAVHPVVGETFAEASEVLGFDLWCLVQEGPEEELNQTVNTQPAMLAAGVATWRIWCSLTDRRPAWMAGHSLGEYSALVAAGALGFADAVKLVAQRGRLMQEAVPPGAGSMAAILGLEDPQVVAACKEASTRDSVVTPANFNAPGQVVIAGASQAVERAIVAAKALGAKRAVLLPVSVPSHCALMAPASEKFAALLSETSFESPRDRIGVIHNVDVAMHPSPEVIRAVLAQQISQPVRWSETIRFLSDQGVRRFVECGPGKVLAGLNKRIVSSEATLAIVDQDSLNTALESIQ

SEQ ID NO: 59243 - DNA, 927 bp, Neisseria gonorrhoeae FA 1090
  CDS (1)..(927): transl_table=11
atgtctttcgcattcttcttccccggacaaggttcccaaagcctcggcatgatgaacggctttgccgaacacgtcatcgtcaaaaacacatttgacgaagcctccgccatattggggcaggacttgtgggcgatgattaacggcagcgatgccgaaatcatcggtcaaacagtcaacacccagcccattatgctcgccgccggcgttgccgtttaccgcgcctatttggaagtgggcggcaaaacgcctgccgccgttgccggacacagcctcggcgaatacaccgcgcttgtcgccgccgaagcattggattttgccgatgccgtcaaactcgtccgcctgcgcgccgaactgatgcagtccgccgtaccgcaaggcgtaggcgcaatggcggccattttgggtttggaagatgaacaggtcaggcagatttgtgccgaatccgcacagggcgaagtggtcgaagccgtcaacttcaactcgcccggacaagtcgtgattgcaggcaacgccgccgccgtcggacgcaccatggctgccgccaaagaagccggagccaaacgcgccctgccgctgccggtatccgttccttcccattgcagcctgatgaaacccgccgccgacaaacttgccgaaacactcaaaaccgttgaaatcaagcagccgcaaatccgcgtcatccacaacgccgacgttgccgcctacgatgatgccggcaaaatcaaagacgcgctcgtccgccagctttacagccccgtgcgctggacggaaaccgtcaacgccctcgtttcagacggcattgccgaatccgccgaatgcagcccgggcaaagtgttggcgggcttggcaaaacgcatcaacaaggccgccgcgtgcagcgcactgaccgatgccggacagattaccgcctttatcgaagcgcattga

SEQ ID NO: 59244 - protein, 308 aa, Neisseria gonorrhoeae FA 1090
MSFAFFFPGQGSQSLGMMNGFAEHVIVKNTFDEASAILGQDLWAMINGSDAEIIGQTVNTQPIMLAAGVAVYRAYLEVGGKTPAAVAGHSLGEYTALVAAEALDFADAVKLVRLRAELMQSAVPQGVGAMAAILGLEDEQVRQICAESAQGEVVEAVNFNSPGQVVIAGNAAAVGRTMAAAKEAGAKRALPLPVSVPSHCSLMKPAADKLAETLKTVEIKQPQIRVIHNADVAAYDDAGKIKDALVRQLYSPVRWTETVNALVSDGIAESAECSPGKVLAGLAKRINKAAACSALTDAGQITAFIEAH

SEQ ID NO: 59245 - DNA, 939 bp, Haemophilus influenzae 86-028NP
  CDS (1)..(939): transl_table=11
atgaaaaaattcgcaatggtcttcccaggtcaaggctcccaaactgtcggtatgcttgctgatcttgccactgaatatccaatcgttattgaaacatttaaacaagcatctgatgcgcttggttatgatttatggtatcttgttcaacaaggtccagctgaagaacttaataaaacttggcaaactcagcccgcacttttagctgcttcagtcgctatttatcgcgtatggcaagaaaaatttcctcaattaaaaccagaagtgatggcaggccatagcttgggtgagtattctgccttggtttgtgctggggtgttggatttccaagatgcgattaaattagtggaattgcgcggaaaattaatgcaacaagctgtgcctgaaggcactggcgcaatgtatgcaatcattggtttagataatgaagcaattattaatgcttgcaaacaagcagaggaaggcgaagtcgtatctgcggtgaactttaactcaccgggtcaagtagttattgcgggtgcgaaagctgcagttgagcgtgcggctgcattatgtaaagaagcaggggcgaaacgtgcattgccgttagctgtgagcgtaccttctcactgtgcattaatgaaacctgcagccgagcaattagcggtaacacttgagaatattcaaattaatacaccaacaatatcggtattaaataacgttgatgtgaaagctgaaactgaaggcaccgaaattcgtaccgcacttgttcgtcagttatatagtccagttcgttggactgaaacagttgaaaaaatggcgcaagatggtgttttagcgcttgttgaagtggggccaggtaaagtattaaatggtttaaccaaacgcattgtgggtgatttacaagcaatatctgtaaatgatgttgcatcattcaatgcggtagaagaatttttagcgtaa

SEQ ID NO: 59246 - protein, 312 aa, Haemophilus influenzae 86-028NP
MKKFAMVFPGQGSQTVGMLADLATEYPIVIETFKQASDALGYDLWYLVQQGPAEELNKTWQTQPALLAASVAIYRVWQEKFPQLKPEVMAGHSLGEYSALVCAGVLDFQDAIKLVELRGKLMQQAVPEGTGAMYAIIGLDNEAIINACKQAEEGEVVSAVNFNSPGQVVIAGAKAAVERAAALCKEAGAKRALPLAVSVPSHCALMKPAAEQLAVTLENIQINTPTISVLNNVDVKAETEGTEIRTALVRQLYSPVRWTETVEKMAQDGVLALVEVGPGKVLNGLTKRIVGDLQAISVNDVASFNAVEEFLA

SEQ ID NO: 59247 - DNA, 969 bp, Psychrobacter arcticus 273-4
  CDS (1)..(969): transl_table=11
atgggctctgtacccgatatgataaaaaaacaaccaacccgtattgcaatcttgtttcccggacaaggctcacaagtcgtcggtatgacaagcgagcttgctgagatctatcctgaaattattgagacttttactgaggcaagtgcggcacttggggaggatttatgggcaatctgtcaggacgaagacaagctcaatcaaactcaatatacgcagcccgcattgctaacggctagcatcgctatttggcgcatcttacaacaaaaaatagaaagtaagccttgttacctagcaggtcattctcttggtgaatatagtgccctatgcgccgctggcgtgctgtcacttgctgatgctgtaaaactggtacataagcgtggtcagttgatgcaagacgctgtagtgggtattgatacggctatggcagcagtactgggtttggaagatcatcgagtcgaaaatttgtgtgagcaagccactgagcatgtagataatgcgattgttggcgcagcaaattttaatagcccagggcaggttgtcgtttctggtaatgccgcaggcgttaatgcggtcatcgataaagtacaaaatactggtaaaaaggccattccattaaaggtaagtgtgccatcacactgtgccttgatggagcctgctagtaaagcgttggcagcagagcttgccactatcaagtttgatcaggcgacgattcctgtgattcagaaccgtcatgcgcgcgttgaaaccagtgctataggtatcaaagaggcgttaactgaacaattaagtcagccagtactgtggtcaaaaacgatgcaagcgctggcagataaacaaattaatattttaatcgagtgtggtagtggtaacgtcttgagtaatttggcgaagcgtcaagcgcatcccattataagctacccgactgacaagcccgctcgtctagataaattgctggaggtattatcatga

SEQ ID NO: 59248 - protein, 322 aa, Psychrobacter arcticus 273-4
MGSVPDMIKKQPTRIAILFPGQGSQVVGMTSELAEIYPEIIETFTEASAALGEDLWAICQDEDKLNQTQYTQPALLTASIAIWRILQQKIESKPCYLAGHSLGEYSALCAAGVLSLADAVKLVHKRGQLMQDAVVGIDTAMAAVLGLEDHRVENLCEQATEHVDNAIVGAANFNSPGQVVVSGNAAGVNAVIDKVQNTGKKAIPLKVSVPSHCALMEPASKALAAELATIKFDQATIPVIQNRHARVETSAIGIKEALTEQLSQPVLWSKTMQALADKQINILIECGSGNVLSNLAKRQAHPIISYPTDKPARLDKLLEVLS

SEQ ID NO: 59249 - DNA, 927 bp, Dechloromonas aromatica RCB
  CDS (1)..(927): transl_table=11
atgtcttttgcattcgtatttcccggtcaaggctcacagagcgttggcatgatgtcagcttacggcgatgcgcccgtggttcgcgccacttttgatgaggcctcagcggcgctgggcgatgatctttggtccatggtcgccaatggcccggctgaattgctgacccaaacggttaacacgcagcctgttatgctgaccgcaggtattgcagtttggcgcctgtggcaagagaagggcggcaggaagccggcggtcgttgccggccacagcctgggtgaatactccgcgctcgtcgcggccggggtgatcgacctgaaggatgcggtgccgctggttcgcctgcgtgctgcagccatgcaggaggctgttccggtagggactggtgccatggccgcggtacttggattggataatgctgggattgctgctgcctgtgcagaggcagcgcaaggcgaagtagtcgagccagttaatttcaatgccaatggtcagaccgttattgccggtcacaaagcagctgtcgagcgcgccatggaggcgtgcaaagcccgtggtgccaagatggccaaggcattgcccgtctcagctccctttcattcatctctgattcgcccggctgctgacaaacttgctgcccgcttggctgagttgtctctgaatgctccattaattccggtgatcaataacgtcgatgtttcaatcgaaaatgatcccggtcgcatcaaggatgccttggtgcgtcaggcctacaatcctgtacgctgggtcgagactattcaggtcatggcttcgctgggcgtctctactgttgctgaatgcggccccggcaaggtgctggctggtttgaccaagcgatgtgccgatggtgtcgtcggtgtcgcgctggctgatgcggcgtccattgaagcaaatctgggtctggaatga

SEQ ID NO: 59250 - protein, 308 aa, Dechloromonas aromatica RCB
MSFAFVFPGQGSQSVGMMSAYGDAPVVRATFDEASAALGDDLWSMVANGPAELLTQTVNTQPVMLTAGIAVWRLWQEKGGRKPAVVAGHSLGEYSALVAAGVIDLKDAVPLVRLRAAAMQEAVPVGTGAMAAVLGLDNAGIAAACAEAAQGEVVEPVNFNANGQTVIAGHKAAVERAMEACKARGAKMAKALPVSAPFHSSLIRPAADKLAARLAELSLNAPLIPVINNVDVSIENDPGRIKDALVRQAYNPVRWVETIQVMASLGVSTVAECGPGKVLAGLTKRCADGVVGVALADAASIEANLGLE

SEQ ID NO: 59251 - DNA, 897 bp, Prochlorococcus marinus str. NATL2A
  CDS (1)..(897): transl_table=11
atgactattgcctgggtctttcctggacaaggctctcaaaaattaggtatggcaaattctttgcaagacttgcctggttctagagaaagatttgaattagcctctcaaattcttggaagagatctttggaaaatctgttctggtgaagtggctccaaatgaagaaatatatgacttaaacgatactagaaacactcaacctgcactttttgttgttgagtcactattggttgatgatttaaaaagacaaggaagagaaacccacatgattgcaggccatagtctcggagaaatagttggtctttactcagcagatgttttagatgcgaagacagcgttaatacttttaaaaaaaagatctgaattgatggcagcggcaggaggaggagcaatgattgcagtaatgggatttgatcgagatgaattagatgatttgatcagagaaactgagggtgcatccatagctaatgacaatagtgaatctcaagttgttttatctggttcacctgaagcagtgaggaaagtggctgataatttaaaatgtaaaagagctattcctttaaaagtttctggtgcttttcactcaatatttatgactgaagcttctaaaagctttaacgaagaacttgatcaagtaacttttcaagattcgcaagttcctgtgcttagcaatgttgatccaactccaactgtaaatggtgacatattgaaagatcgcctaaaaaaacaaatgaccacaggtgttagatggagagagactatgcaggtgatgcaaaataaagggataacaacaatggttgagattggacctgggaacgtgcttagcggtcttgctaaacgatcaatgaaagggacaatgactagtcaaatatcaaatgccagtgatttgggttattga

SEQ ID NO: 59252 - protein, 298 aa, Prochlorococcus marinus str. NATL2A
MTIAWVFPGQGSQKLGMANSLQDLPGSRERFELASQILGRDLWKICSGEVAPNEEIYDLNDTRNTQPALFVVESLLVDDLKRQGRETHMIAGHSLGEIVGLYSADVLDAKTALILLKKRSELMAAAGGGAMIAVMGFDRDELDDLIRETEGASIANDNSESQVVLSGSPEAVRKVADNLKCKRAIPLKVSGAFHSIFMTEASKSFNEELDQVTFQDSQVPVLSNVDPTPTVNGDILKDRLKKQMTTGVRWRETMQVMQNKGITTMVEIGPGNVLSGLAKRSMKGTMTSQISNASDLGY

SEQ ID NO: 59253 - DNA, 879 bp, Anabaena variabilis ATCC 29413
  CDS (1)..(879): transl_table=11
atgacaaaaaccgcatgggtgttccccggacaaggttctcaagcactggggatgggaacagacttactagatataccaactgccaaagaaaaatttgctcaagctgaagcaatcttaggttggtctgtaagcgaaatctgccaaaacgaagaaaaattatcacagacactctacacccaacccagtctttatgtagtagagagtatccttgcagacctgacaaaagaacggggacaccagccagatttagttgctggtcatagtttaggagaatacatcgcactttatgttgctggcgtttttgagtggtcggctggtttaaaactagtcaagcgacgagctgaactcatggatagcgccgcaggcggcatgatggcggctatgatgaattttgaccgcgaacagttagaaacagtaattgcccagactcctgatgtggtgctagcaaacgataatagtccagcgcaagttgtcatatccggtactccagaagctgtgcagacagtgatgtcccaagtcaaagccaagcgtgctgtcccgttgaaagtttcgggtgcatttcattcacacctgatgaatacagctgctgtggagttccaagaaattctggaaactgtagaatttcaacaggctaatgtacccgtattatcgaatgtcgagccagtgccagcagttgatgccacaattttaaaacaacgcctcagccaacaaatgactggttcagtgcgctggcgagaaatttctttaacattaccagtcaacggcattgagaaagttgtggaaatcggccccggcaatgtactaacaggtttgattaaacgcactactgctaatttaattttaaaaaacatccgcaacgctgcggaactactaaattag

SEQ ID NO: 59254 - protein, 292 aa, Anabaena variabilis ATCC 29413
MTKTAWVFPGQGSQALGMGTDLLDIPTAKEKFAQAEAILGWSVSEICQNEEKLSQTLYTQPSLYVVESILADLTKERGHQPDLVAGHSLGEYIALYVAGVFEWSAGLKLVKRRAELMDSAAGGMMAAMMNFDREQLETVIAQTPDVVLANDNSPAQVVISGTPEAVQTVMSQVKAKRAVPLKVSGAFHSHLMNTAAVEFQEILETVEFQQANVPVLSNVEPVPAVDATILKQRLSQQMTGSVRWREISLTLPVNGIEKVVEIGPGNVLTGLIKRTTANLILKNIRNAAELLN

SEQ ID NO: 59255 - DNA, 897 bp, Synechococcus sp. CC9605
  CDS (1)..(897): transl_table=11
atggcgatcgcctgggtctttcccggtcagggctctcaaaaggtgggcatggcagaagcgctgctcagcatcgatggcagccgcgagcgtttcgccatggcgtccgagctgctggggcgcgacctgctggcgatctgccagggggaaagcggcggtggtgatgggccggatgacctcaacgacacccgcaacacccagcccgccctgttcgtgatcgaatcgttgctggccgacaaccttcagcagcagggccgcgagcctgcgctggtggccggccacagcctgggggagctggttgctctgtacagcgcaggggtgtttgggctggagaccggtctgcagctgatgaaaacccgctcagaactgatggcgagcgccgggggcggcgccatgacggcagtgatcggcttcgatcgtgctcagctggacgacctggtagccgccacggacggcgtcagcatcgccaacgacaacagtgatgcccaggtggtgatctcgggctctccagaggccgtagaaggcgtgagtggagccctgaaatgcaagcgcgccatccctctggccgtctccggagccttccactccccgttcatggcgcaggcggctgagcgcttcgccgccgagctggacaacgtgcccttcctcgatgcccgcgttccggtgctcagcaacagcgccgccagcgccagcaccagtgcagacgagctcaaacagcgcttgaagcagcagatgaccaccggcgtgcgctggcgcgaaaccatggcggccatgaccgacagcggcgtggacaccctggtggaaatcggtccgagcaacgtgctcagcggcctggccaaacgcagcatgagcggggtcaccaccgcccagatctccggggcaggagacctcggacagtga

SEQ ID NO: 59256 - protein, 298 aa, Synechococcus sp. CC9605
MAIAWVFPGQGSQKVGMAEALLSIDGSRERFAMASELLGRDLLAICQGESGGGDGPDDLNDTRNTQPALFVIESLLADNLQQQGREPALVAGHSLGELVALYSAGVFGLETGLQLMKTRSELMASAGGGAMTAVIGFDRAQLDDLVAATDGVSIANDNSDAQVVISGSPEAVEGVSGALKCKRAIPLAVSGAFHSPFMAQAAERFAAELDNVPFLDARVPVLSNSAASASTSADELKQRLKQQMTTGVRWRETMAAMTDSGVDTLVEIGPSNVLSGLAKRSMSGVTTAQISGAGDLGQ

SEQ ID NO: 59257 - DNA, 882 bp, Synechococcus elongatus PCC 7942
  CDS (1)..(882): transl_table=11
atggctaaaacggtgtgggtgtttccggggcaaggatctcaggcaacgggaatgggcgttgacctgcaggattggccagaagctcaacagcgtttggccgaagctgaggcgcttctcggatggtcggtgctggagcgctgccaagccgatttagaaacgctgtcgcagacgattaacacgcagccctgtctctacgtgctggaggcgattctgagtgatcgcttgaagcaacagggtgagcagcctgatgctgtcgctggccacagccttggcgaatattcagccctctacaccgcaggtgtctttaacttcgcgacggggctgcaactggttcagaaacgggcagaactgatgcaggccgcttccggtggcaagatggccgctctaattggctttgatgctgaggcactagcggcagcgatcgccaacaccgaaggcgtagtgctcgccaatgacaatagcgccgcccaagttgtgatttctggaactccagcagcggtcgacgcgatcttggcagccgtcaagagtaaacgggctgtccccctgacagtctccggggcattccactcgccgtttatggctgaggcggcaacgacgtttgcggccaccctggcagcagtggattttcaggatgcgcaggtccctgtgctttcaaatgtcagcgcgactcctagcaccgatgctgctgtgctcaagcaaaacctgttgcaacagatgacaggctcggtgcgctggcgcgaaacctgtctggcgatcgaagccctgggcgttgaagaactggttgaagttggtcccggtaaagtcctgacgggcttgatgaaacggacttgtcctgcaatcggattgcgcaatgttggaacagcagcagacctcacggtctaa

SEQ ID NO: 59258 - protein, 293 aa, Synechococcus elongatus PCC 7942
MAKTVWVFPGQGSQATGMGVDLQDWPEAQQRLAEAEALLGWSVLERCQADLETLSQTINTQPCLYVLEAILSDRLKQQGEQPDAVAGHSLGEYSALYTAGVFNFATGLQLVQKRAELMQAASGGKMAALIGFDAEALAAAIANTEGVVLANDNSAAQVVISGTPAAVDAILAAVKSKRAVPLTVSGAFHSPFMAEAATTFAATLAAVDFQDAQVPVLSNVSATPSTDAAVLKQNLLQQMTGSVRWRETCLAIEALGVEELVEVGPGKVLTGLMKRTCPAIGLRNVGTAADLTV

SEQ ID NO: 59259 - DNA, 939 bp, Rhodospirillum rubrum ATCC 11170
  CDS (1)..(939): transl_table=11
atgacacgcgctttcgtcttccccggtcaagggtcccaggccgtcggcatgggcaaagaactggccgacgcctttccggcggcccgcgatgttttccaagaagtcgacgacgccctgtcgcaaaagcttttcgccttgatggtcgagggtccggccgacgagctaaccctgacccagaacgcccagccggcgctgatggcggtttcgatggccgtggtccgcgtgcttgaaaccggcggcgtgcgtctggccgcccatgccgatctggtcgccgggcattccctgggcgaatattcggccctggccgccgccggggcgctggggctggccgataccgcccgcctgctgcgcatccgcggcgaagcgatgcaaaaggccgtgcccgttggcctgggggcgatggccgccctgatcggcctgagccttgaggacgcccgctctgttgccgccgaggcggccgagggcgagatttgcgaagccgccaacgacaacgcccccgggcaggtggtgatcagcggtcatcgcaccgccatcgagcgggcgatcgttctggccaaggccaagggctgcaagcgcgccctgccgctgcccgtcagcgcgccgttccattgcgccctgatggcgccggcggccgaggtcatggccgaggcgttggagcgggtgaccttcaaggcgccggcggtgccgctggtggccaatgtgaccgcctcggcggtcagcgatcccttggaaatccgccgactgctggtcgagcaggtgacgggcgcggtgcgctggcgcgagagcgtgctttatatggtcgacgccggggtgagcgaattggtcgagctgggggccggcaaggtgctgggcgggctggccaagcgcatccatggcgatcttggcgctcgctcgatccagggcccggccgatatcgacgccttcatcaaggggatttag

SEQ ID NO: 59260 - protein, 312 aa, Rhodospirillum rubrum ATCC 11170
MTRAFVFPGQGSQAVGMGKELADAFPAARDVFQEVDDALSQKLFALMVEGPADELTLTQNAQPALMAVSMAVVRVLETGGVRLAAHADLVAGHSLGEYSALAAAGALGLADTARLLRIRGEAMQKAVPVGLGAMAALIGLSLEDARSVAAEAAEGEICEAANDNAPGQVVISGHRTAIERAIVLAKAKGCKRALPLPVSAPFHCALMAPAAEVMAEALERVTFKAPAVPLVANVTASAVSDPLEIRRLLVEQVTGAVRWRESVLYMVDAGVSELVELGAGKVLGGLAKRIHGDLGARSIQGPADIDAFIKGI

SEQ ID NO: 59261 - DNA, 939 bp, Moorella thermoacetica ATCC 39073
  CDS (1)..(939): transl_table=11
atgtcaggtattgtttttctctttcccggccagggatcccagtatgtggggatgggacaggaactggcccagcactacccagaggcggccgccgtttttaccgaagccagtgaagaattaggatggccggtcgataagcttgtgtttaacggtccggccgaagagctggtacggaccgaaaacacccagcctgctgttcttaccaccagtatagcttgttaccgggttctggaggcccgggggataaagccccgggccgtagccggtcacagcctgggggaatacagcgccctggtggccgccggcagcctctccttcaaggacgccctgcgggtggttgtccagcgggcccggctcatggcaaatgccgtaccctgcggccagggagggatggttgccgtcctcggcctgccggcggagagggtggtcgccctctgccaggaggttaaagaaggcgttgccgaggcggccaacttcaactccccgggacaggtggtggtcgccggtgaccgggccggcctggaggccattaccgccctggccagggaggcaggtgccaaaaaggtcatccccctccaggtaagcgggcccttccattccagcctcatggaaccggtagccagggaactggcaactgttttaaaccgggtacctctttcagacccggtagtaccggtagtggccaatgtaacggctgattataccgtgacggcagccgcggtgcgggaaaacctcctgaggcaggtggccagtccggtacgctgggaggagagcatgcgccgcctgcttgccgacggttaccggaccttcgtcgaggttggcccaggcaacgtattgagcggtctgatcaaacgcctggatcgccaggtgaggatcggccaggtggagaatatccagactttgggaaaaacccttgcgttattgcaggaggctcagtaa

SEQ ID NO: 59262 - protein, 312 aa, Moorella thermoacetica ATCC 39073
MSGIVFLFPGQGSQYVGMGQELAQHYPEAAAVFTEASEELGWPVDKLVFNGPAEELVRTENTQPAVLTTSIACYRVLEARGIKPRAVAGHSLGEYSALVAAGSLSFKDALRVVVQRARLMANAVPCGQGGMVAVLGLPAERVVALCQEVKEGVAEAANFNSPGQVVVAGDRAGLEAITALAREAGAKKVIPLQVSGPFHSSLMEPVARELATVLNRVPLSDPVVPVVANVTADYTVTAAAVRENLLRQVASPVRWEESMRRLLADGYRTFVEVGPGNVLSGLIKRLDRQVRIGQVENIQTLGKTLALLQEAQ

SEQ ID NO: 59263 - DNA, 960 bp, Anaplasma phagocytophilum HZ
  CDS (1)..(960): transl_table=11
gtgtctactgtgtttatgtttcccggacaaggttcacagtttgttggtatgggaaaagaggtatatgagaactttgctgtagcgcgggaagtgtttcacgaagttgatgaaactcttggtcggaatctatctgatattatcttcaatggcccagaagaggttctgacatcaacttgtaatgcacaattggcacttatgactgtttccatagcggtggtacgtgcagtggaacatgttgttggcatgcctttggataggtatgctaggtatgttatagggcactctgttggtgagtatacggcactgtgtgctgcgggtgttattgatttacctactgcagttaggattcttgacgttcgtagcagggctatgggcaaggcttcagaaatgtgtcaggggggaatgtctgcgctcataggtggttgtgtagaggacgttgaggctgttgtgcaggctgcttctaaatttggtgtgtgtgaaatagcaaatgacaattgtaatgggcaaatagtagttagtggtacgaatgaagctcttgaagcgttgccggagcttgttgtagggactgctgtaaggcgtgtaataaggctgcgtgtgagtggcccgtttcattcttctcttatgcatcctgcgtatgaagagctcagggattttgtaagtacgttggagctcaaagcaccgaagattggtatagtttataatgtttctgcctcagagcatgaggattgtgatgtcatcaaagatttaatggcacggcaagtggttagcagggttaggtggcgtgagagcatagagtatcttctggggcatgggtgttctgaatttgtagaagcgggtcctggcgaggttttaaccggtttgttacgtcgcatagataggactgtgcgttgtgttagtgtttgtgcagtagatgcgatgcgagagttatcgcaatatgctgaagttcgtgagttttgctag

SEQ ID NO: 59264 - protein, 319 aa, Anaplasma phagocytophilum HZ
MSTVFMFPGQGSQFVGMGKEVYENFAVAREVFHEVDETLGRNLSDIIFNGPEEVLTSTCNAQLALMTVSIAVVRAVEHVVGMPLDRYARYVIGHSVGEYTALCAAGVIDLPTAVRILDVRSRAMGKASEMCQGGMSALIGGCVEDVEAVVQAASKFGVCEIANDNCNGQIVVSGTNEALEALPELVVGTAVRRVIRLRVSGPFHSSLMHPAYEELRDFVSTLELKAPKIGIVYNVSASEHEDCDVIKDLMARQVVSRVRWRESIEYLLGHGCSEFVEAGPGEVLTGLLRRIDRTVRCVSVCAVDAMRELSQYAEVREFC

SEQ ID NO: 59265 - DNA, 930 bp, Neorickettsia sennetsu str. Miyayama
  CDS (1)..(930): transl_table=11
atgaatatgtttttatttcccggacaaggttcccagcgtgtcggtatgggcaaaagtttgtacgagaatttctctgttgcccgtgaggttttttccgaagtcgatgaatctctgggtatgaagttatcaaaagtaatatttgagggaccggaactttcgaatactgagaatgctcagcctgcccttatggcaacctctatggcggcacttaaggttcttttatcagagtctggaaaaagtgtttcggaattgtccaagtacttagctggacattcacttggggaatacacagcactgtgtgcgtctggtgccattacgatctctcaagttgccagaatcttaaaaattagaggaaagtcgatgcaagaagctgtgcctatgggtgaaggtggcatgcttgctctgcttaaagtaacttttgaggaagtacaggatctcatagtggagtcaaaggcaaactgtgagatttcgaatgacaatagtaatgagcaggttgttgttagcggtttgactactgagatagaaaagattgaacagtatgcaaaacaaaaaggtataaagcgcgtggtgcggttgaatgtgagtgcgccgtttcactgcaagttaatgcagcccgctgttatgccagtgaaagatgccctcgatactgcagaaattgtcacaccttctgttccaatcgtgtcgaatgttacagcaagtccagtaacggaggttcaaaaaataaaggagcttctagtgcagcaaatcacaggctgcgtacgatggagggagagcatgctttttgcaataggagcaggtgtaaaaactttcatagaagtgggatcaggcaatgttttgagcaaaatgctctctcgaatgaatccaaatgtaacaacattaaatctcgaaggggtagatgatctagacagaattattgctacaattggatga

SEQ ID NO: 59266 - protein, 309 aa, Neorickettsia sennetsu str. Miyayama
MNMFLFPGQGSQRVGMGKSLYENFSVAREVFSEVDESLGMKLSKVIFEGPELSNTENAQPALMATSMAALKVLLSESGKSVSELSKYLAGHSLGEYTALCASGAITISQVARILKIRGKSMQEAVPMGEGGMLALLKVTFEEVQDLIVESKANCEISNDNSNEQVVVSGLTTEIEKIEQYAKQKGIKRVVRLNVSAPFHCKLMQPAVMPVKDALDTAEIVTPSVPIVSNVTASPVTEVQKIKELLVQQITGCVRWRESMLFAIGAGVKTFIEVGSGNVLSKMLSRMNPNVTTLNLEGVDDLDRIIATIG

SEQ ID NO: 59267 - DNA, 942 bp, Desulfitobacterium hafniense Y51
  CDS (1)..(942): transl_table=11
ttggccaaaatagcgtgcattttccccggtcagggctcccaatacgtaggcatgggcaaagaactttttgccacccctgggggccaggaagtgctggcgactggacagcgtgttcttggggaagaatttataaggatcctcctggaaggaccggaggaggaattgaaaaaaaccgcccatactcagcctgccatcctgctgaccagtatagcggcctggcaggggctgcaggagaccgggattcgtcctgattacttcgccggccatagtctgggcgagtattcagcctatacagcggcggggagtctttcccttgaagaggccttaagggttgtgcgccgccggggagaactgatgcaggcggctgttcccgagggccagggtgccatggctgccattctcggcttggagaatgccaaggtggaggaagcctgccaccaggcacgggaagaaggcggttggatcgttggcccggccaattataattctccggggcaggtcgtgatctccggcgagaccgagggggtgcagatggcttgtcagtatgccaaagagcttggggcgaagcgggctctgcccttggcagtcagcggtccctttcactctcccttgatggcggaagccggcaaggagctgcgtcaggtgctggaaggggtagcttggcaggaccccagtgtgcctgtgcttgccaacattgatgggcaagaagtcagggagcgcggcatgattgtggagagtctggtgcggcaagtcagcggggccgtgctttgggagcaatccatccgcctcttgggcgagcaaggggttgacacctttattgagctgggtccggggaaggttttaacaggattggttaagaaaattcttcccggtgcgaccctgattaatgtagaagattcttcttctttaggaaaagctacttgcatatttaaaggagagtag

SEQ ID NO: 59268 - protein, 313 aa, Desulfitobacterium hafniense Y51
MAKIACIFPGQGSQYVGMGKELFATPGGQEVLATGQRVLGEEFIRILLEGPEEELKKTAHTQPAILLTSIAAWQGLQETGIRPDYFAGHSLGEYSAYTAAGSLSLEEALRVVRRRGELMQAAVPEGQGAMAAILGLENAKVEEACHQAREEGGWIVGPANYNSPGQVVISGETEGVQMACQYAKELGAKRALPLAVSGPFHSPLMAEAGKELRQVLEGVAWQDPSVPVLANIDGQEVRERGMIVESLVRQVSGAVLWEQSIRLLGEQGVDTFIELGPGKVLTGLVKKILPGATLINVEDSSSLGKATCIFKGE

SEQ ID NO: 59269 - DNA, 936 bp, Ralstonia metallidurans CH34
  CDS (1)..(936): transl_table=11
atgaaattcgcatttgttttccccggacagggttcgcagtcggtcggcatgctcaatgcctttgccgataacccagtggtgcgtgccacgcttgaagaagcttcgacggcgctgggtcaggacatcggcaagctgattgcggaaggtccggccgaagagctgaacctgacgaccaacacgcagcccgtgatgctgacggccgcagtggccgtgtaccgcgcatggctcgacgccggtggtccggctccggcgctggttgcaggccatagcctgggcgagtactcggcgctggtggccgcaggggtgatcccgtttgccgaggcggtgccgctggttcgcttccgtgcccaggcgatgcaggaagcggtgccggtgggtgagggcggcatggccgcgatccttggcctgtcggacgatgacgtgcgcgccgcgtgcgccgaggctgcggcggcaggcgctggcgtggtcgaggctgtcaacttcaatgccccgtcgcaggtggtgatcgccggcaacaagggcgccgtggaaaaggcctgcgagattgccaaggcgaagggcgccaagcgcgcgctgccgctgccggtgtccgccccgttccactcgtcgctgctcaagcctgcctccgatcgcctgcgcgagcgcatggctggcctgtcgttctcggcaccggccattccgctggtgaacaatgtcgacgtggcaatcatcagtgacccggctcagatcaaggacgcgcttgttcgtcaggcagccgctccggtacgctgggtcgagtgcgtgcagaagattgccgccgagggcgtgacacacgtgatcgagtgcggtccgggtaaagtgctggccggtatgaccaagcgcatcgacggcaacctcgttggtggtgcaatctttgatccggcgtcgctgcaggaaacgctggcgctgctgaagtaa

SEQ ID NO: 59270 - protein, 311 aa, Ralstonia metallidurans CH34
MKFAFVFPGQGSQSVGMLNAFADNPVVRATLEEASTALGQDIGKLIAEGPAEELNLTTNTQPVMLTAAVAVYRAWLDAGGPAPALVAGHSLGEYSALVAAGVIPFAEAVPLVRFRAQAMQEAVPVGEGGMAAILGLSDDDVRAACAEAAAAGAGVVEAVNFNAPSQVVIAGNKGAVEKACEIAKAKGAKRALPLPVSAPFHSSLLKPASDRLRERMAGLSFSAPAIPLVNNVDVAIISDPAQIKDALVRQAAAPVRWVECVQKIAAEGVTHVIECGPGKVLAGMTKRIDGNLVGGAIFDPASLQETLALLK

SEQ ID NO: 59271 - DNA, 936 bp, Silicibacter sp. TM1040
  CDS (1)..(936): transl_table=11
atgtcgatcgcttttgttttccccggccagggggctcagaccatcggaatgggcaaagcgctggcggaggcttatccggccgccaaagccgtgttcaacgaggtggacgaggccctcggagagagcctgagccacctgatctgggagggcgacatcgagaccttgaccctgacgcagaacgctcagccggcgttgatggcgacctccatggcggcaatgcgcgcgctggaggcagagggcgtcagcatcgacaaggccgcctttgtggccgggcactccttgggggaatattccgcgctggcggcagccggtgcgctctcgatcgccgacaccgctcgcctgctgcgcactcgagggcaggcgatgcaaagcgccgtgccggtgggtgtcggtgcgatggccgcgcttctcgggcttgattttgaaaccgtaaaagccgtggccgccgaggccgcagccgagggcgaggtggtgcaggccgcaaatgacaatgacccgacgcaggtggtggtctccggccacaaggccgcggtagagcgcgccgccgagatcgccaaggaaaaaggcgccaaacgcgcggtgatgctgccggtctccgcccccttccactgtgccctgatgcagcccgccgccgatgtgatggccgaggcacttgcaggcgtggaaatcaaggcgcctgcggtgccgctgatcgccaatgtgcgcgccgatgcggtcaccgaccccgacaccatccgcgcccttttggtggagcaggtcacagggtcggtgcgctggcgcgagagcgtcgcggcgatggcggccaagggcgtcacagagttctgggagatcggcgcgggcaaggcgctttcgggtatgatccgcaagatcgaccgttccctggtctcaaaacaggtcggcaccgacgctgacgtcaaagccgtgaccggcgcataa

SEQ ID NO: 59272 - protein, 311 aa, Silicibacter sp. TM1040
MSIAFVFPGQGAQTIGMGKALAEAYPAAKAVFNEVDEALGESLSHLIWEGDIETLTLTQNAQPALMATSMAAMRALEAEGVSIDKAAFVAGHSLGEYSALAAAGALSIADTARLLRTRGQAMQSAVPVGVGAMAALLGLDFETVKAVAAEAAAEGEVVQAANDNDPTQVVVSGHKAAVERAAEIAKEKGAKRAVMLPVSAPFHCALMQPAADVMAEALAGVEIKAPAVPLIANVRADAVTDPDTIRALLVEQVTGSVRWRESVAAMAAKGVTEFWEIGAGKALSGMIRKIDRSLVSKQVGTDADVKAVTGA

SEQ ID NO: 59273 - DNA, 951 bp, Hyphomonas neptunium ATCC 15444
  CDS (1)..(951): transl_table=11
atgaccctcgcattcattttccccggacagggcagccaggaaatcggcatgggcaaggcactcgccgacgcctttcctgccgcaaaagcagtgtttgaagaggtggacgcggcgctcagccagaagctctcctccgtgatgtgggaaggcgatattgccgagctgaccctcaccgccaacacccagcccgccctgatggcccactccgtggccgccatgagggcgcttgaggcgcatttcggcatttcagcgaaggatgcggcgtttgtcgccggccattcgctgggcgagtattccgcgctggcttcggctggttcgatcagtgtgtctgataccgcgcgcctcctgcgcatccgcggcaatgccatgcaatctgccgttcagccagggcagggcgctatggcggcccttctgggggccgattatgcccaggctgaagctgcctgcgccgcgggccgcgaaactggcggcgcgtgcgacattgccaatgataatgcccccggccagcttgtcatctctggcaccaaggcggcgattgacgccgccattgtctggtcgcaggccaatggcgtgaagaaggctatggcgctgaacgtatcggcgccgttccactgcgccctgatgcagccagctgccgacgcgatggcggcagcgctggcagacaccgagatcaaggccccggctgtgcccctggtggccaatgtcagcgccagcgcagtcacagatcctgaaacgatccgccagaatctggtcaaacaggtgacaggacgggtccgctggaccgaaagcgtgcagtatatggtcggccagggcgttaccatgacgggcgaggccggggcgggcaaagtgctcacggtgatgcaacgccggatcgagaaatcgctgaacggcttcaccctcggcacccctgaggacctggaagccttcgccaaagccatcaaagagagctga

SEQ ID NO: 59274 - protein, 316 aa, Hyphomonas neptunium ATCC 15444
MTLAFIFPGQGSQEIGMGKALADAFPAAKAVFEEVDAALSQKLSSVMWEGDIAELTLTANTQPALMAHSVAAMRALEAHFGISAKDAAFVAGHSLGEYSALASAGSISVSDTARLLRIRGNAMQSAVQPGQGAMAALLGADYAQAEAACAAGRETGGACDIANDNAPGQLVISGTKAAIDAAIVWSQANGVKKAMALNVSAPFHCALMQPAADAMAAALADTEIKAPAVPLVANVSASAVTDPETIRQNLVKQVTGRVRWTESVQYMVGQGVTMTGEAGAGKVLTVMQRRIEKSLNGFTLGTPEDLEAFAKAIKES

SEQ ID NO: 59275 - DNA, 945 bp, Rhizobium leguminosarum bv. viciae 3841
  CDS (1)..(945): transl_table=11
atgaccattgctttcacttttcccggccagggcagtcaggccgtcggcatgggcaaggatctcgccgagaattttgccgaagcccgagccgttttcgaagaggtcgatgaggcactcggtgaaaagctttcggatgtcatgtttaacggtcccgaggatacgttgaccttgacggcgaacgcccagccggcgctgatggccgtctccatcgccgtcatccgcgttctcgaagccaaagggctggatctgaaatccaaggtcgcctacgtcgccggccactcgctcggcgaatattcggcactttgcgccgccggcaccttttcgctcgccgacaccgcgcggctgttgcgcatccgcggcaatgccatgcaggcggccgtccctgtcggcgtcggcgccatggccgcgatcatcggcctcgaacatgccgacgtcatcgccgtctgcgaagaggcgtccgtcatcggcgcctgccagatcgccaacgacaatggcggcggccagatcgtcatctctggcgagaaggcagctgtcgaaaaggcggcggcccttgcgaccgacaagggcgccaagcgcgccattctgctgccggtctctgctccgttccattcgatgctgatggcgcccgccgccgacgccatgcgcgaagcgctggcaaaagtcgccaagtccgaccccgtcgtgcccgtcatcgccaatgtccgtgccgccccggtgaccggcgccgatgaaatcgccagcctgctggtcgagcaggtgaccggtcaggtccgctggcgcgagacggtggaatggttcgccggaaatggcgtgacgacactttatgaactcggttccggcaaggtgctgaccggccttgcccgccgcatcgacaagacgatcaacggcatctccgtcaacggtccggcggacatcgacgcggccgtcgccgccctcatggcctga

SEQ ID NO: 59276 - protein, 314 aa, Rhizobium leguminosarum bv. viciae 3841
MTIAFTFPGQGSQAVGMGKDLAENFAEARAVFEEVDEALGEKLSDVMFNGPEDTLTLTANAQPALMAVSIAVIRVLEAKGLDLKSKVAYVAGHSLGEYSALCAAGTFSLADTARLLRIRGNAMQAAVPVGVGAMAAIIGLEHADVIAVCEEASVIGACQIANDNGGGQIVISGEKAAVEKAAALATDKGAKRAILLPVSAPFHSMLMAPAADAMREALAKVAKSDPVVPVIANVRAAPVTGADEIASLLVEQVTGQVRWRETVEWFAGNGVTTLYELGSGKVLTGLARRIDKTINGISVNGPADIDAAVAALMA

SEQ ID NO: 59277 - DNA, 933 bp, Solibacter usitatus Ellin6076
  CDS (1)..(933): transl_table=11
ttgctacccaagactgcttttctctttccgggccagggctcgcaggccccaggcatgggcaaggccctcgccgacacgcacgccgccgcgcggcgcgtcttcgaagaggccgacgacgccctcggtttccccctctcccgcctctgtttcgaaggccccgaggatcagctcaagctcaccgaaaacacccagcccgcgctgctcactgtgtccatcgccgccttcgaagtgttgcgcgaaaccggccgcgtcccggattacgtcgccggccacagcctcggcgaatactcggcgctcgtcgccgccggcagtcttcgctttgccgatgccgttcgtctggtgcgcaaacgcggccagtacatgcaggaagccgttccccagggtatcggcgccatggccgcgatcctgaaactcccggagggcaagctcgactccatcatcgccgaggccgcccagggtgaagtcctcagcgccgccaacctgaactctcccgaccaggtcgtgatcgccggccacaccggcgcggtcaatcgcgcctgcgaactggccaaggccgccggcgccaagcgcgccatcctgctgcctgtcagcgcgcccttccattgcgccttgatgcggccggcccaagagcggctgcgtgccgaccttgacgccgccgaattccacgacctcacgtgtccactggtcaacaactggcaggcccgcgaaatccgcgccgccgccgaagctcgcgagggactttaccagcaggtgcccaatcccgtccgctgggtcgagaccattcgctacctggcggggcagggcactgccggcttcgtcgaagtcggcgccggttctgtgctcaccggactcctgcgcgctatcgatcccaaactgcagggtgtgaaattcggcgaacccgccgacctggaaaaactaccggctgcctgctaa

SEQ ID NO: 59278 - protein, 310 aa, Solibacter usitatus Ellin6076
MLPKTAFLFPGQGSQAPGMGKALADTHAAARRVFEEADDALGFPLSRLCFEGPEDQLKLTENTQPALLTVSIAAFEVLRETGRVPDYVAGHSLGEYSALVAAGSLRFADAVRLVRKRGQYMQEAVPQGIGAMAAILKLPEGKLDSIIAEAAQGEVLSAANLNSPDQVVIAGHTGAVNRACELAKAAGAKRAILLPVSAPFHCALMRPAQERLRADLDAAEFHDLTCPLVNNWQAREIRAAAEAREGLYQQVPNPVRWVETIRYLAGQGTAGFVEVGAGSVLTGLLRAIDPKLQGVKFGEPADLEKLPAAC

SEQ ID NO: 59279 - DNA, 930 bp, Azoarcus sp. BH72
  CDS (1)..(930): transl_table=11
atggcttttgcgctggtttttccaggccagggttcgcagtccgtcgcgatgatggacgcgtatggcgaatccgcggtgatccgcgacacttttgccgaggcctctgcggcgctgggtgaagatttgtggcagatggtgtgcgaaggaccggcggagcgcctggcgctcacggtgaatacgcaacctctgatgctgactgccggcgtggcggtgtatcgcgcctggcttgcggccggcggtcccaaaccggcgatcgtcgccggtcacagcctcggcgagtatgcggcgctggtggctgctggcgcactggcgtttgccgacgctgtgccgctggtgcggttgcgcgctcaggccatgcaggaagccgtgccggcgggcgagggcgcgatggccgccctgctcgggctggaggcggacgcagtgcgggaggcttgtgccgaagcggcgcaaggcgaggtcgtcgaggcggccaacctgaatgcgccggggcagatcgtcatcgccggggccaaggctgccgtcgagcgtgcgatcgaggtcgccaagggcaagggcgcaaagcgcgcggtgttgctgccggtttcggccccgttccactgtgccttgatgaagccggccgcggagcggttggcggagcgtctggcaggtctcgaaatccgcacccccgagatcgacgtgctgaacaacgtcgatgttgcggtgtacgcggagccggaccgtatccgtgacgcgctggtgcggcaggcgttttcgccggtgcgctggatcgaatccgtgcaggaaatggcccgtcgcggaatgacccatgtcgtcgaatgcgggcccggcaaggtgctcgccggcatgaccaagcgcatcgcgaaggacatcgaaggcggctcggcacacgacgccgcgagtctggaacaatcgattgcggcagtgaggtaa

SEQ ID NO: 59280 - protein, 309 aa, Azoarcus sp. BH72
MAFALVFPGQGSQSVAMMDAYGESAVIRDTFAEASAALGEDLWQMVCEGPAERLALTVNTQPLMLTAGVAVYRAWLAAGGPKPAIVAGHSLGEYAALVAAGALAFADAVPLVRLRAQAMQEAVPAGEGAMAALLGLEADAVREACAEAAQGEVVEAANLNAPGQIVIAGAKAAVERAIEVAKGKGAKRAVLLPVSAPFHCALMKPAAERLAERLAGLEIRTPEIDVLNNVDVAVYAEPDRIRDALVRQAFSPVRWIESVQEMARRGMTHVVECGPGKVLAGMTKRIAKDIEGGSAHDAASLEQSIAAVR

SEQ ID NO: 59281 - DNA, 969 bp, Acidovorax sp. JS42
  CDS (1)..(969): transl_table=11
ttgaactgtttgaccatgtcgaaaacttttgcatttgtgttccccggccaaggctcgcagtcggtgggcatgctggacgcttggggtggccatcccgtggtggccgagacgctgcgcgaggcttccgaggcgctcggcgaagacgtcggtgcgttgattcatgcggggcccaaggaggcgctggcccttaccaccaacacccagccggtgatgctggtggccgggattgcggcttggcgcgtgtggtgcgctgagggcggggcactgccggctgccgtggccgggcactccctgggcgaatactccgcgttggtggcctcgggtgttttgagtctggcccaggcagccccgctggtgcgcctgcgtgccgctgccatgcaggaggccgtgcccgtgggggttggcgccatggcggccatcctcgggctggagtcagccaaggtgatcgccggttgcgccgaggctacggccagctttggtgctggatccaccgatgtggtggaagccgtgaatttcaacgatcccgctcagaccgtgattgcgggtaccaaggcgggcgtggagaaagcctgcgaagtgctcaaggcagcgggcgcaaagcgcgcactgccgttgccggtgtcggcgcccttccactccagcctgatgaagcccgccgcagaaaaactgcgtgccgcgctcgctgcactggaattgggcgctccgcgcattcccgtggtcaacaatgtggacgtcgcggtgcagcaagacgcagatgccatccgcgatgcactctatcggcaggccttcggcccggtgcgctgggtggagtgtgtgcaggcgctgaaggcgcgtggcgtgacgcatgtgatcgaatgcgggcccggcaaggtgctggccgggatgaccaagcgcatcgaccccgaactggttggcgcctcactgtttgacccggccacgctggccgaaaccaaggaactgctggcatga

SEQ ID NO: 59282 - protein, 322 aa, Acidovorax sp. JS42
MNCLTMSKTFAFVFPGQGSQSVGMLDAWGGHPVVAETLREASEALGEDVGALIHAGPKEALALTTNTQPVMLVAGIAAWRVWCAEGGALPAAVAGHSLGEYSALVASGVLSLAQAAPLVRLRAAAMQEAVPVGVGAMAAILGLESAKVIAGCAEATASFGAGSTDVVEAVNFNDPAQTVIAGTKAGVEKACEVLKAAGAKRALPLPVSAPFHSSLMKPAAEKLRAALAALELGAPRIPVVNNVDVAVQQDADAIRDALYRQAFGPVRWVECVQALKARGVTHVIECGPGKVLAGMTKRIDPELVGASLFDPATLAETKELLA

SEQ ID NO: 59283 - DNA, 885 bp, Nostoc punctiforme PCC 73102
  CDS (1)..(885): transl_table=11
atgactaaaactgcatgggtgtttcccggacaaggatctcaaacgctgggaatgggaatagacttattagatatacccttcgctaaagacaaatttgcccaagccgaggaaatcttgggctggtctgtaaccaaaatctgtcaaaacgaagaagccaagttatcacagacgctatatactcagccaagtctttatgtgatagaaagcattcttgcagatcttctccaagaacgaggacaacagccagatttagttgctggccacagtttgggagaatattctgccctttatgtagcgggtgtctttgagtggtcggctggtttatatctagtaaagcgtcgtgcagaactcatggataatgccgtgggtggaatgatggcagctttgatgaactttgaccgcgaacagttagaaaaagtcattgcccacacgcctgatgtggttctagcaaatgataatagttcggctcaggtggtaatttcaggcacaactgaagctgtacaagcagtgatgactcaagttaaagccaagcgtgctattcccctaaaagtttctggagcatttcattcacatttaatcgcaccagcagcggctgaattccaaaacattttagaatctgtggaatttcaaccagctactgtgccagtcttatctaatgtagaaccaattccgtctattgatgccgagattttaaagcagcgcctcaacaaacaaatgactggttctgtacggtggcgtgaaatttctttgcaattaccagctaacggtatccagcgagtagtagaagttggccctggtaaagtcttaactggcttgattaaacgtagcagccctgacttaatattagaaaatatccagagtggtgctgatttagcattgggataa

SEQ ID NO: 59284 - protein, 294 aa, Nostoc punctiforme PCC 73102
MTKTAWVFPGQGSQTLGMGIDLLDIPFAKDKFAQAEEILGWSVTKICQNEEAKLSQTLYTQPSLYVIESILADLLQERGQQPDLVAGHSLGEYSALYVAGVFEWSAGLYLVKRRAELMDNAVGGMMAALMNFDREQLEKVIAHTPDVVLANDNSSAQVVISGTTEAVQAVMTQVKAKRAIPLKVSGAFHSHLIAPAAAEFQNILESVEFQPATVPVLSNVEPIPSIDAEILKQRLNKQMTGSVRWREISLQLPANGIQRVVEVGPGKVLTGLIKRSSPDLILENIQSGADLALG

SEQ ID NO: 59285 - DNA, 942 bp, Listeria monocytogenes str. 1/2a F6854
  CDS (1)..(942): transl_table=11
atgactaaaattgcatttgtatttcccggtcaaggagcacaaaaaattggcatgggacaagatgtagcagcagaatatcctgaagcaaaaaaaatctatgatgatgctgacgaaagactcgggttttcaatcacagaaattattacagaaggtccaattgaattattaacgaaatccgaaaacgcacaaccagctttagtttccacaagtgttgctattttacgcgctttagaaacatatggtgtgaaagctgattacgtagcgggacatagccttggtgaatatagtgcgcttgttgctggcggatttttagaagcaagtgatgcgatttaccttgtacgtaaacgcggtgaattaatggaagcagctgtaccaaatggtgctggcgcaatggctgcagttcttggtgtagaccgagaaacattaaaaacaatcaccgaagaagtaactaaagaaggcgatgaagtacagcttgctaaccttaactgcccaggacaaatcgttatttctggaacaacagctggcgttgaaaaagcaggcgaaaaagcaaaagaaagtggcgcaaaacgcgtattaccacttgctgttagcggacctttccactctagcttaatggaaccagccgcacttgctttccacgatgttttagcagaggttaaaatttctgatggtcagattccagtggttaataacgtggatgctaaagaaactacggataaatccgaaattagcgataaactaatcaagcaaatctattctccagtattatgggaagatatcgtcgaagaattaattaaaaacggcgtagatacgtttgtcgaaattggttctggaaaagtcttagcaggtttaattaagaaaatcaatcgtgatgtaactgtactgtcagcaggtgacgctgaatcagtgaaaagcgttgcagcgacattgaaaggagaataa

SEQ ID NO: 59286 - protein, 313 aa, Listeria monocytogenes str. 1/2a F6854
MTKIAFVFPGQGAQKIGMGQDVAAEYPEAKKIYDDADERLGFSITEIITEGPIELLTKSENAQPALVSTSVAILRALETYGVKADYVAGHSLGEYSALVAGGFLEASDAIYLVRKRGELMEAAVPNGAGAMAAVLGVDRETLKTITEEVTKEGDEVQLANLNCPGQIVISGTTAGVEKAGEKAKESGAKRVLPLAVSGPFHSSLMEPAALAFHDVLAEVKISDGQIPVVNNVDAKETTDKSEISDKLIKQIYSPVLWEDIVEELIKNGVDTFVEIGSGKVLAGLIKKINRDVTVLSAGDAESVKSVAATLKGE

SEQ ID NO: 59287 - DNA, 873 bp, Crocosphaera watsonii WH 8501
  CDS (1)..(873): transl_table=11
atgaaaacagcatgggtatttccaggacaaggatcacaaaccgtaggtatgggagcagatttaaccgcaactcctatggcaaaagatcgcttcatagaggcagaaacaatcttaggttggtctgtattagataaatgtcagggggatgaaactgagttagggaagacgttatacactcaaccttgtttatatgtagtggaaagtattttaatcgacttattgaaagataagggtcaaagggtagatttagtcacaggtcatagtttaggggaatattccgctttatatgctgctgaggtgtttgattttgccacagggttaaacttggttaaacgccgatctgagttgatgagtgaggctgctggaggtaaaatggtggccttgatgaagtttgatcgttctcagttggaagaggcgatcgcaagcattcctggtgtggttttggctaatgataacagcgagcaacaagtggtcatttccggcactcctgaagcagtggatcaactctgttcccaagttaaaagtaaacgtgcgatcgccttaaaagtatccggggcgtttcattctcctttgatggccgaagctgcaacaaagtttaaacagttattagacgaagcgaagtttacagacgcaaaggttcctgtactatccaatgttgatcccactcccagcacctcagcaaccatcctcaaagaacgtttaagcaagcaaatgacgggatcggtacgttggcgtgaaattatgttagctttgcctcaacaagagattactcaagtgttagaagtggggccgggtaaggtattagctggtttacttaagcgtgcttgctctgagatagaggttggcaatataagaagtttagaggatttttag

SEQ ID NO: 59288 - protein, 290 aa, Crocosphaera watsonii WH 8501
MKTAWVFPGQGSQTVGMGADLTATPMAKDRFIEAETILGWSVLDKCQGDETELGKTLYTQPCLYVVESILIDLLKDKGQRVDLVTGHSLGEYSALYAAEVFDFATGLNLVKRRSELMSEAAGGKMVALMKFDRSQLEEAIASIPGVVLANDNSEQQVVISGTPEAVDQLCSQVKSKRAIALKVSGAFHSPLMAEAATKFKQLLDEAKFTDAKVPVLSNVDPTPSTSATILKERLSKQMTGSVRWREIMLALPQQEITQVLEVGPGKVLAGLLKRACSEIEVGNIRSLEDF

SEQ ID NO: 59289 - DNA, 969 bp, Crocosphaera watsonii WH 8501
  CDS (1)..(969): transl_table=11
atgacctcactaaaaacactaccaaagtctgaaaaagtaaacgtttgggtattccctggacagggttctcaaaaattaggtatgggaattgatctgctaaaattaccattaggaaaactaagattaaaacaagctgagaatattctaggttggtcaatttctgatgtctggcaaagtcagacaaaaaaattatccaatacgcagtacactcaaccttgtctttatgtttttatgacagttttagctgatttaatgaagaaatcaggctatcaccctgatgtggttgctggttacagctttggagaatatactgctttgtatacagcaggagcttatgattttgaaactggcttacaattaatccaaaagcgagcagaaattatgtctcggttacctcaaggttcaatggtaactttaattggttttgagggagataaactacgagatgaagttttaaaaaccgaagatgtttggtttgccaatgatgatcccaaatatgctgttatttctggaacttctcaaggagttgcctccattttatctaatgtcccagttgagcgtgtcattcctttagaagttagtgctgcttttcatacacctttagtagaaccagctgcaaaagaatttcagccagttttagagactacagcttttgagcctttatctattcctattttttgcagcactgattttgtttttagtctcagggtcaatcaagttaaagacaatttaattcggcaaattagccgctctgtaaaatggcaaatgatttcccaaagattaataaaccaagggatcaacaaagccattcaattgggttgtggacaagggttactgaaaccgatgaaaaatattgatcctgggttagaaattagtaatgttggctctagcgcagatattgatagtatcgtcattcgtgatcaattgaaaaaacttgcgaatatcaatccagcagttattagggtataa

SEQ ID NO: 59290 - protein, 322 aa, Crocosphaera watsonii WH 8501
MTSLKTLPKSEKVNVWVFPGQGSQKLGMGIDLLKLPLGKLRLKQAENILGWSISDVWQSQTKKLSNTQYTQPCLYVFMTVLADLMKKSGYHPDVVAGYSFGEYTALYTAGAYDFETGLQLIQKRAEIMSRLPQGSMVTLIGFEGDKLRDEVLKTEDVWFANDDPKYAVISGTSQGVASILSNVPVERVIPLEVSAAFHTPLVEPAAKEFQPVLETTAFEPLSIPIFCSTDFVFSLRVNQVKDNLIRQISRSVKWQMISQRLINQGINKAIQLGCGQGLLKPMKNIDPGLEISNVGSSADIDSIVIRDQLKKLANINPAVIRV

SEQ ID NO: 59291 - DNA, 936 bp, Pseudoalteromonas tunicata D2
  CDS (1)..(936): transl_table=11
atgtcagaaaaatttgcaattttattccccggtcaaggttctcagtcagttggcatgttagccgatttacttgcctcttcaacggttgttcaagaaactttcgcagaagcatcagctgcgcttggttacgacttggcggcgttagttttaaacggaccagaagaaagcctcaatcaaactgataaaacccagccggctttattaacttcaagtgttgctatttatcgccactggttgtcacaaggtggtgctaaacctgcggtactcgctggtcacagtttaggtgaatattcagccttggtgtgtgccggtgtactctctttgggtgatgcggtagtgctggttgaaaagcgtggtcaatatatgcaacttgcagtgccagccggtacgggttcgatggccgcagtgattggtctagccgatgatttagttgctcaagcatgccaaagtgcggcgcaaggtgacgttgtagcacctgttaactttaattctccaggccaagtagtaatagccggtgaaaaggcggcggttgaacgtgcatctgcggcttgtaaagaagccggtgctagaatggtcatgccgcttgcagtatctgtaccttcacattgtgcattaatgaagcctgcagctgaaaaattagcaaatgatttaaatgcgattgattttaatattgctgacatcaatgtgattaataatgtcgatgttgccacggttactgaacaagcacaggtaaaagacgctttagttcgtcagctttatagccctgtacgttggacagaaacggtgcaacatattgctgcgctaggtattactacaacgtatgaatttggtccaggtaaagtattgtctggtcttgcaaaacgaattgataaatcagtgtcttgtgtatcagtaaacgatgttgcatcggtaactgctgcattagcgcaagaataa

SEQ ID NO: 59292 - protein, 311 aa, Pseudoalteromonas tunicata D2
MSEKFAILFPGQGSQSVGMLADLLASSTVVQETFAEASAALGYDLAALVLNGPEESLNQTDKTQPALLTSSVAIYRHWLSQGGAKPAVLAGHSLGEYSALVCAGVLSLGDAVVLVEKRGQYMQLAVPAGTGSMAAVIGLADDLVAQACQSAAQGDVVAPVNFNSPGQVVIAGEKAAVERASAACKEAGARMVMPLAVSVPSHCALMKPAAEKLANDLNAIDFNIADINVINNVDVATVTEQAQVKDALVRQLYSPVRWTETVQHIAALGITTTYEFGPGKVLSGLAKRIDKSVSCVSVNDVASVTAALAQE

SEQ ID NO: 59293 - DNA, 936 bp, marine gamma proteobacterium HTCC2207
  CDS (1)..(936): transl_table=11
atgaacaataatttggcatttgtatttcccggtcagggatcacagaaaattggaatgctcgccggtttggccgcagcaaataccttggtagagcagacatttggtgaggcatctgaggttctcggatatgactgctgggatctggtacagaacggcgaagatgacgcgatcaatctgactgagcgaactcagcctattctgctcgctgccagtgttgccatatggcgtctctggcaacagcagggcggccccaacccagccgcaatggccggccacagtctcggcgaatggtctgcattagtctgtgccggtgcggttgaatttgccgatgcggtaaatattgttcgcgcacgtggtgcctttatgcagcaggctgtgcctgtgggcgttggcgcgatggctgcgattatgggcatagacgatcagatagtcatagacgcttgctcagaggccgcagagggtcaggtggttgctgcagtaaactttaatgcaccaggtcaggttgtgattgctggtgatgcggatgcagtggcacgagccacagctatctgcaagaatggtggcgccaagcgcgcggttgaattgccggtaagcgcacctttccatacctcgttgatgcgtccagcggcagacaatcttgctgagttggttgaagcaacgacgtttagtgctccgcagatcaaaattattcacaatgtaaatgctcagtcagaagcggatcctcaaaccatcaagggcttgatgcttgagcaaatttacaagccggtattctgggttgactgtgttaatggccttgccgctggcggtgctgaaatgcttattgaatgtggcccagggcgcgtgctcaacggtctttctaagcgcatagatcgcaatttaaagtctctgtccaccgatgatgtggacagtttagaaaacgctttaacctcagtttaa

SEQ ID NO: 59294 - protein, 311 aa, marine gamma proteobacterium HTCC2207
MNNNLAFVFPGQGSQKIGMLAGLAAANTLVEQTFGEASEVLGYDCWDLVQNGEDDAINLTERTQPILLAASVAIWRLWQQQGGPNPAAMAGHSLGEWSALVCAGAVEFADAVNIVRARGAFMQQAVPVGVGAMAAIMGIDDQIVIDACSEAAEGQVVAAVNFNAPGQVVIAGDADAVARATAICKNGGAKRAVELPVSAPFHTSLMRPAADNLAELVEATTFSAPQIKIIHNVNAQSEADPQTIKGLMLEQIYKPVFWVDCVNGLAAGGAEMLIECGPGRVLNGLSKRIDRNLKSLSTDDVDSLENALTSV

SEQ ID NO: 59295 - DNA, 906 bp, delta proteobacterium MLMS-1
  CDS (1)..(906): transl_table=11
atgggtgaaatgaaaacggcggttatctttcccggtcagggtgcccagtatgtcggcatgggccgggaggttttggagcataacacctgggcccgggaaatgctggccgaggccgaggagatcagcgctttgccgctggccaggctctgtttggaagggccggaagcggaactgacccgtaccctcaatctgcagccggccctgaccgtgatcaacctgatctgctggcgggcggccagccaggccggggtggcgggggattgtttcgccggccacagcctgggcgaatacgccgccctgcaggccgccggggtgttgaattttgccgataccatccgcctggtcaccgagcgcggccgcttgctggaacgggaggcggcggccaatcccgggaccatggcggcggtggtcaagcttgatatcgaagcggtgagcgagattgttgaccaggtgggcggccagggccggttgaccgtggccaaccacaactcggcggcccagatcgtgatctccggggagagtccggcggtggcggcggcggcggccctggtcaaggagcggggcggcaaggcgattccgctgaaggtcagcggcgcctggcacagccccctggttgccggggcggtggccgatttcgagcgcttcatggccgggattacttttaagccaccgcaaaaaccgctctatttcaacgtcaccgccgccccggagagtgagccggcggccatccgcgccctgatggcccgccagcttgccagctctgtccgctggtacgagatcatccagcggttgcaggccgccggggtgcaacactttgtcgaggtcggccccggccaggtactctcggggctgcttaaaaaaatcctgccggccgataccccctgcatcatccgccaggcaccatag

SEQ ID NO: 59296 - protein, 301 aa, delta proteobacterium MLMS-1
MGEMKTAVIFPGQGAQYVGMGREVLEHNTWAREMLAEAEEISALPLARLCLEGPEAELTRTLNLQPALTVINLICWRAASQAGVAGDCFAGHSLGEYAALQAAGVLNFADTIRLVTERGRLLEREAAANPGTMAAVVKLDIEAVSEIVDQVGGQGRLTVANHNSAAQIVISGESPAVAAAAALVKERGGKAIPLKVSGAWHSPLVAGAVADFERFMAGITFKPPQKPLYFNVTAAPESEPAAIRALMARQLASSVRWYEIIQRLQAAGVQHFVEVGPGQVLSGLLKKILPADTPCIIRQAP

SEQ ID NO: 59297 - DNA, 930 bp, Rickettsiella grylli
  CDS (1)..(930): transl_table=11
atgaataaaaaaattgcttttatttttccaggacaaggttcacaatcgctcgggatgttagcggagtttgctaaagaataccctttaattcaagaaaccttttctcaagcttctcaagttcttaagtttgatttatggaaattatgtcaggaagggcccgaggcagcgctgaatcaaactgaaaatacacaaccggctttattggctgccagtgttgcgttatggcgtgtttggcagcaagaacgtggtgtaaagccaatgtttatggccggtcatagtttaggcgagtattcagcactcgtgtgtgcgggtgcattagattatttgattgcaatacgtctcgtggctgaacgtggacgtttgatgcaagccgccgttccagccgggaccggcgcgatggccgctattgtgggtttagatacggaacaattgcaagccctctgtgattcagttgcagaaggccaaatcctagcgccggctaattttaattcaatcggccaaacggtggtgacaggagataaggccgcagtagaaaggttactggaacccgccaaacgggccggtgctaaattagcaaagcgtattccagtgagcgttccttcacattgtgcattaatgaaaccggccgccgagcatttagcggaaacgttgcaaaccattcatattaatacgcctcatattcctgtcctaaataatgttaatgtgcgtattgaacaggatcctcttttaataaaacacgcattaactcaacaactatacagtcctgtgcgttgggtggaaataattcaatcacttgaaaaacgaggaattgaagaatttattgaatgtggtccagggaaagtcttaacagggttaaataaacgcatcacatcaataccgacgcttccgatacatgatccagagatacttcaagaagccttaatgagttaa

SEQ ID NO: 59298 - protein, 309 aa, Rickettsiella grylli
MNKKIAFIFPGQGSQSLGMLAEFAKEYPLIQETFSQASQVLKFDLWKLCQEGPEAALNQTENTQPALLAASVALWRVWQQERGVKPMFMAGHSLGEYSALVCAGALDYLIAIRLVAERGRLMQAAVPAGTGAMAAIVGLDTEQLQALCDSVAEGQILAPANFNSIGQTVVTGDKAAVERLLEPAKRAGAKLAKRIPVSVPSHCALMKPAAEHLAETLQTIHINTPHIPVLNNVNVRIEQDPLLIKHALTQQLYSPVRWVEIIQSLEKRGIEEFIECGPGKVLTGLNKRITSIPTLPIHDPEILQEALMS

SEQ ID NO: 59299 - DNA, 921 bp, Oceanobacter sp. RED65
  CDS (1)..(921): transl_table=11
atgtctaaagttgcagttgtcttccccgggcagggttctcaatcggttggaatgatctctgatgtcatagctcaacacgctattgctaaagacacattgtcggaagcgaatgaggtcctgggttttgatttacaaaccctaatcgaaagcggtccagctgacgagttgaatagcacagaaaatacacagcctgctttggttgcggtagaggttgctctgtggcgagcgctaaatgaaaagctcgcagccgatattatggcggggcatagtttaggtgaatattcggctttagtttgcgctggagcattatccttttgcgatgctttgaaactcgtgcgtcgccgtggccagttaatgcaggaggctgtgcctgcgggtgaaggcggtatggcagcagtgctgggtatgcaagatgatcaagtagaagccatttgtgctcagctttcatcctacaaaattgtgcagcctgctaattacaatgggcccggacaattggtgattgcgggtcatgctgatgcggtagaaaaagccgcggcacaatgcaaagaagctggagcgaagcgggccatgattttgccggtgagtggaccttttcatagtgcattgatgcaaccagcggcggatgcctttgctggctttattgctgaagttgatattaagaccccgagtgttcctgttttacaaaacgctagtatagaacttgaaacagatccgaaacgtatccgttcaaatctcgtagcgcagatagcgtctcctgttaactggaccaggacagttgagttgttagctgagcaaggtgtcgaatcaatttttgaagtgggtccaggcaaggttctgacgggcttgaataagagaattgacaagtctttatcttcaagtgtgatcaacaattcagaatctatcgcgaatattttggcatag

SEQ ID NO: 59300 - protein, 306 aa, Oceanobacter sp. RED65
MSKVAVVFPGQGSQSVGMISDVIAQHAIAKDTLSEANEVLGFDLQTLIESGPADELNSTENTQPALVAVEVALWRALNEKLAADIMAGHSLGEYSALVCAGALSFCDALKLVRRRGQLMQEAVPAGEGGMAAVLGMQDDQVEAICAQLSSYKIVQPANYNGPGQLVIAGHADAVEKAAAQCKEAGAKRAMILPVSGPFHSALMQPAADAFAGFIAEVDIKTPSVPVLQNASIELETDPKRIRSNLVAQIASPVNWTRTVELLAEQGVESIFEVGPGKVLTGLNKRIDKSLSSSVINNSESIANILA

SEQ ID NO: 59301 - DNA, 942 bp, Desulfitobacterium hafniense DCB-2
  CDS (1)..(942): transl_table=11
ttggccaaaatagcatgcattttccccggtcagggctcccaatacgtaggcatgggtaaagaactttttgccaccggctggggccaggaagtgctgacgactggacagcgtgttcttggggaagaattgataaggatcctcctggaaggaccggaggaggaattgaaaaaaaccacctatactcagcccgccattttgttgaccagtatggcggcttggcggggactgcaggaggccgggattcgccccgattacttggccggccatagtctgggtgagtattcggcctataccgcggccgggagtatttcccttgaggaagccttaagggtggtgcgtcgccggggagaactgatgcaggcggctgttcccgagggccagggtgccatggctgccattctcggcttggagaatgccaaggtggaggaagcctgccgccaagcacgggaagaaggcggttggatcgttggcccggccaattataattctccggggcaggttgtgatctccggcgagaccgatggcgtgcagaaagcctgccactatgctaaagagctgggggcgaagcgagccctgcccttggcagtcagcggcccctttcactctcccttgatggcggaagccggcaaggagctgcgtcaggtgctggcagccgtggcttggcaggaccccaatgttcctgtgattgccaacattgatgcccaagaagtcagggaaggcagcatgattgtggagagtctggtgcggcaagtcagcggggccgtgctttgggagcaatccatccgcctcttgggcgagcaaggggttgacacctttattgagctgggtccggggaaggttttaacaggattggttaagaaaattcttcccggtgcgaccctgattaatgtagaagattcttcttctttaggaaaagctacttgcatatttaaaggagagtag

SEQ ID NO: 59302 - protein, 313 aa, Desulfitobacterium hafniense DCB-2
MAKIACIFPGQGSQYVGMGKELFATGWGQEVLTTGQRVLGEELIRILLEGPEEELKKTTYTQPAILLTSMAAWRGLQEAGIRPDYLAGHSLGEYSAYTAAGSISLEEALRVVRRRGELMQAAVPEGQGAMAAILGLENAKVEEACRQAREEGGWIVGPANYNSPGQVVISGETDGVQKACHYAKELGAKRALPLAVSGPFHSPLMAEAGKELRQVLAAVAWQDPNVPVIANIDAQEVREGSMIVESLVRQVSGAVLWEQSIRLLGEQGVDTFIELGPGKVLTGLVKKILPGATLINVEDSSSLGKATCIFKGE

SEQ ID NO: 59303 - DNA, 921 bp, Pseudomonas putida GB-1
  CDS (1)..(921): transl_table=11
atgagcagcctgttcgccttccccggtcaaggcgcccagcaggtaggcatgttgcagcgcctgcctgaaggttcggggcagttgctggaagaggccagcgatgtgcttggtcagccggcgctggcactggacagccagcatgcactgcaagcgacccgtgccgtgcagctgtgcctgctgttgagcggtgtggcctgggcgcgctggctgatgcaacgcagccctgcgccggactacgtggcgggcttgtcgattggtgcctatccggctgcggtggtagcgggcgccttggggtttgccgacgccgtgcgcctggttgccctgcgtggcgagctgatgcagcgcgcctacccacaggggtatggcatgactgcactcagcggcctggacctggccagcgccgagcgcctgctgagcgaggcgccgggagaggtgtacgtcgccaacctcaacagtgaaaaccagatcgttatcgccggtagcgataccgcgatggctgcggtcgcagccagggcgcgtcgccttggccaaggtgcggcccggcgcctggcagtcagcgtgccgtcgcattgcccgctactggccggcccggcggcggaactggctagtgctttcgccacggtcgtgctgcaacggccacgtatcacgtacctaagtggcagcagcgcacggccgatattcgacccacagcgcctgcgcgacgacctggccggcaacatggcgcgggtggtcgactggcgtgctacgttgcgcaacgcctatgagcgcggcgtacgcctgcaccttgagctaccgcccggtagcgtgctcagcgggctggcccgcccggtgttcgaacagggcagggtggtggctgtggagggtacccgttgggacagcctggatgcgctgctgcgccaggaggtggcccagaaccgatga

SEQ ID NO: 59304 - protein, 306 aa, Pseudomonas putida GB-1
MSSLFAFPGQGAQQVGMLQRLPEGSGQLLEEASDVLGQPALALDSQHALQATRAVQLCLLLSGVAWARWLMQRSPAPDYVAGLSIGAYPAAVVAGALGFADAVRLVALRGELMQRAYPQGYGMTALSGLDLASAERLLSEAPGEVYVANLNSENQIVIAGSDTAMAAVAARARRLGQGAARRLAVSVPSHCPLLAGPAAELASAFATVVLQRPRITYLSGSSARPIFDPQRLRDDLAGNMARVVDWRATLRNAYERGVRLHLELPPGSVLSGLARPVFEQGRVVAVEGTRWDSLDALLRQEVAQNR

SEQ ID NO: 59305 - DNA, 939 bp, Pseudomonas putida GB-1
  CDS (1)..(939): transl_table=11
atgtctgcatctctcgcattcgtctttcccggtcaaggttcccagtcgctgggcatgctcgccgaactcggcgccgagaagccagtgatcgtcgaaaccttcaaggaggcctccaaggcactcggttacgacctgtggaagctggtccaggaaggcccggaggagcaactcaaccagaccgacaagacccagccggccatcctcaccgcgtccatcgcgttgtggcgcctgtggctggaagagggcggcgcacagccagccttcgtttctggtcatagcctgggcgaatacagcgccctcgtagctgctggcagcatcaccctggcagacgccgttcgcctggtcgagcgccgtggccagctgatgcaggaagccgtgccggccggccatggtgccatggccgccatcctcggcctggacgatgctgtggtcgttgagctgtgcgccgaagcggctgaagaccaagtggtcagcgccgtgaacttcaactcgccaggccaggtggtcatcgccggcaacaaggctgcggtagaccgcgccatggagctgtgcaaggccaagggtgccaagcgcgccctgccgctggcggtcagcgtaccgtcgcactgtgccctgatgaagccggctgccgagcgctttgccgaatcggtcaacgccatcgaatggaaggccccgcagatcccggtcgtgcagaacgtcaccgccgcagtcgccgccgacctcgatgccctcaagcacgacctgctggcacagctgtatcagccggtacgctgggtcgagtgcgtacaggccttggccgccaatggtgcggtcaacctggtcgagtgtggcccgggcaaggttctggctggcctgaacaagcgttgcgccgacggcgtgaccacctacaacctcaatacccctgacgccgtcgccgccacccgtgcggcgctggcctga

SEQ ID NO: 59306 - protein, 312 aa, Pseudomonas putida GB-1
MSASLAFVFPGQGSQSLGMLAELGAEKPVIVETFKEASKALGYDLWKLVQEGPEEQLNQTDKTQPAILTASIALWRLWLEEGGAQPAFVSGHSLGEYSALVAAGSITLADAVRLVERRGQLMQEAVPAGHGAMAAILGLDDAVVVELCAEAAEDQVVSAVNFNSPGQVVIAGNKAAVDRAMELCKAKGAKRALPLAVSVPSHCALMKPAAERFAESVNAIEWKAPQIPVVQNVTAAVAADLDALKHDLLAQLYQPVRWVECVQALAANGAVNLVECGPGKVLAGLNKRCADGVTTYNLNTPDAVAATRAALA

SEQ ID NO: 59307 - DNA, 888 bp, Streptomyces virginiae
  CDS (1)..(888): transl_table=11
atgacccggatctttatgtttcccggacagggagcgcagcgcgtcggcatgggccggacgcttctcgaccgcttccccgacctcgaacgcgaggccagcgacacgctcggctacagcctgcgccggctgtgcctggaggaccccgagggcaggctcggcaacacccgctacacccagcccgcgatgttcgccgtgaacgccctcgcccaccgcgcggccgtcgaggacggggcccgccccgacatcgcgatcggtcacagcctgggtgagtacaacgccctggaagccgccggggtcttcggcttcaccgacggcctgcggctggtcgcggcccgcgccgcggccatggccgaggtgggcggcggagggatgagcgcggtcgtcgggctcaccgagaccaagctgcgcttcctgctcctgcgcgccggattcgcaacgctggacctcgccaacctcaacaccgcgagccagaccgtcctggccgggccgctggaggacctggaggaagcaggccaggtactggaggacgccggcgcgcgcatggtccgccgactggacgtcagcggccccttccactcccggtacatggcgcccgccgccgccgcgctcgtcccgctggtccggtccgcccggctccggccaccggccttccccgtgatcgccaaccgcaccgcgcagccgtaccgcgcagagctggccgccgacctgctgctccagcagatcgaccaccccgtgcgctggcacgagaccgtccgcaccctgctcgacgagcctgacgcggtgttcaccgagatcggcgagagcaccgtgctgaccagcatggtccggcagatcaagcgggacgccgagcccgcccgcgcggcccgcccgcgccaggccgtcgcctga

SEQ ID NO: 59308 - protein, 295 aa, Streptomyces virginiae
MTRIFMFPGQGAQRVGMGRTLLDRFPDLEREASDTLGYSLRRLCLEDPEGRLGNTRYTQPAMFAVNALAHRAAVEDGARPDIAIGHSLGEYNALEAAGVFGFTDGLRLVAARAAAMAEVGGGGMSAVVGLTETKLRFLLLRAGFATLDLANLNTASQTVLAGPLEDLEEAGQVLEDAGARMVRRLDVSGPFHSRYMAPAAAALVPLVRSARLRPPAFPVIANRTAQPYRAELAADLLLQQIDHPVRWHETVRTLLDEPDAVFTEIGESTVLTSMVRQIKRDAEPARAARPRQAVA

SEQ ID NO: 59309 - DNA, 2376 bp, Bacillus amyloliquefaciens
  CDS (1)..(2376): transl_table=11
gtgtttttatttttatgccggtgtttacaccagtcaatatatgaaataagagacgtttttgtatggagatccacatgtgatatacaaaattggcgatgcggaaaggatgaggataagatgcttacgtttgtgttcccggggcagggttctcaatttaaaggaatgggagccggactgtttgatgaatttcaagatctgacacgtcaggctgatgacatattaggctactctatagaagaattgtgtctggaggatccgaatcatcagctggggaaaacgcaatttacccagccggcgttatatacggtgagtgcactcagttatttaaagaaaatgaaagagtccggcagagagcctgattacgccgcagggcacagtttaggagaatataatgcgttatttgcggccggctgctttgattttgagaccggtttgcagcttgtgaaaaaaagaggggagctcatgagcaaggcagctcccggaggcatggcggcggttttggggtttaccgctgaacaagtaaaagaggttctatccgattatcatctgaccggcattgatatcgctaaccacaattcaccttcgcaaattgtgatcgccggaacgaaacaagacattgaaaaagcgggccccgtctttgaaaaagccggcgtgagaatgtaccttcctttaaatgtgagcggcgccttccattcccgctatatgaaagatgctgaaaaagagtttgcagattatttagaagaaacggcgtttttgcctcttcgttttccggtgatctcaaatcttcatgccgcaccttataagaatgatgaaatcaaaacaaatctgactttgcaaatgaccaatcaggtaaagtggacggacacgatacgccgtctgatgggacttgaaaataatgaaattgcagaagtcgggcccggggaagtgctgacaaaactgacgcgtcagattaaaaaagatgccgtcccattacctatgccgaaagaagagtctgatactgctgatgttaaagcatcggcagctgatccgcaaaaaacggcgggaatgagattagggaacgaagattttaaaaaagattataacatccaatatgcttacatgacgggctccatgtacaggggaattgcttcggaacagatggtcattaaagcggcaaaagcgggaatgctgggctttttcggaacgggcggattgagtatcgaacggatcggacaggccatcggaaccatccggtctgcactgcggcaaggggaaacattcggaatgaatcttcttcatcatatgatgtcacctgacaaggaagtcagaatgatagatttatatttgaaaaacggcattcatcttattgaagcatcggcatttatgggcataacccccgctcttgttatatacagggcaaagggattaagcaggaatcatgacgggtcggtgtcagttcaaaacaaaatcatcgcgaaagtatcccggcctgaagtcgctgaggcctttctgaatccggctccggctcatgtgctggaaagacttgtgtctgacaatcggctgacagccggggaagcggcgcttgcaaaagaaattccgatggctgatgacatttgcgttgaagcggattcaggagggcataccgaccaagggattccgtatacattaatgcctgccatgatcagactcagagaccgcatgatggagaagcacggttatgcgaaaaaagtaagaatcggcgcagcgggcggcatcggcactccggaagcggctgctgccgcgtttctgctcggcgccgaatttatcggaaccggttctattaatcaatgcacggtcgaagccgggacaagtgattcagtgaaagatctgcttcaggaagcgaacgttcaggatacgtcatacgctcccgcgggagatatgtttgaagcgggagcaagggtgcaggtgctgaaaaaaggcctgtttttcccggcaagagccaataaactctttgacttgtacagacaatacaattctttagatgaaatagatgaaaaaacgaaaacattaattgaagaaaagtatttccagcgcagttttgaagaagtgtatgagcagttgaaacgtgataaatctcctgagcagatcgccaaagccgaacagaatccgaaacacaaaatggcgatggtatttaaatggtatttttctcatacgacaaggctcgctctggaaggaaaaagcgaaagtaaaatagattaccaaattcattgcggccctgcgctcggcgcgtttaatcaatgggtgaaaggaaccccgcttgaaaattggagaaacaggcatgtcgatctgatcggcaaacagctcatggaagaaacagccggccttcttgcgcaaaggctggtatcgattacaggctga

SEQ ID NO: 59310 - protein, 791 aa, Bacillus amyloliquefaciens
MFLFLCRCLHQSIYEIRDVFVWRSTCDIQNWRCGKDEDKMLTFVFPGQGSQFKGMGAGLFDEFQDLTRQADDILGYSIEELCLEDPNHQLGKTQFTQPALYTVSALSYLKKMKESGREPDYAAGHSLGEYNALFAAGCFDFETGLQLVKKRGELMSKAAPGGMAAVLGFTAEQVKEVLSDYHLTGIDIANHNSPSQIVIAGTKQDIEKAGPVFEKAGVRMYLPLNVSGAFHSRYMKDAEKEFADYLEETAFLPLRFPVISNLHAAPYKNDEIKTNLTLQMTNQVKWTDTIRRLMGLENNEIAEVGPGEVLTKLTRQIKKDAVPLPMPKEESDTADVKASAADPQKTAGMRLGNEDFKKDYNIQYAYMTGSMYRGIASEQMVIKAAKAGMLGFFGTGGLSIERIGQAIGTIRSALRQGETFGMNLLHHMMSPDKEVRMIDLYLKNGIHLIEASAFMGITPALVIYRAKGLSRNHDGSVSVQNKIIAKVSRPEVAEAFLNPAPAHVLERLVSDNRLTAGEAALAKEIPMADDICVEADSGGHTDQGIPYTLMPAMIRLRDRMMEKHGYAKKVRIGAAGGIGTPEAAAAAFLLGAEFIGTGSINQCTVEAGTSDSVKDLLQEANVQDTSYAPAGDMFEAGARVQVLKKGLFFPARANKLFDLYRQYNSLDEIDEKTKTLIEEKYFQRSFEEVYEQLKRDKSPEQIAKAEQNPKHKMAMVFKWYFSHTTRLALEGKSESKIDYQIHCGPALGAFNQWVKGTPLENWRNRHVDLIGKQLMEETAGLLAQRLVSITG

SEQ ID NO: 59311 - DNA, 2307 bp, Bacillus amyloliquefaciens
  CDS (1)..(2307): transl_table=11
atgcttgcttacgtctttcccggacagggagcgcagtttaaaggaatgggcagagacttattcgatgaattcagtgagctcattaaaaaggcagatcatattttaggatactccataaaggatttatgcctttcagatgaaaaagagaggctgactgatacgaagtatacacaacctgcaatttatacagtgagcgcactgcaatatttaaagggtttaaaagaaggtcatacacgccctgatgctgttgcaggacatagtctgggtgaatatactgcgctttttgcggccggcgtttttaattttgaaacaggtctccggctggttgctaaaagaggcgagttaatgagtgaggcttccgagggcggaatggctgccgtgatcggactggatgagcaccacataaaaaaaatacttcaaaagtatgatctcggccaaatagatatcgccaattacaatacatcttcacaaattgtgatagcaggggctgcagaagagataaagcgggcagcctctttttttgaaaaagaaggggcgaaagcttatatcgtattgcaagtcggcggagcttttcattctcgtttcatggaaagtgcacagcgtaaatttgcggaatttatcgaggagtttcatttttctgaattgaatttcccagtcatttctaactatacggcaagaccttataaacaagaagatatcaaacggaatttaattgaacaaataacaaactcggtaaaatggactgaaagcatcaggtatctaatgggacaaggcgtcactctgtttgaagagatcggtcctggaaacattctgactaaattaattcaaaccatacaaagagatgaggaaccgcttactatcagtgcgccggaagacagtctctttttttctgaagggaacaaggacaattcggaaagcgggaaagagcatagcctcttggctgaaaatatagagagcggtgcagcttcaccggtgtcccgattgggtgatcaatctttcaaagaagattacggtttgacatacgcgtatttggcaggtgcgatgcatagagggatctcttccgctgaaatgctgatccgcctcgggaagaaaggaatgctggggttctttggcacagcgggtttacctataagggaaattgaacaggcccttatttctattaagaagacactcaaaaatggccagccctacggaatgaatctgcgatttgagccggatcatcaagatagagaaaaggaattgatagatttatatatcaagcatgaagtacgagtaatagaagcgtcttcgtatttttccgtcagcgcaccattaatttattacaaagcgcatcagttgaagatagacaaaagcggcagggtcatacctcataatcggatcattgccaaagtttcacggccggaagttgcggccgcatttctgagtccgcctcctcaaagtatcgtaaagagaatgtgtcagcacggtatgctgacggaagagcaggcggagtggctcagccgtattccggcagcagacgatatcattattgaagcagattgcggaagtaatactgaacagagctcattgacagcgatgctgccgttttttgttaagctgcgggatgaaatgatggaaacacacaaatacgcaaggaagataaggatcggggctgcgggaggaatcgggactcccgagtctgccgcgtctgcttttttaatgggcgctgattttattatgacgggatccattaatcaatgtacagttgaagccgaaacaagcggttttgttaaagaaatgctgagtgggacaggaatatgcgatactgcttatgcgccttcggagactctgtttgagttcggaacaaaggttcaggtgctgaaaaagggcacgctgtttccggtcagggcaaataaattatttcaaatctaccaacaatatgagtctttgagtgagatagatgaaaagacaaagattcagctcgaaaatgattattttaacaagacttttgatgaaatctacgaaagcttaatagaaaaacagccgaacctcgcccaaaaagctgagcgcaatcaaaaatataagatgctgttactatttaagtggtatttgcaaagaggatgtctgcttgctttggaagggcaggaagaacaaaaggtgaattttcaagttcattgcggcccgtctttaggcgcttttaatcattgggtaaagggcacggatttggaatcatggagaaacagacatgtcgatgacattggtgaaaaattgatgaatgagaccgaaagtctgctaaggcgcagattggatacgttatttctacactaa

SEQ ID NO: 59312 - protein, 768 aa, Bacillus amyloliquefaciens
MLAYVFPGQGAQFKGMGRDLFDEFSELIKKADHILGYSIKDLCLSDEKERLTDTKYTQPAIYTVSALQYLKGLKEGHTRPDAVAGHSLGEYTALFAAGVFNFETGLRLVAKRGELMSEASEGGMAAVIGLDEHHIKKILQKYDLGQIDIANYNTSSQIVIAGAAEEIKRAASFFEKEGAKAYIVLQVGGAFHSRFMESAQRKFAEFIEEFHFSELNFPVISNYTARPYKQEDIKRNLIEQITNSVKWTESIRYLMGQGVTLFEEIGPGNILTKLIQTIQRDEEPLTISAPEDSLFFSEGNKDNSESGKEHSLLAENIESGAASPVSRLGDQSFKEDYGLTYAYLAGAMHRGISSAEMLIRLGKKGMLGFFGTAGLPIREIEQALISIKKTLKNGQPYGMNLRFEPDHQDREKELIDLYIKHEVRVIEASSYFSVSAPLIYYKAHQLKIDKSGRVIPHNRIIAKVSRPEVAAAFLSPPPQSIVKRMCQHGMLTEEQAEWLSRIPAADDIIIEADCGSNTEQSSLTAMLPFFVKLRDEMMETHKYARKIRIGAAGGIGTPESAASAFLMGADFIMTGSINQCTVEAETSGFVKEMLSGTGICDTAYAPSETLFEFGTKVQVLKKGTLFPVRANKLFQIYQQYESLSEIDEKTKIQLENDYFNKTFDEIYESLIEKQPNLAQKAERNQKYKMLLLFKWYLQRGCLLALEGQEEQKVNFQVHCGPSLGAFNHWVKGTDLESWRNRHVDDIGEKLMNETESLLRRRLDTLFLH

SEQ ID NO: 59313 - DNA, 2241 bp, Bacillus amyloliquefaciens
  CDS (1)..(2241): transl_table=11
atgatcagctttgtttttccaggccaaggctcgcaaagaatagggatgggggaggacctgttcggccgctatcctgaattaaccgcaaaggccgatcacattctcggatattccattcaggagctgtgccgggacggagaacgtctcaatcagactcaattcactcagccggcgctctatgtcgtcaatgccctcagttatttgaaaaaaacagaagaaaccggcttgaaaccggattttaccgctgggcacagtttgggcgaatataacgcgttatacgcttcgggcgcctttgattttgaagaaggcttacagttggtcaaaaaaaggggcgaactgatgagccgcgcaaaaggaggcggcatggcagcggtgatcggcctgactcatgagcaggtgacggatgttttaagagaaaatcacttggatatgattgatatcgccaacatgaacacaccgcaacaaattgtcatttccggatataaagaagatattgaaaaagcagcatccgtttttgaagccgtaaacggcgtaaaaatggttcaccgcttaaatgtcagcggcgcctttcattccagatacatgctggaagcgaaggaagagttttcacggtttattgaatctttccattttaagccgctgtccatcccggtcatttcaaatgtgacggcaagaccctatgagcagagagagctgaaagagacactcaccggacaaataacgggatcggtgaactggacagacagcatccgtttcttaatgggaagaaagaacatgagctttgaggaaatcggtcccggaaaagtgctgacggggctgatacaaagaattacggctgaagcggagccgataacagatgaaatcaaagtcccggctgaggctggaaaaagctcaattacggcggcgtctttaggaaatgaagagtttaagcgcgattatcaattgaaatacgcctacttggctggcggcatgtaccgcggaatttcttcgaaggaaatggttgtcaaactggctgaaaaaggaatgatgggctttttcggaacgggcggtttgaacatcgcgcacgttgaggacgccattttgtcaattcagcatgagcttcgtgacggcggttccttcggcataaatgttgtacataacatgaagcatacagattcagaagaaaaaatgattgatcttttactgaagcatgggattcagaacttggaagcatcagcgtttttaacggttactcccgctttagtaaggtttcgcgctaaggggttaaaacgcggtgccggcggccaaataatagcgcgtcagcggattatcgccaagctgtcccgtccggaagtagcggaagcgtttctcagcccggcgcctgatcacattctgcagaaacttgcagccgaaaacaaaattaccgctgaagaagcaagtctgatgagagaaatacccgttgcgcatgacatctgcgtagaggctgattcaggcggccacactgacggcggagttgcttacagtctcatgccggcgatcatccgtttacgagatgacatgatgaaaaaataccgatacggcaaaaccgtccgcatcggagccgcagggggaatcggaacgcccgaggctgccatggccgcatttatgctcggcgctgattttattgtgaccggatctattaaccaatgcaccgttgaagcagcgacgagcggcctcgtaaaggacctcctgcagcagatgaatgtacaggacacggcctacgcgccggccggcgatatgtttgaatcaggcagcaaggtgcaggtattaaagaaagggctgttctttccgacccgcgcctctaagctgcatgaactgtatcagcgtcaccgctcaattgaagaaattgatgaaaagacactcagacaaatagaagagaagtattttaaggcaagtgtaagcagtatttatgacaaagtgaaggctcattattcgaatgaagacatttcaaaagccgaacggaatccgaaagagaaaatggcgctcatattcaaatggtatttcaggcaaagctctgcttcggcgattaaaggagacccggatgccaaggtagacttccagattcattgcggcccggcattaggcgccttcaatcaatgggtgaaaggtacggagctggagtcctggaaaaaccgccatgccgatggtatcggcatgcggcttatggaagagacggcctcgcttctgaatcagaagttaggttcatttttgcaaacgtgttga

SEQ ID NO: 59314 - protein, 746 aa, Bacillus amyloliquefaciens
MISFVFPGQGSQRIGMGEDLFGRYPELTAKADHILGYSIQELCRDGERLNQTQFTQPALYVVNALSYLKKTEETGLKPDFTAGHSLGEYNALYASGAFDFEEGLQLVKKRGELMSRAKGGGMAAVIGLTHEQVTDVLRENHLDMIDIANMNTPQQIVISGYKEDIEKAASVFEAVNGVKMVHRLNVSGAFHSRYMLEAKEEFSRFIESFHFKPLSIPVISNVTARPYEQRELKETLTGQITGSVNWTDSIRFLMGRKNMSFEEIGPGKVLTGLIQRITAEAEPITDEIKVPAEAGKSSITAASLGNEEFKRDYQLKYAYLAGGMYRGISSKEMVVKLAEKGMMGFFGTGGLNIAHVEDAILSIQHELRDGGSFGINVVHNMKHTDSEEKMIDLLLKHGIQNLEASAFLTVTPALVRFRAKGLKRGAGGQIIARQRIIAKLSRPEVAEAFLSPAPDHILQKLAAENKITAEEASLMREIPVAHDICVEADSGGHTDGGVAYSLMPAIIRLRDDMMKKYRYGKTVRIGAAGGIGTPEAAMAAFMLGADFIVTGSINQCTVEAATSGLVKDLLQQMNVQDTAYAPAGDMFESGSKVQVLKKGLFFPTRASKLHELYQRHRSIEEIDEKTLRQIEEKYFKASVSSIYDKVKAHYSNEDISKAERNPKEKMALIFKWYFRQSSASAIKGDPDAKVDFQIHCGPALGAFNQWVKGTELESWKNRHADGIGMRLMEETASLLNQKLGSFLQTC

SEQ ID NO: 59315 - DNA, 882 bp, Bacillus amyloliquefaciens
  CDS (1)..(882): transl_table=11
atggctgagaaaatgatcacatacttattccccggacaaggttctcaaaagcagggaatggggagctcattgtttgatgaatttaaagacttaacggagcaggctgatgaaacactcggatattctatgaaacggctttgtcttgagaatccgtattccaaccttcacaagacgcagttcacccagcctgctttatatgttgtaaacgtgttaagctatttgaaaaaaatccaagacaatgacataaagccggattatgtggccggccacagtttgggagaatataatgcgctgtttgcagcaggtgcttttgattttattaccggcctgcagcttgtccgtaaaagaggtgaattaatgagtatggccactgacggaaaaatggccgctgttatggggttaactgcagctcaagtgtcagacgcccttcaaacgcacggattacatacgattgatattgccaatatgaattctcctcaccaagttgtcatatccggacgcaaagaagacattgaaagagccaaaagcgtattcgaaggattaaaagacgttacgatgtttcatccgttaaacgtaagcggcgcttttcactcgaggtatatgagtgaagcaaaacaagagttcgaaaaatttttacagtcatttcatttttctgctatatcaattcctgtcatttctaatgtgcatgccagaccttatgagcaagacggaatccactccgttctggccgatcagatcgaccattcagtgcgatggaacgacagcatccgctatctgctggacaaagggcggatggaatttgaagaagtcggcccgggccatgtgctgacaggacttattcaccgcatcaaaaatgaaactgaagcttcacccgccatgtag

SEQ ID NO: 59316 - protein, 293 aa, Bacillus amyloliquefaciens
MAEKMITYLFPGQGSQKQGMGSSLFDEFKDLTEQADETLGYSMKRLCLENPYSNLHKTQFTQPALYVVNVLSYLKKIQDNDIKPDYVAGHSLGEYNALFAAGAFDFITGLQLVRKRGELMSMATDGKMAAVMGLTAAQVSDALQTHGLHTIDIANMNSPHQVVISGRKEDIERAKSVFEGLKDVTMFHPLNVSGAFHSRYMSEAKQEFEKFLQSFHFSAISIPVISNVHARPYEQDGIHSVLADQIDHSVRWNDSIRYLLDKGRMEFEEVGPGHVLTGLIHRIKNETEASPAM

SEQ ID NO: 59317 - DNA, 1242 bp, Aspergillus oryzae
  CDS (1)..(1242)
atgtctgaactaacatggcgcaaactggaccgttgccttttggcttttggggggttgacgggttcatcagagcttgtacgttggcgtcttcgaggatttcgcaaggaggatgccgacgagatcgcggcttttggcaagaacattgtcggaactactcagaacaaggttgccattttggctaacggtttgttaggtcatggagtacagcgcgtaggaatggtgtcttcatggatcaataactttccagacatcgctgggagcttcctggatgaaatggatagtgtattggggtttcggctttctcgtgttatttctgaaggaccgaactcggagctgaataagaccgagaattctcaacctgctattatggcgacgtcaatattgatcctacgaatcttagaacaaaagtttggcttcgacacgaaatctcgtgtggatgtcacccttggtcatagcctgggggagttctccgcactagttactgggggctatattgatttcggcgacgctcttaaactagttcgacggcgggcagaaataatggcccaatgcactcgaagagcctccacggaatctggcgaggattacggaatggtggcacttgtctgcgaacctgatcatcttaacggtttgctcgcaacaatccatgaattcctaggccttgcatcaaatggtatgagagatgatttaagttatgggatgccgcctattgagaaagtgatggtggcaaatgtcaactctaaaaatcaaatagtgctgagcggaagtattgaaaggataagaacactccttatccaacttcgccagtttggaggtcacgatccacgtgcagtgagattgaacagtgaaagcccattccacagtcccataatgatgcctgcggcagaatatatggtccgtgctcttgacaaaatcaaactcaacttcccagcacatatgccgtgtgtttcaaatgtttccggtctcccgttccgctcggcagatgaactaaggaggctactttcacaacagtgtgttgatactgtgcgatggtgggacagtatcaggtatttagatcaagagaggggtgtaaaacgttgggttggcattgggcctgggaaagtcggcaggaatctggttggaaaggaggtcggtaaggtaatgactaaaggaggtggtgtttgggcaatctgtgatactcgcgagcttgaagatatagtcaggagtctcgaacagactgaatttgaagcttcgtgcgattaa

SEQ ID NO: 59318 - protein, 413 aa, Aspergillus oryzae
MSELTWRKLDRCLLAFGGLTGSSELVRWRLRGFRKEDADEIAAFGKNIVGTTQNKVAILANGLLGHGVQRVGMVSSWINNFPDIAGSFLDEMDSVLGFRLSRVISEGPNSELNKTENSQPAIMATSILILRILEQKFGFDTKSRVDVTLGHSLGEFSALVTGGYIDFGDALKLVRRRAEIMAQCTRRASTESGEDYGMVALVCEPDHLNGLLATIHEFLGLASNGMRDDLSYGMPPIEKVMVANVNSKNQIVLSGSIERIRTLLIQLRQFGGHDPRAVRLNSESPFHSPIMMPAAEYMVRALDKIKLNFPAHMPCVSNVSGLPFRSADELRRLLSQQCVDTVRWWDSIRYLDQERGVKRWVGIGPGKVGRNLVGKEVGKVMTKGGGVWAICDTRELEDIVRSLEQTEFEASCD

SEQ ID NO: 59319 - DNA, 1387 bp, Glycine max
  CDS (95)..(1129)
  misc_feature (30)..(30): n is a, g, c or t
  misc_feature (44)..(44): n is a, g, c or t
ggtttgctggctttgaagaaacttcgcacntttctttttttcgntccgtgccatttttcctctctcgctcctccttccactccctttttcgccaatggaacaagaatcttcgctttcaagcactctctcccctcgctctagggtttccatgagcgtctccgctggatctcaggcttccgttcaccaggctttgttcgccgattacaaggcctccacttcattcctcttcccgggccagggtgctcaagctgttggaatggggaaagaagctcaaaatgtgcctgctgctgcggttttgttcaacaaggcaaatgacattttggggtttgatcttcttgatatatgcatcaatgggccaaaagaaaagttagattccaccgttattagccagcctgctatttatgtcacaagtcttgctgctatagagctacttcgtgcacgtgaaggaggtcagcagattattgactcagttgatgttacatgtggtttaagcctgggagaatatactgctctggcatttgctggggctttcagctttgaagatggactcaagttggtcaaactgaggggagaggccatgcaggatgccgctgatgctgctagaagtgctatggttagtgtgataggactggactcagagaaggtccaacaattgtgtgatgcagccaatcaggaagttcctgaagctgagaaggttcagattgccaattacctgtgcccaggaaactatgctgtctctgggggattaaaaggagttgaagtgctagaatccaaggcaaagtctttcaaggctcgaatgacggtgcgcctagctgttgctggtgctttccacactagttttatggaaccagctgtgtcaagattggaagcagcattggcaacaacagaaatcagaaccccaagaataccagtcatctccaatgtgaatgcacagccacatacagatcctaacacaataaagaagatattggcacgccaggttacttcacctgttcaatgggaaacaacagtgaagactcttctaaccaagggtctgaagaaaagctatgaactgggacccggaaaggttattgctggaatcgtcaaaagaatggacaaaggtgctgatattgaaaatatcggtgcttaatgtggggaccttgctccttcttcgggttggaatgaacaaaactaaattgtgttagctataaatcaggatgcgtggaacttgaagctttgaaagcaaggagcagctacagtcatatttgaatgccagttttgaagttaaaatgttaaattataattcacgagttagataagtgattgtacttggcactagaattttttagtttttctaatcttatattcaatctgtctcggagttaattatgcctatgcttctttgtac

SEQ ID NO: 59320 - protein, 344 aa, Glycine max
MEQESSLSSTLSPRSRVSMSVSAGSQASVHQALFADYKASTSFLFPGQGAQAVGMGKEAQNVPAAAVLFNKANDILGFDLLDICINGPKEKLDSTVISQPAIYVTSLAAIELLRAREGGQQIIDSVDVTCGLSLGEYTALAFAGAFSFEDGLKLVKLRGEAMQDAADAARSAMVSVIGLDSEKVQQLCDAANQEVPEAEKVQIANYLCPGNYAVSGGLKGVEVLESKAKSFKARMTVRLAVAGAFHTSFMEPAVSRLEAALATTEIRTPRIPVISNVNAQPHTDPNTIKKILARQVTSPVQWETTVKTLLTKGLKKSYELGPGKVIAGIVKRMDKGADIENIGA

SEQ ID NO: 59321 - DNA, 1203 bp, Bacillus subtilis
  CDS (1)..(1203): transl_table=11
atgaacaatcttgcctttttatttcctggacaagggtctcaatttgtaggaatgggcaaacctttttggaatgattttgtgctcgcaaagaggttatttgaagaagcgagcgatgcgatctcctttgatataaaaaaactgtgttttaacggtgatatgaatgaattgacaaagacaatgaatgcacagcccgctattttaacggtcagtgtgattgcttttcaagtgtatatgcaggaaatagggattaagcctcgctttcttgcaggtcatagcttaggagaatactcagcgcttgtctgtacgggcgccctttcttttcatgatgccgttacacttgtaagacagcggggaattcttatgcaaaatgcggaccctcagcagcaggggacgatggccgccgtgactcagctttctcttcaaacattgcaagaaatatgttcaaaagtgtcgacggaagaatgtccggcagatgtcgcctgcatgaattcagaccagcagcatgtggtttccggacatagagaagctgtggaacgtgtcatcaggatggcggaggaaaagggggctaaatatacttatttgaatgtcagtgcgccttttcacagttcgatgatacgatcagcatccgaacaattccagactgtattacaccagtattccttccgggatgccgcatggccgatcatttcgaatgtcaccgcacacccatacagcagcggaaattcgatcaacgaacatctcaagcagcacatgacgatgccggttagatgggcggaatcaatacattacttgcttctacaaggagtcacggaagtcatcgaaatggggccgaacaatgtcttatccggtctgctgaaaaaaataacgaatcacattgcaccttatcctttaggacagacatctgatattcaccagctttccaattcagcggtaagaaataaacttgttgtccgtttacgcaaaaaacaactgaataaattgatgattcaaaccgtcattgcgcgaaattacaacaaggattcattggcttattccaacatgacgaccccattatttacgcaaatccatgagctgaaggagagaatggaaagacatggagatgagctttcagaacaagaactcgaacattcgatccatttatgcaaattaatttgcaaggctaaacagcttccggcttgggcacaattacggattttaaaataa

SEQ ID NO: 59322 - protein, 400 aa, Bacillus subtilis
MNNLAFLFPGQGSQFVGMGKPFWNDFVLAKRLFEEASDAISFDIKKLCFNGDMNELTKTMNAQPAILTVSVIAFQVYMQEIGIKPRFLAGHSLGEYSALVCTGALSFHDAVTLVRQRGILMQNADPQQQGTMAAVTQLSLQTLQEICSKVSTEECPADVACMNSDQQHVVSGHREAVERVIRMAEEKGAKYTYLNVSAPFHSSMIRSASEQFQTVLHQYSFRDAAWPIISNVTAHPYSSGNSINEHLKQHMTMPVRWAESIHYLLLQGVTEVIEMGPNNVLSGLLKKITNHIAPYPLGQTSDIHQLSNSAVRNKLVVRLRKKQLNKLMIQTVIARNYNKDSLAYSNMTTPLFTQIHELKERMERHGDELSEQELEHSIHLCKLICKAKQLPAWAQLRILK

SEQ ID NO: 59323 - DNA, 912 bp, Streptomyces glaucescens
  CDS (1)..(912): transl_table=11
gtgctcgtactcgtcgctcccggccagggcgcccagacgcccggcttcctgaccccctggctcgaactgcccggggcagccgaccgcgtcgccgcctggtcggacgccatcggactggacctcgcccactacggcacgaaggcagacgcggacgagatccgcgacaccgccgtggcgcagccgctgctggtcgcggcgggcctgctgtcggccgcggcactcggtgacatcgcccccggcgccgtcgccggccacagcgtcggcgagatcaccgcggcccggttcgccggtgtcctcgacgacaccgccgcgctgaccctggtccgcaagcggggtctggccatggccgaggccgccgcgatcaccgagaccggcatgtcggcgctgctcggcggcgaccccgaggtgagcgtcgcgcacctggagaagctgggcctgaccccggcgaacgtgaacggcgcgggccagatcgtcgccgcgggcacgctggagcagctggcggcgctgaacgaggacaagcccgagggcgtccgcaagatcgttccgctgaaggtggccggcgcgttccacacgcaccacatggcgccggccgtcgacaagctggccgaggccgcgcgcgagctgtccccggccgatcccgaggtgccgtacgtctccaacaaggacgggcggaccgtcgccaccggtgacgaggtcgtcgcccggctggtcggccaggtcgccaacccggtccgctgggacctgtgcatggagaccttcaaggagctgggcgtcaccgccctgctggaggtctgccccggcggcaccctcacgggtctcgccaagcgcgcgctgcccggtgtgaagacgctggcgctgaagacccccgacgacctcgacgcggcccgcgagctcttcgcagagcaggcctga

SEQ ID NO: 59324 - protein, 303 aa, Streptomyces glaucescens
MLVLVAPGQGAQTPGFLTPWLELPGAADRVAAWSDAIGLDLAHYGTKADADEIRDTAVAQPLLVAAGLLSAAALGDIAPGAVAGHSVGEITAARFAGVLDDTAALTLVRKRGLAMAEAAAITETGMSALLGGDPEVSVAHLEKLGLTPANVNGAGQIVAAGTLEQLAALNEDKPEGVRKIVPLKVAGAFHTHHMAPAVDKLAEAARELSPADPEVPYVSNKDGRTVATGDEVVARLVGQVANPVRWDLCMETFKELGVTALLEVCPGGTLTGLAKRALPGVKTLALKTPDDLDAARELFAEQA

SEQ ID NO: 59325 - DNA, 951 bp, Streptomyces aureofaciens
  CDS (1)..(951): transl_table=11
atgacccgcaccgccttcgtcttcccgggccagggctccgaatgcgccggcctgggcagggagctgctcgccctgcgcccggacctcggcgacacctactaccgcaccgccgacgacctcctcggcatcccgctggcccggatctgccgtgacggttccccccgggacttcgaggacccggcggtggcccagcccgccgtgttcctgacgagcctggccgtcctggaggtgctgcgcggcgaggggctggagccggacgccgtggccgggcacagcctgggcgagtacgcggcgctggtggccgcgggcgtcctggagtggaccgaggcgctgtggctggtccggctgcgcgccgagctcgtcgccacggccggggaccggatcggcagcgccaccgtggcggtcatcggcccgccccgctcggacctggtgcggctgtgcgccgaggcccgggcggccaccggccaggtcgtggaggtggccggggacaacgagccccggcagaccgtggtgtcgggccaggccgcggcggtggagcgggtcgcgcgggaggccggggcggccggggcacgggtggagcggctgcgcaccggcggacccttccactccagcctgctgggcgaggccgcggcggagttcaccgagacgctgatcgccacggagttccgcgatccggccgtcccgctggtctccggcgtcaccggcgggtgggtgacgacggccgccgaggccgccgtgaccctgcgcggccagctgaccagcccggtgcgctggaccgaggcggtggcgacgctcgccggctcgggcgtcgaccggtacgtggaggtgggccccggccgggtgctgaccggactggtgcgccgcatcctgccgggcgcccgggtccatccgacgtgcgccgcggaccggctcctgggggccgtggacgcgctcaccgccgccacagtctga

SEQ ID NO: 59326 - protein, 316 aa, Streptomyces aureofaciens
MTRTAFVFPGQGSECAGLGRELLALRPDLGDTYYRTADDLLGIPLARICRDGSPRDFEDPAVAQPAVFLTSLAVLEVLRGEGLEPDAVAGHSLGEYAALVAAGVLEWTEALWLVRLRAELVATAGDRIGSATVAVIGPPRSDLVRLCAEARAATGQVVEVAGDNEPRQTVVSGQAAAVERVAREAGAAGARVERLRTGGPFHSSLLGEAAAEFTETLIATEFRDPAVPLVSGVTGGWVTTAAEAAVTLRGQLTSPVRWTEAVATLAGSGVDRYVEVGPGRVLTGLVRRILPGARVHPTCAADRLLGAVDALTAATV

SEQ ID NO: 59327 - DNA, 954 bp, Streptomyces echinatus
  CDS (1)..(954): transl_table=11
gtgagagtgctcgtactcgtcgctcccggccagggcgcccagacgcccggcttcctgactccctggctcgaactgcccggtgccgcggaccgcgtcgccgcatggtcggacgccatcggcctggatcttgtccactacggcacccaggccgacgccgacgccatccgtgacaccgccgtggcccagccgctgctggtcgccgccggtctcctgtccgccgcggcactcggtgacatcgccgagatcgccccgggcgcggtcgcgggccacagcgtcggcgagatcaccgccgccgccttcgccggagtcctggacgacaccgccgccctggatctggtccgcaagcggggtctggccatggccgacgccgccgcggtcaccgagaccggtatggcggcgctcctcggcggcgagcccgaggtgaccctcccgcacctggagaagctgggcctgaccccggcgaacatcaacggcgcgggccagatcgtcgccgcgggcacgctggagcagctggccgcgctgaacgaggacaagcccgagggcgtccgcaaggtcatcgcgctgaaggtcgccggcgccttccacaccggtcacatggcccccgcggtcgagaccctggccaaggccgcggcggaactgtcgccggccgacccccgggtcacctacgtctccaacaaggacggccggaccgtcgcgtccggcgccgaggtgctggaccggctggtcggccaggtcgccaacccggtccgctgggacctgtgcatggagacgttccagaagcagggcgccaccgcgctcatcgaggtgtgcccgggcggcaccctgaccggcctggccaagcgggccctgcccggtgtgaagacactcgccctgaagacccccgccgacctcgacgccgctcgcgagctcatcgcggaggcgtccacacctgccgctgacgcggcgggcgcctga

SEQ ID NO: 59328 - protein, 317 aa, Streptomyces echinatus
MRVLVLVAPGQGAQTPGFLTPWLELPGAADRVAAWSDAIGLDLVHYGTQADADAIRDTAVAQPLLVAAGLLSAAALGDIAEIAPGAVAGHSVGEITAAAFAGVLDDTAALDLVRKRGLAMADAAAVTETGMAALLGGEPEVTLPHLEKLGLTPANINGAGQIVAAGTLEQLAALNEDKPEGVRKVIALKVAGAFHTGHMAPAVETLAKAAAELSPADPRVTYVSNKDGRTVASGAEVLDRLVGQVANPVRWDLCMETFQKQGATALIEVCPGGTLTGLAKRALPGVKTLALKTPADLDAARELIAEASTPAADAAGA

SEQ ID NO: 59329 - DNA, 1203 bp, Bacillus amyloliquefaciens
  CDS (1)..(1203): transl_table=11
atgaacaatcttgcctttttatttcctggacaagggtctcaatttgtaggaatgggcaaacaattttggaatgattttgtgctcgcaaagagattgtttgaagaagcgagcgatgcgatctccttggatgtaaaaaaactgtgttttaacggagatatgaatgaattgacaaagacaatgaacgcgcagcccgctattttaacggtcagtgtgattgcttttcaagtgtatatgcaggaaataggggtgaagccccgcttcctggcaggccatagcttaggcgaatattcagcgcttgtctgtgccggcgccctttcttttcgggatgccgttacacttgtaagggagcggggaattcttatgcaaaatgcagatccccagcagcagggggcgatggccgccgtgactcacctctctcttcaaacgttgcaggaaatatgttcgaaaatatcgacggaagactttccggcaggtgtagcctgcatgaattcagaacagcagcatgtgatttccggacaccggcaagctgtggaacgtgtcatcaagatggcggaggaaaagggtgcggcatacacttatttgaatgtcagtgcgccttttcacagttcgatgatacgatcagcctccgaacaattccagactgtattacaccagtattctttccgggatgccgcatggccgattatttcaaatgtcaccgcgcgcccttacagcagcggaaattcgatcagcgaacatctcaagcagcacatgacgatgccggttagatggacagaatcgatgcattacttgcttttacatggagtcacagaagtcatcgaaatgggtccgaacaatgtcttagccggtctgctgagaaaaacaacgaatcacattgtaccttatcccttaggacagacatctgatgttcccccgctttccaattcagcggaaagaaagaaacatattgtccatttacgcaaaaaacaactgaataaattgatgattcaatccgtcatagcgcgaaattacaacaaggattcagcggcttattccaatatgacgacgccattatttacgcaaatccaagagctgaaagagagaatgaaaaggcatgaagacgtgctttcagaacaagaactcgaacattcgatccatttatgcaaattaatttgtgaagctaaacagcttccggcttgggaagaattgcggattttaaaataa

SEQ ID NO: 59330 - protein, 400 aa, Bacillus amyloliquefaciens
MNNLAFLFPGQGSQFVGMGKQFWNDFVLAKRLFEEASDAISLDVKKLCFNGDMNELTKTMNAQPAILTVSVIAFQVYMQEIGVKPRFLAGHSLGEYSALVCAGALSFRDAVTLVRERGILMQNADPQQQGAMAAVTHLSLQTLQEICSKISTEDFPAGVACMNSEQQHVISGHRQAVERVIKMAEEKGAAYTYLNVSAPFHSSMIRSASEQFQTVLHQYSFRDAAWPIISNVTARPYSSGNSISEHLKQHMTMPVRWTESMHYLLLHGVTEVIEMGPNNVLAGLLRKTTNHIVPYPLGQTSDVPPLSNSAERKKHIVHLRKKQLNKLMIQSVIARNYNKDSAAYSNMTTPLFTQIQELKERMKRHEDVLSEQELEHSIHLCKLICEAKQLPAWEELRILK

SEQ ID NO: 59331 - DNA, 933 bp, Streptomyces griseoflavus
  CDS (1)..(933): transl_table=11
gtgagagcgttcctgttccccggtcaggggacccagaagatcggcatgggcacctacctgcgagaacggtacccccacctgatcgcgccgttgtggcgggaggcggacgacgtcctgggtttccccctcacccgcctctgcgaggaaggccccggcgagaagctccgccacatgccggtcacccagcccgccgtcttcctgtgcagttacgccgcgctcgtcgccgcgcaggcgaacggcgcggagccggacgtcatcgcgggccacagtctgggcgagtactcggcgctggcggcggccggcgtcctcacctggcaggaggtccttcagctcgtccaccgccgcggtcagctcatggcggaggtgcagcacaaggtggacgggaagatggcggccgtcatcggtctcgccatcgggcaggtcgaggagatctgcgagcaggtgcggtccgagaccggtgaggtggtcgaggtggccaaccacaacgagcccctccaggtcgtcgtctccggccagtgcgctgccatagacctcctggtccagcgcgtcgcgacggcgaccgacgtccgcacgtccgtcctgaggatcggtggcccggcccactccagtctcatgggcagcgtcgcgggggacttcgtggagtacctccggcgcttcgacttctgcacgcccaagacgatgctgatctccgggtcgaccgccgagccctacgcgagtgcggaggagatcaggcaccagctcggcaggcagctggtgcaccgggtgcggtgggtggacgtgatggcgcagctcgagaggctgggggtcgcacagacctgggagctggggccgggcaaggtcctctcgggattcgtacagcggtcgctgcctcaggtgcggacgtaccgcgcgaatgatctgccgtccttcctggccggcgtgacgggctggtga

SEQ ID NO: 59332 - protein, 310 aa, Streptomyces griseoflavus
MRAFLFPGQGTQKIGMGTYLRERYPHLIAPLWREADDVLGFPLTRLCEEGPGEKLRHMPVTQPAVFLCSYAALVAAQANGAEPDVIAGHSLGEYSALAAAGVLTWQEVLQLVHRRGQLMAEVQHKVDGKMAAVIGLAIGQVEEICEQVRSETGEVVEVANHNEPLQVVVSGQCAAIDLLVQRVATATDVRTSVLRIGGPAHSSLMGSVAGDFVEYLRRFDFCTPKTMLISGSTAEPYASAEEIRHQLGRQLVHRVRWVDVMAQLERLGVAQTWELGPGKVLSGFVQRSLPQVRTYRANDLPSFLAGVTGW

SEQ ID NO: 59333 - DNA, 2388 bp, Streptomyces atroolivaceus
  CDS (1)..(2388): transl_table=11
atggtggcactggttttcccgggacagggatcgcagcgcaagggcatgggggccgacctgttcgcccgcttccccgacctgacgcggcaggcggacacggtcctcggccactcggtggaggaactgtgccgttcttcgggcgacggcaggctcgaccgcaccgagtacgcgcagcccgccctgttcgtggtcagcgccctgtcgtatctggcccgggatccggggctgccccagccgacgttgctggccgggcacagcctgggcgagtacggcgctctgttcgccgcgggctgtttcgacttcgccaccggggtacgcctcgtccgcgaacggggcgccctgatggggcgcgcccagggcggtggaatgctggcggtgctcggcgtcgacggcgacgaggtgcaggcgctgctcgccgggaccggggcgcgccaggtcgatgtcgcgaactacaacacgcccacccagacggtgctgtccggcccgctggacgaactgcgcatggtctccgcggccctgggacaacggccgggggtgcgatgtgtgcccgtgcgggtgagcgcggcgttccactcccgccatatgcgccccgccgcgcaggaattcgcgacgttcctgaccgggttctccttcgccgatccgcaccgcacggtcatctccagcgtgacggcacgcccgtacggggcggggcaggtcgccgagctgctgtcccgtcagatcgagagccccgtgcggtggtcggagaccatggcctacctcagggagcgcgggacgacggagctggaggagatgggcccgggcaaggtcctgacgggcctgtggaagcagggccgtgccgacggggcgaaggcccgggccgtggcgcccgcaccggtagcggtcgtggccggtgtccccgcggcggccgcggcccgggcgcccgcttccccggcgcctgtggcggcgcgggcagcgactgcggcgcccgcacgcccgtcggaccccgctcccccggctccccgcaccgccccctcccccgcctcgcccgtgccccccgcctccgtttcgcgcgggcagcgggccgaggaactgggcagtgccgagttccggcaggactacgggatccgttacgcctatctcgccggggccatgttccgcgggatcgcctcggcggagctggtcatccgcatggggcgggccggtctcatggggttcttcggggccggcgggctcgggctcgacaaggtggagagcgccctggtgcggatcaaggacgcgctcggtccggacggccggtacggcatgaacctgctgcactcgatcgacgacccggcgtacgagcacgccgtcgtcgacctgtgcctcaagcacggtgtccacgacgtggaggccgccggattcacccaactcaccccggccgtcgtgcagttccgattctccggtgcccaccgggatgccgcgggccgcgccgtcgccgtacgccgggtgctcgccaaggtgtcgcggcccgaggtcgcggccgccttcatggcgcccgcgcccgcggcgatcctgcgccggctgaccgccgacggacggctgacgcctcaggaggccgagatcgccgccgagctgccggtcggccaggacatctgtgtcgaggccgactccgggggccacacggacggcggcgcggccctgacgctgctgccctcgatgatccgccatcgcgacgcggcgatggcccggcacggttacggccggcggatccggatcggcgcggccggcggcatcggcgctcccgaggccgtcgccgccgcgttcgtcctcggcgccgacttcgtgctgaccggcagcgtcaaccagtgctcgcccgaggcgggtacgtccgacgccgtcaaggacatcctggccggtctcgatgtgcaggacaccgcgtacgcgcccgcgggcgacatgttcgagatcggggcccgggtccaagtggtccgcaagggaacgctgttcgcggcgcgcggcaacaagctgtaccagctctaccgcagccacgacagctgggagtcgatcgacgcgggaacccggcgctccgtcgaggagacctacttcaagcggccgttcgccgaggtgtgggaggagacccgcgcctaccacctcgggcgggggcgcgacgccgagatcgagaaggcggaccggctgcccaagcaccggatggccctggcgttccgctggtacttcgcccgctcggtgcgctggggcctggagggcgaaccgacgcagaaggtcaactaccagatccagtgcggcccggcgatcggcgccttcaaccacgtggtgcgcggcaccggcctcgaggactggcgtcaccgccatgtcgacctgatcgccgaacacctgatgacgggcgccgccgacgtcctcgcccgccgctga

SEQ ID NO: 59334 - protein, 795 aa, Streptomyces atroolivaceus
MVALVFPGQGSQRKGMGADLFARFPDLTRQADTVLGHSVEELCRSSGDGRLDRTEYAQPALFVVSALSYLARDPGLPQPTLLAGHSLGEYGALFAAGCFDFATGVRLVRERGALMGRAQGGGMLAVLGVDGDEVQALLAGTGARQVDVANYNTPTQTVLSGPLDELRMVSAALGQRPGVRCVPVRVSAAFHSRHMRPAAQEFATFLTGFSFADPHRTVISSVTARPYGAGQVAELLSRQIESPVRWSETMAYLRERGTTELEEMGPGKVLTGLWKQGRADGAKARAVAPAPVAVVAGVPAAAAARAPASPAPVAARAATAAPARPSDPAPPAPRTAPSPASPVPPASVSRGQRAEELGSAEFRQDYGIRYAYLAGAMFRGIASAELVIRMGRAGLMGFFGAGGLGLDKVESALVRIKDALGPDGRYGMNLLHSIDDPAYEHAVVDLCLKHGVHDVEAAGFTQLTPAVVQFRFSGAHRDAAGRAVAVRRVLAKVSRPEVAAAFMAPAPAAILRRLTADGRLTPQEAEIAAELPVGQDICVEADSGGHTDGGAALTLLPSMIRHRDAAMARHGYGRRIRIGAAGGIGAPEAVAAAFVLGADFVLTGSVNQCSPEAGTSDAVKDILAGLDVQDTAYAPAGDMFEIGARVQVVRKGTLFAARGNKLYQLYRSHDSWESIDAGTRRSVEETYFKRPFAEVWEETRAYHLGRGRDAEIEKADRLPKHRMALAFRWYFARSVRWGLEGEPTQKVNYQIQCGPAIGAFNHVVRGTGLEDWRHRHVDLIAEHLMTGAADVLARR

SEQ ID NO: 59335 - DNA, 1436 bp, Arabidopsis thaliana
  CDS (130)..(1233)
taactccgctaaagcttttttaaaaaggattactactgtttacttctctgaatgcgttcactgcttcactgtactatcttactcacatctccgtctcattctcttatccggcgcacttctctctccgccatggccaccaccgcctcctcttccttgctcctcccttccatatctctcaacaatctctcctcctctaaaaatgcctcctttggcttcgccgccaagaatctcagccgatctaggatttctatgagcgtctctgctggatctcagagtactactgttcacgattctctgttcgctgattacaaacccacctctgcttttctctttcccggtcagggagctcaagcagtaggaatgggaaaagaggctcagagtgttggagcagctggagagttgtataagaaagctaatgatatcttagggtatgatcttttggatatttgtgttaatggaccaaaagagaagcttgattctacggtcataagccagcctgctatttatgtcacaagtttagcagcagttgaattgctccgtgttcgtgaaggcggagaacaaataattaactcggttgatgtgacttgcggtctcagtttgggagagtatactgctctggcttttgctggagccttcagcttcgaggacgggctgaagcttgtaaaacttagaggagaagctatgcaggctgctgcagatgctgctaagagtgccatggttagtatcatagggttggactcagaaaaggttcagcagttgtgtgatgcagcaaatcaagaagtagatgaagctgacaaagttcagatcgcaaattacttatgtccgggtaattacgcagtatctggaggtcttaaaggaatcgaagttgttgaagccaaagctaagtcattcaaagcacgaatgacggtgcgtctagctgttgcaggtgctttccacactagtttcatggaaccagcagtctcgagattagaagctgcattggcagccacagagatcagaagtccgaggatcccagtgatctcgaatgtcgatgcacagcctcatgcagatccagacacgatcaagaagatacttgcacgccaggtgacatctccagtccaatgggagacaacagtaaagactctcttatccaaaggacttcaaagcagctacgaattgggacctggaaaggtaattgcagggatattcaagagagtagataaaagcgcaagtttcgaaaacatcagtgcttgagagtattgctagctttttgttcacatgtatttgagttgagaatcattgataataagtaaatttacaacgtatgtctgtggaatctctctagtgcttcaatagtttggaattcaaagttttgtatggaatatttatgtgacactttacaggatatatgtattgagatatctttttagtttcagttgaagtgaagtgacaaaatc

SEQ ID NO: 59336 - protein, 367 aa, Arabidopsis thaliana
MATTASSSLLLPSISLNNLSSSKNASFGFAAKNLSRSRISMSVSAGSQSTTVHDSLFADYKPTSAFLFPGQGAQAVGMGKEAQSVGAAGELYKKANDILGYDLLDICVNGPKEKLDSTVISQPAIYVTSLAAVELLRVREGGEQIINSVDVTCGLSLGEYTALAFAGAFSFEDGLKLVKLRGEAMQAAADAAKSAMVSIIGLDSEKVQQLCDAANQEVDEADKVQIANYLCPGNYAVSGGLKGIEVVEAKAKSFKARMTVRLAVAGAFHTSFMEPAVSRLEAALAATEIRSPRIPVISNVDAQPHADPDTIKKILARQVTSPVQWETTVKTLLSKGLQSSYELGPGKVIAGIFKRVDKSASFENISA

SEQ ID NO: 59337 - DNA, 1203 bp, Bacillus subtilis
  CDS (1)..(1203): transl_table=11
atgaacaatcttgcctttttatttcctggacaagggtctcaatttgtaggaatgggcaaacaattttggaatgattttgtgctcgcaaagagattgtttgaagaagcgagcgatgcgatctccttggatgtaaaaaaactgtgttttaacggagatatgaatgaattgacaaagacaatgaacgcgcagcccgctattttaacggtcagtgtgattgcttttcaagtgtatatgcaggaaataggggtgaagccccgcttcctggcaggccatagcttaggcgaatattcagcacttgtctgtgccggcgccctttcttttcaggatgccgttacacttgtaagggagcggggaattcttatgcaaaatgcggatccccagcagcaggggacgatggccgccgtgacacagctctctctccaaaccttgcaggaaatatgttcgaaagtgtcgacggaagactttccggcaggtgtagcctgcatgaattcagaacagcagcatgtgatttccggacaccggcaagctgtggaacgtgtcatcaagatggcggaggaaaagggtgcggcatacacttatttgaatgtcagtgcgccttttcacagttcgatgatacgatcagcctccgaacaattccagactgttttacaccggtattccttccgggatgccgcatggccgatcatttcaaatgtcaccgcgcgcccttacagcagcggaaattcgatcagcgaacatctcaagcagcacatgacgatgccggttagatggacagaatcgatgcattacttgcttttacatggagtcacagaagtcatcgaaatgggtccgaacaatgtcttagccggtctgctgagaaaaacaacgaatcacattgtaccttatcccttaggacagacatctgatgttcccccgctttccaattcaacggaaagaaagaaacatattgtccatttacgcaaaaaacaactgaataaattgatgattcaatccgtcattgcgcgaaattacaacaaggattcagcggcttattccactatgacgacgccattatttacgcaaatccaagagctgaaagagagaatgaaaaggcatgaagacgtgctttcagaacaagaactcgaacattcgatccatttatgcaaattaatttgtgaagctaaacagcttccggcttgggaagaattgcggattttaaaataa

SEQ ID NO: 59338 - protein, 400 aa, Bacillus subtilis
MNNLAFLFPGQGSQFVGMGKQFWNDFVLAKRLFEEASDAISLDVKKLCFNGDMNELTKTMNAQPAILTVSVIAFQVYMQEIGVKPRFLAGHSLGEYSALVCAGALSFQDAVTLVRERGILMQNADPQQQGTMAAVTQLSLQTLQEICSKVSTEDFPAGVACMNSEQQHVISGHRQAVERVIKMAEEKGAAYTYLNVSAPFHSSMIRSASEQFQTVLHRYSFRDAAWPIISNVTARPYSSGNSISEHLKQHMTMPVRWTESMHYLLLHGVTEVIEMGPNNVLAGLLRKTTNHIVPYPLGQTSDVPPLSNSTERKKHIVHLRKKQLNKLMIQSVIARNYNKDSAAYSTMTTPLFTQIQELKERMKRHEDVLSEQELEHSIHLCKLICEAKQLPAWEELRILK

SEQ ID NO: 59339 - DNA, 954 bp, Streptomyces sp
  CDS (1)..(954): transl_table=11
atgatcggcaccgcattcgtcttccccgggcagggctcgcagtacgtgggcatggacagtcacctgctcgcacagcggcccgacctggccgacgcctactaccgcaccgccgacgacctcctcggtatcccgctgtcccggctcgcccggcagggacccgcccgtgacctggacgaccccgccgtctcgcagcccgccgtcctgctgaccagcctggtcaccctggacctgctgcgcggcctgggcatcgaacccggcatcgtcgcgggccacagcctgggcgagtacacggccctggtcgccgcggacgtcctggagtggaccgacgcgctggcgctcgtccgtctgcgcggcgaactcgtggccacggtcgacgaccgggtgcccggcgccaccgcggcggtcctgggcctggaccgggcgcgggtggcgcggctgtgtgccgaggtcgccgccggcggcggcaccgtcgaggccagcggcgacaacggaccgggccagacggtgatctccggcgaagtggccgccgtggcgcgggcggcagcggcggcgctgaccgccggggcgagccgggtggtgccgctgaaggcgggcggctccttccactccaggctgctgcgcggcatcgaggccgagttcaccgaggcgctcatcgccaccccgttccgggacccggtcgtccctctcgtgtccagcaccacgggcgcccggatcaccaccgccgccgaggccgtcgtcgccctgcgcagccagttgaccagcccggtgcgctggaccggggcggtccgcgcgctcggcgcggccggcgccgaccggttcgtcgaggtagggccgggccgtgcgctcggcgggctgatccggcggatcgcaccggacgcccgcgtccacgccaccgacaacgcgcgccaactggcccttacccagcatgcgttcaccaccacggcagcagtctga

SEQ ID NO: 59340 - protein, 317 aa, Streptomyces sp
MIGTAFVFPGQGSQYVGMDSHLLAQRPDLADAYYRTADDLLGIPLSRLARQGPARDLDDPAVSQPAVLLTSLVTLDLLRGLGIEPGIVAGHSLGEYTALVAADVLEWTDALALVRLRGELVATVDDRVPGATAAVLGLDRARVARLCAEVAAGGGTVEASGDNGPGQTVISGEVAAVARAAAAALTAGASRVVPLKAGGSFHSRLLRGIEAEFTEALIATPFRDPVVPLVSSTTGARITTAAEAVVALRSQLTSPVRWTGAVRALGAAGADRFVEVGPGRALGGLIRRIAPDARVHATDNARQLALTQHAFTTTAAV

SEQ ID NO: 59341 - DNA, 1367 bp, Perilla frutescens
  CDS (6)..(1136)
ccgcaatggcttcctcaatcgcgctcccctcgatctctctctccaaatccgctttcgccgattccgattccttcaggagctccgtctgtttgggcttcagaaatgacattaggagggtttcgcggttgaattttgagaaatctagggttttcatgagcgtcgccgtcggatcggaggcggcggttgtcgatgacgcgctgttcaaggactacaagccttctactgctttcctctttcctggccagggagcacaaactgttggaatggggttggaggctcaaaaggtacctgctgcagctgaattgtacaagagagctaatgatattttagggtttgaccttttggatacttgcattaatgggccaaaagagaagcttgattccactgtcctaagccagccagctatctatgttacaagtttagctgcagttgaggtacttcgagctcgtgatggaggtcagcaaataattgattctgtggatgtaacgtgtggtctaagcttaggagaatacacagctcttgcatttgctggagcattcagctttgaggatgggcttaagctagtcaaattaaggggtgaggcaatgcaggatgctgctgatgctgctcaaagcgccatggtcagtattattggactagactctgctaaagtgcaggcactttgtgatgctgccaatgaagatgtagatgaagccaataaagttcaaattgcaaatttcttgtgcactggaaactacgctgtctctggaggccttaaaggaattgaagcagttgaagcaaaggcaaaatcattcaaggctcgaatgacggtccggttagctgtagctggagctttccacacaggttttatggagcctgccgtgtcaagattagaaggtgctttggcatcaacagtaatcagtaaacccaggataccagtcatatccaacgttgacgcagaaccacacgcagacccagaaacaatcaagaaaatacttgctcgccaggtgacttctcctgtccaatgggagacaaccgtgaagaccctgttgagcagaggattgacaaagagttatgaattgggacctggaaaggtcatagcgggaattgtgaaaaggatggacaaaggtgctgcgatcgagaacatcggtgcctaagcatatctgaagttgcttcttctatctaaagcctttcagacaatgctttgccttgtctagcgagaatctctccgctttagtcaaacggggcgtggttcagatttcataggatcttaaagagtatcgttgtcaatcatatttatgtttagtttcgattttgagcatctgcgtcaaatacccaagtagaaggaaccaataaatgcggctgttctaaaaaaaaaaaaaaaaaaa

SEQ ID NO: 59342 - protein, 376 aa, Perilla frutescens
MASSIALPSISLSKSAFADSDSFRSSVCLGFRNDIRRVSRLNFEKSRVFMSVAVGSEAAVVDDALFKDYKPSTAFLFPGQGAQTVGMGLEAQKVPAAAELYKRANDILGFDLLDTCINGPKEKLDSTVLSQPAIYVTSLAAVEVLRARDGGQQIIDSVDVTCGLSLGEYTALAFAGAFSFEDGLKLVKLRGEAMQDAADAAQSAMVSIIGLDSAKVQALCDAANEDVDEANKVQIANFLCTGNYAVSGGLKGIEAVEAKAKSFKARMTVRLAVAGAFHTGFMEPAVSRLEGALASTVISKPRIPVISNVDAEPHADPETIKKILARQVTSPVQWETTVKTLLSRGLTKSYELGPGKVIAGIVKRMDKGAAIENIGA

SEQ ID NO: 59343 - DNA, 1023 bp, Streptomyces maritimus
  CDS (1)..(1023): transl_table=11
atggatgcccccaccccacacccctgtcggccgcgccccagagtcgttctcaccttccccggccaaggggcacagcacgcccgcatggccgccggcctctacggcgtctccaagtccttcacctccacgatggaccacgccttcgacgccttcggaccggcgggacgcacactgcgcgaaggatggctcgcggccacaccacccgcggccttcgacgacatctcctatgcccagcccctgctgtacgcggtcaactgcgcgatgggcgccatggtcaccgaggccggtctgcgccccgacgtcctgctgggccacagtgtgggggaactggccgccgccaccctggccggcgtgttctccttcgactgcggcctgcgctacctgtccgaatacatcggcgtctaccggcacgccccgcgcggcggcatgcttgccgtggccgccagccccagggaggtcgaagcccacctggtgccgggcgtggtcatcggcgccgtcaacgcaccgcgccaggttctgctctccgccccggaagaggccctggccgacgtggaagccgccctccgtggtgccggtatcacctgttcccgcgcccgcgccctgcagcccttccaccacccggtgatgcgcgacgtcgtcacgacctacgcgggcttgctcacccgtccgcccctccacccgcctcacaccaccctctactccgcctacaccgggcaggaacttgccaacgagctcgccaccgactggcagttctggaccggtcagcccgccgagccggtcctgttcggccccaccctggagcatctgctgagcagtggccctcacctcttggtcgaggcaggccctggacagagcctgaccgccctggcacggcgcacgcccgcggttgcccgcggtgacgcgaaggccctcgccctgctgccggcccgcgcgggcgagccggacgccgatatcgaagccgtacgggccgccctgaagcaactcgccacctgcggatgcgacccgctgtctccggacttctga

SEQ ID NO: 59344 - protein, 340 aa, Streptomyces maritimus
MDAPTPHPCRPRPRVVLTFPGQGAQHARMAAGLYGVSKSFTSTMDHAFDAFGPAGRTLREGWLAATPPAAFDDISYAQPLLYAVNCAMGAMVTEAGLRPDVLLGHSVGELAAATLAGVFSFDCGLRYLSEYIGVYRHAPRGGMLAVAASPREVEAHLVPGVVIGAVNAPRQVLLSAPEEALADVEAALRGAGITCSRARALQPFHHPVMRDVVTTYAGLLTRPPLHPPHTTLYSAYTGQELANELATDWQFWTGQPAEPVLFGPTLEHLLSSGPHLLVEAGPGQSLTALARRTPAVARGDAKALALLPARAGEPDADIEAVRAALKQLATCGCDPLSPDF

SEQ ID NO: 59345 - DNA, 1203 bp, Bacillus subtilis
  CDS (1)..(1203): transl_table=11
atgaataatcttgcctttttatttccgggacaaggttctcagtttgttgggatgggtaaaagtttttggaatgattttgtgctggcgaagagattatttgaagaggcaagcgatgccatctccatggatgtaaaaaagttgtgctttgatggcgatatgactgaattgacaaggacaatgaatgcacagcctgccattttaacggttagtgttatcgcttatcaagtatatatgcaggaaataggaattaaaccgcactttttggcaggtcacagcttgggcgaatattcagcgcttgtctgtgcaggtgtcctttcttttcaagaagccgttaagcttataaggcagcgaggaatactcatgcaaaatgcagatcctgagcaactgggcacgatggccgcaatcacacaggtttatatccaaccgctacaagacctgtgtacggaaatttcgacggaagacttcccggtaggcgtggcgtgcatgaactcggatcaacagcatgtcatctccggacatcggcaggctgtggaatttgtcattaaaaaagctgagagaatgggggccaatcacacttatttgaacgtcagcgccccttttcatagttcgatgatgagatcagcgtctgaacaattccagactgcattaaatcaatattctttccgagatgctgaatggccgatcatttcgaatgttacagcgattccgtataacaatggccattcggtcagggaacatttgcaaacgcacatgactatgccggtaagatgggcggagtcaatgcactacttgcttttgcacggagtcacggaagtcatcgaaatgggtcccaagaacgtcttggtcggcctattgaaaaaaataacgaatcatattgcagcttaccctttaggtcaaacatctgacttgcatttgctttctgattcggcggaaagaaatgaaaatattgtcaatttacgcaagaagcaattgaataaaatgatgattcaatccatcattgcgagaaattataacaaagatgcaaagacctattccaacctgacgaccccattatttccgcaaatacaactgctcaaagagagagtggaaagaaaagaagttgagctttcggcagaagaactcgaacattcgatccatttatgccaattaatttgtgaggctaaacaacttccgacttgggaacaattgcggattttaaaataa

SEQ ID NO: 59346 - protein, 400 aa, Bacillus subtilis
MNNLAFLFPGQGSQFVGMGKSFWNDFVLAKRLFEEASDAISMDVKKLCFDGDMTELTRTMNAQPAILTVSVIAYQVYMQEIGIKPHFLAGHSLGEYSALVCAGVLSFQEAVKLIRQRGILMQNADPEQLGTMAAITQVYIQPLQDLCTEISTEDFPVGVACMNSDQQHVISGHRQAVEFVIKKAERMGANHTYLNVSAPFHSSMMRSASEQFQTALNQYSFRDAEWPIISNVTAIPYNNGHSVREHLQTHMTMPVRWAESMHYLLLHGVTEVIEMGPKNVLVGLLKKITNHIAAYPLGQTSDLHLLSDSAERNENIVNLRKKQLNKMMIQSIIARNYNKDAKTYSNLTTPLFPQIQLLKERVERKEVELSAEELEHSIHLCQLICEAKQLPTWEQLRILK

SEQ ID NO: 59347 - DNA, 924 bp, Vibrio marinus
  CDS (1)..(924): transl_table=11
atgtcaaagtatgcagtagtattcccaggtcaaggttcacaaacaataggtatgcttgcagatcttgctgcagagcattcagttgtagaacaaacatttgcccaagcaagtgaaatgcttggttatgatctatgggatttagtgcaacatggaacagttgaagaattaagccaaactcatattacgcaacctgcattattggctacctctgttgcattgtggcgcatcgccgccgcgaaagaagattttaaacctgcattagttgccggtcacagtctaggtgaatactcagcacttgtatgtgcaggtgtgattaaattcgaagatgcaattgcacttgttgaattacgtggacaactcatgcaacaagcagtaccacaaggtattggtgcaatggctgctgttattggtcttgataacgatgcaattattgccgcttgtgcaacagcggctgaagatgaggtcgtatcagcggtgaactttaattcacctgggcaggttgttattgcaggtaataaagcggcagtagtacgcgcatctgaattatgtgtagaggcgggtgctcgacgtgtaatgcctttacctgtaagtgtgccttctcattgttcactaatgaaaccagctgctgatgaattgaaattggcgctagaaaaagtgacatttaatacacctgtcattaagttgatcaataatgttgatgtcgcagcaccagtagatgcagaaagtattaaagatgcacttgttcgtcaactatacatgccagtacgctggactgaagtgattgaagcaatggcacagcaagaaataacggcactatatgaatttggccctggtaaagtattaaccggtcttgtaaaacgtatcgataaaacgatcaaaggtagtgcagtgaataatcaagcaacgattgctgattttgtataa

SEQ ID NO: 59348 - protein, 307 aa, Vibrio marinus
MSKYAVVFPGQGSQTIGMLADLAAEHSVVEQTFAQASEMLGYDLWDLVQHGTVEELSQTHITQPALLATSVALWRIAAAKEDFKPALVAGHSLGEYSALVCAGVIKFEDAIALVELRGQLMQQAVPQGIGAMAAVIGLDNDAIIAACATAAEDEVVSAVNFNSPGQVVIAGNKAAVVRASELCVEAGARRVMPLPVSVPSHCSLMKPAADELKLALEKVTFNTPVIKLINNVDVAAPVDAESIKDALVRQLYMPVRWTEVIEAMAQQEITALYEFGPGKVLTGLVKRIDKTIKGSAVNNQATIADFV

SEQ ID NO: 59349 - DNA, 1567 bp, Colletotrichum gloeosporioides
  CDS (252)..(1394)
agtccttcctaggctctttgtgctttcttcaacatttgcacgggagttgtcgatacaagctcatgttcgcgataatctagctccccagcttataatcggctggcgccactggccatgacagcccccggagctcactccctccgccgaggcggccaacggatatgggccaaccgggctcggctgcctcggcagaagatgtaatgcgacgacgacacatacgatacacatcgcttccaggagtagtcgacgacatgcctgccacacaagggaagcggccgcggacggcgctgttctttccaggccaaggggtacagaaggtgggaatgatcacaccatggctcgaggccttccccgcgacggcgaagccaatcttggaggagattgatcactacatgggcttcaagctctccgacatcatcgccaacgggcccggcaagctgcttacgaagacgcccaacgcccagcccgccatcatggcgacctcgatcctcatcctccgcatcctggagcgcgagttcggcttcgacatcccacagcgcgtcgacgttactctcgggcattcgctgggagagttcgcggcgctggtggcgggcggatacctcgagttcgaagacagcttatatctggtgcgcaagcgggcagaggccatgcacgaggcgacaaggcgtgccgtggacgaatacggtggagagtacggcatggtggccatagtaacggaaccggagtacttgaagggcctgatcgaggccatacacgactttgtgggacattcgagcgcggggtccaagggggagagctcggaagacgtcccgccgatagagcaggtgctcattgcgaacatcaatagcaagaaccagattgtgttgagcggcaacattgagcggatcaagactctcgcgacacatgtcaggcagttcctagggcatgacccacgcgccgtgcggttgaacagcgacagcccgtttcacagcccgatcatgaagcccgctgtctcggttgtgaaaagcatactgaacaagaagagcagggtcaaggggcgtgaaggggaggatattatcacattcccgggcaagttgccctgtataagcaacgtcagcgcgaggccgttcgagagcaaggaggacgtgaaggatctcttagcacggcagtgcctagagacggtgaggtggtgggacagcatcaaatatctcgatcaggaggagaaagtgagacgatgggttggcatcgggcccgggaaggtcggccgtaacctcgtcggcaaagaggtgggcatgagagggaaggactcggttaaaggcggtggcgtatgggccatcaccgacccgagcgagatcgaagaggtgctaaggggacttgaggatacggagcattggtcagatgacgatgctgaatgaggagttgtaatgtctttatgtggaatatgggttctacttgtctggcgctttcgttaccaagcacgagcatgagagctcgtcttacggtccatctttaccaatatgttatgatggttactggagtaatggtttattccttgcaatatgtaacaccattttatcggacaaaaaaa

SEQ ID NO: 59350 - protein, 380 aa, Colletotrichum gloeosporioides
MPATQGKRPRTALFFPGQGVQKVGMITPWLEAFPATAKPILEEIDHYMGFKLSDIIANGPGKLLTKTPNAQPAIMATSILILRILEREFGFDIPQRVDVTLGHSLGEFAALVAGGYLEFEDSLYLVRKRAEAMHEATRRAVDEYGGEYGMVAIVTEPEYLKGLIEAIHDFVGHSSAGSKGESSEDVPPIEQVLIANINSKNQIVLSGNIERIKTLATHVRQFLGHDPRAVRLNSDSPFHSPIMKPAVSVVKSILNKKSRVKGREGEDIITFPGKLPCISNVSARPFESKEDVKDLLARQCLETVRWWDSIKYLDQEEKVRRWVGIGPGKVGRNLVGKEVGMRGKDSVKGGGVWAITDPSEIEEVLRGLEDTEHWSDDDAE

SEQ ID NO: 59351 - DNA, 1218 bp, Bacillus cereus
  CDS (1)..(1218): transl_table=11
atgaatattgtatttatgtttcctggcgtaggatcccattattctggaatgggtaagtacctttatgaaaacttccctgtagcacgtgagatatttgaagaagcaagtgacactctaaaaatagacatggcttccctttgtatggagaagatatacaaagctgaccttgaaaagttacaaaattcacagactgctttagtaacaactagcatggcagcttttcgagtttttgaacaagaaataggcaataaaccagaggcaatgattggatattctttgggagaatatacagctctatgtgcttctggagcaattgcattttcagataccttaaaattagtacaagaacgtagtacgattttgagtagctatgcattgactatagatggaactatggcatgggttaacaatcttgctccagaaattgttgaaggtatttgttcagaattgttaaccaagggacaggaagtatatatatcggcttatgacactccaaataaaacatcaatttctggtacaaactctgcggttcagttagcttgtgaaatggtagtagagcatgggggaattgcaatcccccttaaattaagtgggccatttcattctcctatgatgcaacctgctgctgaaaaatataagagtgtactagaaaatatagatatgaaacagccattagtacctgtcatagcgaatcatgatagttcaatgtataaaggtgtagaaaatattagagaaaacctttacttacaattaataaagcctgtgaaatggttggacatgattcactatctaatgaaccaagggtcgatgaaagctattgaaatgggaccaaaggaagtcttgaagtatcttctgcaagctattaaccctgctatatcgacatgtaattatgaaagggagaaagatatcctaaatacaaaaaattcttttacattacaagaatctgattatgaagaagtaatatcagggtgtttaactgtagttgtaagtacaaaaaattataatacagatttaagtgagtatcagaaaaaggtagtacgcccatttcaaaaggtccagagtcaattcgaagaaaaaattaattcggggtattcagtggagaaaagtgatgtagaagaagcaatccaaatgatgaaaacagcacttactgaaaaacagattaaagagagagaacaaaaacgttacctgcaaagagttcttcaatgtaaaagtttttag

SEQ ID NO: 59352 - protein, 405 aa, Bacillus cereus
MNIVFMFPGVGSHYSGMGKYLYENFPVAREIFEEASDTLKIDMASLCMEKIYKADLEKLQNSQTALVTTSMAAFRVFEQEIGNKPEAMIGYSLGEYTALCASGAIAFSDTLKLVQERSTILSSYALTIDGTMAWVNNLAPEIVEGICSELLTKGQEVYISAYDTPNKTSISGTNSAVQLACEMVVEHGGIAIPLKLSGPFHSPMMQPAAEKYKSVLENIDMKQPLVPVIANHDSSMYKGVENIRENLYLQLIKPVKWLDMIHYLMNQGSMKAIEMGPKEVLKYLLQAINPAISTCNYEREKDILNTKNSFTLQESDYEEVISGCLTVVVSTKNYNTDLSEYQKKVVRPFQKVQSQFEEKINSGYSVEKSDVEEAIQMMKTALTEKQIKEREQKRYLQRVLQCKSF

SEQ ID NO: 59353 - DNA, 954 bp, Bacillus subtilis
  CDS (1)..(954): transl_table=11
atgagtaagattgcatttttattcccgggtcagggatcacaatttatcggcatgggaaaagagctttatgagcaggtgcctgctgcaaagcgtctgtttgatgaagccgatgaaacgttggaaacaaaactcagctcgcttatttttgagggggatgctgaagaattaacacttacatacaatgcgcagcctgctttgcttacgacaagcatcgctgttcttgagaaatttaaagaatctggcattacacctgatttcacagcaggacacagccttggtgaatattctgcactggttgcggctggcgctctgtctttcaaagatgctgtttatactgtcagaaagcgcggagagtttatgaatgaagcggtgccggctggcgaaggagcaatggctgcgattctcggcatggatgctgaagcattaaagcaagtaaccgataaagtcacagaggaaggcaaccttgtacagcttgcgaatctcaactgtcctggccaaatcgtcatttccggaacagctaaaggggttgagcttgcatctgaactggcaaaagagaacggcgcaaaacgcgcaattccgcttgaagtaagcggtccgttccattctgaactgatgaaaccggctgctgaaaagctgaaagaggtattggacgcctgtgacataaaagacgctgacgttccggtcatctcaaatgtttctgctgacgtgatgactgaaaaagcagatatcaaagaaaaacttattgagcagctttactctccggttcgttttgaggaaagcattaacaagctgatcgcagagggtgttacgacttttattgaaatcggtcccggaaaagtgctttcaggccttgtgaaaaaagtgaatagacggttaaaaacaattgctgtatcagatccggaaacgatcgagctggcaattcaaacgcttaaggaggagaatgataatgcttaa

SEQ ID NO: 59354 - protein, 317 aa, Bacillus subtilis
MSKIAFLFPGQGSQFIGMGKELYEQVPAAKRLFDEADETLETKLSSLIFEGDAEELTLTYNAQPALLTTSIAVLEKFKESGITPDFTAGHSLGEYSALVAAGALSFKDAVYTVRKRGEFMNEAVPAGEGAMAAILGMDAEALKQVTDKVTEEGNLVQLANLNCPGQIVISGTAKGVELASELAKENGAKRAIPLEVSGPFHSELMKPAAEKLKEVLDACDIKDADVPVISNVSADVMTEKADIKEKLIEQLYSPVRFEESINKLIAEGVTTFIEIGPGKVLSGLVKKVNRRLKTIAVSDPETIELAIQTLKEENDNA

SEQ ID NO: 59355 - DNA, 1140 bp, Drosophila melanogaster
  CDS (1)..(1140)
atgttggccgcccgcagattactacgatcaccgcggattaccggtgccctaagctggtcccgctggagcagcgatgccgcgaaggccacaacagaaacctccgcccttttgcagaacgcggagaagcggcagcaactgctcaacgagctttctgagccgctggaacagaaaggccggcccgccatcgatcccaaggaaacaagtgtgatgctctttcccggtcagggcacccagtacgtgggcatggccaaagacctgctccggttcccgggcgcccgtcgcatcttcgagctggccaacgaggtgctgaaatacgatctgctcaagatctgcctggagggaccacgtgagaaactgaatcgcacggagcacgctcagctggctgtgatggtatcctcgctggcagcactggagcagttgcgtgaggagcgacccaaggccattgaaacgtgtgtagctgccgcaggctttagtttgggcgagattaccgcattggtgtacgcggatgccctgcctttcgacaaggcattgcgattggtgcaggtgcgggccaccgccatgcaggcggcatgtgaccaggcagccggagccatggcgatgactctctacggaccggataccaatctgggagaggcctgcgctcgtgcgcagcaatggtgtctggacaaaggagtggagtcgccctactgtggcatcgccaactacatgtatccgcactgcaaggtagtggccggcaacgtagaggccctggagttcctggaacaaaatgccaagtccttcaaaatccggcggatgaagagattggctgtcagtggcgcctttcacactcctctaatgcaaagcgccgtggagccatttaccaaagccctgaaaacggtgcgacttcaggaccccgtcattagagtgtactccaatgtggatggcaaaccctatcgccatgccaagcacatcctaacgcagctgcccaagcaaatcgtgaggcccgtcaagtgggagcagactctccacgagatgtacgagcgcaagcagggcgtcgactttccacgcaccttcgaatgcggtcctggcaagggcctggtccaggtcctggaaaaagtaaatgccaaggccgctcaatccagctttaatgttatagcctaa

SEQ ID NO: 59356 - protein, 379 aa, Drosophila melanogaster
MLAARRLLRSPRITGALSWSRWSSDAAKATTETSALLQNAEKRQQLLNELSEPLEQKGRPAIDPKETSVMLFPGQGTQYVGMAKDLLRFPGARRIFELANEVLKYDLLKICLEGPREKLNRTEHAQLAVMVSSLAALEQLREERPKAIETCVAAAGFSLGEITALVYADALPFDKALRLVQVRATAMQAACDQAAGAMAMTLYGPDTNLGEACARAQQWCLDKGVESPYCGIANYMYPHCKVVAGNVEALEFLEQNAKSFKIRRMKRLAVSGAFHTPLMQSAVEPFTKALKTVRLQDPVIRVYSNVDGKPYRHAKHILTQLPKQIVRPVKWEQTLHEMYERKQGVDFPRTFECGPGKGLVQVLEKVNAKAAQSSFNVIA

SEQ ID NO: 59357 - DNA, 930 bp, Salmonella typhimurium
  CDS (1)..(930): transl_table=11
atgacgcaatttgcatttgtgttccccggtcagggttctcagagcgttgggatgttggccgagatggcggcaaattaccctatcgtagaagaaacgtttgctgaagcttctgcggctctgggatatgatctgtgggcgctcacccagcaaggtccagcggaagaactgaataaaacctggcagacgcagccggcgttattaaccgcttccgtcgcgctttggcgcgtttggcagcagcagggcggtaaaatgcctgcgttaatggcaggtcacagcctgggcgaatattccgcgctggtttgcgctggcgtcatcaactttgctgatgccgttcgtctggtggaaatgcgcggtaaattcatgcaggaagcggttccggaaggcactggcggcatgtctgcgatcatcgggctggatgatgcctctattgctaaagcctgtgaagaatctgccgaagggcaggttgtttcgccggttaactttaactcgccgggacaggtggttatcgccgggcataaagaggcggtagaacgtgcgggcgcagcctgtaaagccgctggcgcgaaacgcgcgctgccgctgccggtgagcgtaccgtcgcactgcgcgctgatgaaaccagcggcagataagctggcggttgaattagccaaaattacctttagcgcgccaacggtgccggtagtgaacaacgttgacgtgaaatgtgaaaccgatgccgccgctatccgcgatgcgctggttcgccagttgtacaatccggtacagtggacgaagagcgtggaatttatcgcggcgcagggcgttgaacatctttatgaagtgggtccaggtaaagtcctcactggtctgacgaaacgtattgtcgacaccctgacagcgtcggcgctgaacgagccggcggcgctgtctgcggcacttacgcaataa

SEQ ID NO: 59358 - protein, 309 aa, Salmonella typhimurium
MTQFAFVFPGQGSQSVGMLAEMAANYPIVEETFAEASAALGYDLWALTQQGPAEELNKTWQTQPALLTASVALWRVWQQQGGKMPALMAGHSLGEYSALVCAGVINFADAVRLVEMRGKFMQEAVPEGTGGMSAIIGLDDASIAKACEESAEGQVVSPVNFNSPGQVVIAGHKEAVERAGAACKAAGAKRALPLPVSVPSHCALMKPAADKLAVELAKITFSAPTVPVVNNVDVKCETDAAAIRDALVRQLYNPVQWTKSVEFIAAQGVEHLYEVGPGKVLTGLTKRIVDTLTASALNEPAALSAALTQ

SEQ ID NO: 59359 - DNA, 1155 bp, Brassica napus
  CDS (1)..(1155)
atgcgctcactgcttcaccgtacacctcctttgaaagctcattgtcttatcctgcgcaccaccacgatggccacctcctactcttcttccttgctcctccctccttccgtatctctcaacaagtcccgaaacggctcctccctcggattctccgtcaaccgatctagggtttccacgaacgtctccgctggatctcagaccactctcaacgactctctcttcgccgattacaaacccacctctgcttttctctttcccggtcagggagctcaagcaatagggatgggcaaagaggctcagagtgttgctgcagctgcagacttgtataccaaagccaaccatatcttagggtatgatcttcttgacatttgtgttaatggaccaaaagagaagcttgattccactgtcattagccagcctgctatttatgtcacaagtctagcagcagttgaactacttcgtgttcgtgaaggcggcgagcaaataattaactccgttgatgtcacttgtggtctcagcttgggagagtacactgctctcgcatttgctggagccttcagctttgaggatgggctaaagcttgtaaaacttagaggagaagccatgcaggctgctgcagatgctgctaagagtgcaatggttagtatcatagggttggactcagaaaaagttcagcagttgtgtgatgcagcaaatcaagaagtagaagaagctgacaaagttcagatcgctaattacttatgtccgggtaactacgcagtatctggaggtcttaagggaatcgaggctgtcgaagccaaagctaagtccttcaaggcccgcatgacggttcgtctagctgtagcaggtgctttccacactagtttcatggagccagcagtgtctagattagaagctgcattggcatcaacggagatcagaagtccgaggatcccagtgatctccaacgtggatgcacagcctcatgcagatccagacactatcaagaagatacttgcacgccaggtgacatctccagtgcaatgggagacaacggtgaagacactcttatccaaagggcttaaaagcagctatgaactgggacctggaaaggtgattgcagggatattcaagagagtagacaaaaccgccagtgtcgaaaacataagtgcttga

SEQ ID NO: 59360 - protein, 384 aa, Brassica napus
MRSLLHRTPPLKAHCLILRTTTMATSYSSSLLLPPSVSLNKSRNGSSLGFSVNRSRVSTNVSAGSQTTLNDSLFADYKPTSAFLFPGQGAQAIGMGKEAQSVAAAADLYTKANHILGYDLLDICVNGPKEKLDSTVISQPAIYVTSLAAVELLRVREGGEQIINSVDVTCGLSLGEYTALAFAGAFSFEDGLKLVKLRGEAMQAAADAAKSAMVSIIGLDSEKVQQLCDAANQEVEEADKVQIANYLCPGNYAVSGGLKGIEAVEAKAKSFKARMTVRLAVAGAFHTSFMEPAVSRLEAALASTEIRSPRIPVISNVDAQPHADPDTIKKILARQVTSPVQWETTVKTLLSKGLKSSYELGPGKVIAGIFKRVDKTASVENISA

SEQ ID NO: 59361 - DNA, 1431 bp, Zea mays
  CDS (1)..(1431)
atgtgcataggattattcctttcaattacaatatatttgcaggcttgtcaattaagtgctatgttctgcctgctgaatatgttctttatgcaggcgcggattcccgggcgctgtggcgctgtcgtcctcgctcacctcgtccgtcctcgtgagctccgcctgccctccatctggacagctccagcctccagccatctccccccacctgtacacagttacaaagcttggcacttcgcagttcgcactcgcatgctcttcgccccctcgcgcttaccgctgccgcgcctcccgactcgccgcctccgcctagctccgggctctccaatggcctccatgctcgccatcctcaggccctcggcgccggccccgctcgcgggacgccgggccagggctgccgcgccggcgaccgcgagggtggcgctatctaccagatctaggtattcgtcagccagggtgtcgctcggctccgaggttgcagtgggcgccgacgcgctcttcgccgactataagcccaccaccgctttcctcttccccggccagggtgcccaaaccgttggaatgggggcagaagctcagagtgttccagcagctaccaaattgttcaaccaggcaaatgaaatccttggatatgacttgctggatctttgcaccaatggaccaaaagaaaagcttgactcaacaatgatcagtcagccagctatatatgtcaccagccttgcagcagtagaggtactacgtgcacgcgatggaggccaagatgtgattaactctgtagatgttacatgtggtctcagtttgggagagtataccgctcttgcatttgccggtgcttttagctttgaggatggactgaagcttgtcaagctaagaggagaagctatgcaggatgcttcagatgctgccaatagtgcgatggttagtgtgattggtctggattcagaaaaggtgcaagaactatgtgatgctgctaatgacgaagtagatgaaaacgatagagttcaaatagcaaactttctgtgccctgggaattatgcagtttctggtggtgtaaaaggtattgaagtagtcgaagccaaagcaaagtccttcaaggccagaatgacggttcgcctagctgttgctggcgctttccatactagcttcatgcaaccagctgtttcaagattggaatctgcgttggctgccactgagattagaacacctagaattccggtcatctccaatgttgatgcgcagccccactcagatcctaacaccatcaagcagattttagctcagcaggtaacctctccggtgcaatgggaaaccactgttaagaatcttatgggcaaggggcttgagaaaagttatgaactcggacctggaaaggttatagcaggtattctcaagaggatcaacaaaggcactagcattgagaacatcggggcttaa

SEQ ID NO: 59362 - protein, 476 aa, Zea mays
MCIGLFLSITIYLQACQLSAMFCLLNMFFMQARIPGRCGAVVLAHLVRPRELRLPSIWTAPASSHLPPPVHSYKAWHFAVRTRMLFAPSRLPLPRLPTRRLRLAPGSPMASMLAILRPSAPAPLAGRRARAAAPATARVALSTRSRYSSARVSLGSEVAVGADALFADYKPTTAFLFPGQGAQTVGMGAEAQSVPAATKLFNQANEILGYDLLDLCTNGPKEKLDSTMISQPAIYVTSLAAVEVLRARDGGQDVINSVDVTCGLSLGEYTALAFAGAFSFEDGLKLVKLRGEAMQDASDAANSAMVSVIGLDSEKVQELCDAANDEVDENDRVQIANFLCPGNYAVSGGVKGIEVVEAKAKSFKARMTVRLAVAGAFHTSFMQPAVSRLESALAATEIRTPRIPVISNVDAQPHSDPNTIKQILAQQVTSPVQWETTVKNLMGKGLEKSYELGPGKVIAGILKRINKGTSIENIGA

SEQ ID NO: 59363 - DNA, 1182 bp, Zea mays
  CDS (1)..(1182)
atgctcttcgccccctcgcgcttaccgctgccgcgcctcccgactcgccgcctccgcctagctccgggctctccaatggcctccatgctcgccatcctcaggccctcggcgccggccccgctcgcgggacgccgggccagggctgccgcgccggcgaccgcgagggtggcgctatctaccagatctaggtattcgtcagccagggtgtcgctcggctccgaggttgcagtgggcgccgacgcgctcttcgccgactataagcccaccaccgctttcctcttccccggccagggtgcccaaaccgttggaatgggggcagaagctcagagtgttccagcagctaccaaattgttcaaccaggcaaatgaaatccttggatatgacttgctggatctttgcaccaatggaccaaaagaaaagcttgactcaacaatgatcagtcagccagctatatatgtcaccagccttgcagcagtagaggtactacgtgcacgcgatggaggccaagatgtgattaactctgtagatgttacatgtggtctcagtttgggagagtataccgctcttgcatttgccggtgcttttagctttgaggatggactgaagcttgtcaagctaagaggagaagctatgcaggatgcttcagatgctgccaatagtgcgatggttagtgtgattggtctggattcagaaaaggtgcaagaactatgtgatgctgctaatgacgaagtagatgaaaacgatagaatcgaagtacataaaaatacattgcaggggaattatgcagtttctggtggtgtaaaaggtattgaagtagtcgaagccaaagcaaagtccttcaaggccagaatgacggttcgcctagctgttgctggcgctttccatactagcttcatgcaaccagctgtttcaagattagaatctgcgttggctgccactgagattagaacacctagaattccggtcatctccaatgttgatgcgcagccccactcagatcctaacaccatcaagcagattttagctcagcaggtaacctctccggtgcaatgggaaaccactgttaagaatcttatgggcaaggggcttgagaaaagttatgaactcggacctggaaaggttatagcaggtattctcaagaggatcaacaaaggcactagcattgagaacatcggggcttaa

SEQ ID NO: 59364 - protein, 393 aa, Zea mays
MLFAPSRLPLPRLPTRRLRLAPGSPMASMLAILRPSAPAPLAGRRARAAAPATARVALSTRSRYSSARVSLGSEVAVGADALFADYKPTTAFLFPGQGAQTVGMGAEAQSVPAATKLFNQANEILGYDLLDLCTNGPKEKLDSTMISQPAIYVTSLAAVEVLRARDGGQDVINSVDVTCGLSLGEYTALAFAGAFSFEDGLKLVKLRGEAMQDASDAANSAMVSVIGLDSEKVQELCDAANDEVDENDRIEVHKNTLQGNYAVSGGVKGIEVVEAKAKSFKARMTVRLAVAGAFHTSFMQPAVSRLESALAATEIRTPRIPVISNVDAQPHSDPNTIKQILAQQVTSPVQWETTVKNLMGKGLEKSYELGPGKVIAGILKRINKGTSIENIGA

SEQ ID NO: 59365 - DNA, 21 bp, Artificial sequence
  primer
atgaaaactgcatgggtattc

SEQ ID NO: 59366 - DNA, 21 bp, Artificial sequence
  primer
ttacagggaattcaagtcgtc

SEQ ID NO: 59367 - protein, 334 aa, Artificial sequence
  consensus sequence
  Variant (6)..(6): Xaa in position 6 is any amino acid
  Variant (8)..(9): Xaa in position 8 to 9 is any amino acid
  Variant (12)..(25): Xaa in position 12 to 25 is any amino acid
  Variant (26)..(29): Xaa in position 26 to 29 is any or no amino acid
  Variant (31)..(33): Xaa in position 31 to 33 is any amino acid
  Variant (36)..(46): Xaa in position 36 to 46 is any amino acid
  Variant (47)..(54): Xaa in position 47 to 54 is any or no amino acid
  Variant (56)..(57): Xaa in position 56 to 57 is any amino acid
  Variant (59)..(61): Xaa in position 59 to 61 is any amino acid
  Variant (64)..(85): Xaa in position 64 to 85 is any amino acid
  Variant (86)..(96): Xaa in position 86 to 96 is any or no amino acid
  Variant (104)..(104): Xaa in position 104 is any amino acid
  Variant (107)..(108): Xaa in position 107 to 108 is any amino acid
  Variant (111)..(119): Xaa in position 111 to 119 is any amino acid
  Variant (122)..(123): Xaa in position 122 to 123 is any amino acid
  Variant (125)..(127): Xaa in position 125 to 127 is any amino acid
  Variant (129)..(130): Xaa in position 129 to 130 is any amino acid
  Variant (132)..(135): Xaa in position 132 to 135 is any amino acid
  Variant (136)..(145): Xaa in position 136 to 145 is any or no amino acid
  Variant (147)..(147): Xaa in position 147 is any amino acid
  Variant (149)..(150): Xaa in position 149 to 150 is any amino acid
  Variant (152)..(167): Xaa in position 152 to 167 is any amino acid
  Variant (168)..(191): Xaa in position 168 to 191 is any or no amino acid
  Variant (193)..(193): Xaa in position 193 is any amino acid
  Variant (195)..(196): Xaa in position 195 to 196 is any amino acid
  Variant (197)..(197): Xaa in position 197 is any or no amino acid
  Variant (199)..(199): Xaa in position 199 is any amino acid
  Variant (201)..(202): Xaa in position 201 to 202 is any amino acid
  Variant (204)..(222): Xaa in position 204 to 222 is any amino acid
  Variant (223)..(228): Xaa in position 223 to 228 is any or no amino acid
  Variant (230)..(230): Xaa in position 230 is any amino acid
  Variant (232)..(235): Xaa in position 232 to 235 is any amino acid
  Variant (237)..(239): Xaa in position 237 to 239 is any amino acid
  Variant (241)..(242): Xaa in position 241 to 242 is any amino acid
  Variant (244)..(250): Xaa in position 244 to 250 is any amino acid
  Variant (252)..(264): Xaa in position 252 to 264 is any amino acid
  Variant (265)..(276): Xaa in position 265 to 276 is any or no amino acid
  Variant (278)..(291): Xaa in position 278 to 291 is any amino acid
  Variant (292)..(293): Xaa in position 292 to 293 is any or no amino acid
  Variant (295)..(296): Xaa in position 295 to 296 is any amino acid
  Variant (298)..(301): Xaa in position 298 to 301 is any amino acid
  Variant (303)..(303): Xaa in position 303 is any amino acid
  Variant (305)..(314): Xaa in position 305 to 314 is any amino acid
  Variant (316)..(320): Xaa in position 316 to 320 is any amino acid
  Variant (321)..(324): Xaa in position 321 to 324 is any or no amino acid
  Variant (326)..(326): Xaa in position 326 is any amino acid
  Variant (330)..(330): Xaa in position 330 is any amino acid
  Variant (333)..(333): Xaa in position 333 is any amino acid
FPGQGXQXXGMXXXXXXXXXXXXXXXXXXAXXXLGXXXXXXXXXXXXXXXXXXXLXXTXXXQPXXXXXXXXXXXXXXXXXXXXXXXXXXXXXXXXXGHSLGEYXALXXAGXXXXXXXXXLVXXRXXXMXXAXXXXXXXXXXXXXXMXAXXGXXXXXXXXXXXXXXXXXXXXXXXXXXXXXXXXXXXXXXXXNXNXXXQXVXXGXXXXXXXXXXXXXXXXXXXXXXXXXLXVXXXXHXXXMXXAXXXXXXXLXXXXXXXXXXXXXXXXXXXXXXXXXNXXXXXXXXXXXXXXXXLXXQXXXXVXWXXXXXXXXXXGXXXXXXXXXEXGPGXVLXG

SEQ ID NO: 59368 - protein, 32 aa, Artificial sequence
  protein pattern
  Variant (2)..(2): Xaa in position 2 is any amino acid
  Variant (7)..(7): Xaa in position 7 is Phe or Tyr
  Variant (8)..(8): Xaa in position 8 is any amino acid
  Variant (11)..(12): Xaa in position 11 to 12 is any amino acid
  Variant (13)..(13): Xaa in position 13 is Ala, Gly or Ser
  Variant (14)..(14): Xaa in position 14 is Ala, Asp, Glu or Gly
  Variant (15)..(15): Xaa in position 15 is any amino acid
  Variant (16)..(16): Xaa in position 16 is Phe, Ile, Leu or Val
  Variant (17)..(20): Xaa in position 17 to 20 is any amino acid
  Variant (21)..(21): Xaa in position 21 is Ala, Gly, Ser, Thr or Val
  Variant (22)..(22): Xaa in position 22 is Ala, Ile, Leu or Val
  Variant (23)..(24): Xaa in position 23 to 24 is any amino acid
  Variant (25)..(25): Xaa in position 25 is Ile, Leu or Val
  Variant (26)..(27): Xaa in position 26 to 27 is any amino acid
  Variant (29)..(29): Xaa in position 29 is Ala, Gly or Ser
  Variant (30)..(31): Xaa in position 30 to 31 is any amino acid
  Variant (32)..(32): Xaa in position 32 is Leu, Met or Val
GXSLGEXXALXXXXXXXXXXXXXXXXXRXXXX

SEQ ID NO: 59369 - protein, 11 aa, Artificial sequence
  protein pattern
  Variant (6)..(6): Xaa in position 6 is Ala or Ser
  Variant (8)..(8): Xaa in position 8 is any amino acid
  Variant (9)..(9): Xaa in position 9 is Ile, Leu, Pro or Val
FPGQGXQXXGM

SEQ ID NO: 59370 - DNA, 750 bp, Synechocystis sp.
  CDS (1)..(750): transl_table=11
atgaaaccagttgttcttatcaccggtattgctggggggatcggtcaggcgacagccgaactttttgcccaacaaggttggctcgtgacgggaattgatcgtcaagctgacccaaaatgcccttatattgaccactatcaacaagctgattgcggcgatcctaaagcccttgcggctgcctttgacaatttggtcggggaaacccaaaatctccatagtttgattaataatgtcgccctgcaaatttgtcagccaattctcgaaacctccctagacgattgggatcaagtaatggcggttaatctccgggccgcgtttcttttggcaaaaatgtctcacccatatctccaacaaacccacgggagtatcgttaacattagttcagttcatgcgctggcgacctccgccaatattgcttcctatgccgcctctaaaggtgggttaattgccttgacccgagccatggcgatcgaatgggccgctgatcagattcgagttaatgccctattaccgggggccgtaaatacccccatgctgagggagggtttgagtcgtggtcatttggtggaacaatccccccagcatcaactccaagaattagggtctaaaactgtgatgggtcgtgtcgggcaaccgtctgaaatcgctcaggcgatcgcctttttagcggacaatgagcaatctagcttcatgactgggcaaactataactattgacggcggggcgatcgcacgcctcagcaccgagtaa

SEQ ID NO: 59371 - protein, 249 aa, Synechocystis sp.
MKPVVLITGIAGGIGQATAELFAQQGWLVTGIDRQADPKCPYIDHYQQADCGDPKALAAAFDNLVGETQNLHSLINNVALQICQPILETSLDDWDQVMAVNLRAAFLLAKMSHPYLQQTHGSIVNISSVHALATSANIASYAASKGGLIALTRAMAIEWAADQIRVNALLPGAVNTPMLREGLSRGHLVEQSPQHQLQELGSKTVMGRVGQPSEIAQAIAFLADNEQSSFMTGQTITIDGGAIARLSTE

SEQ ID NO: 59372 - DNA, 1120 bp, Zea mays subsp. mays
  CDS (173)..(1003)
acgttaagacaaggcgaaggtaccaggcatctctgttcatcctgtgatggagaatccactccacagtgtttgccgttcacgaacttgctagtctagtacagtagtatatatattccgcgactgcgactacaatgggcgacagatcgtgcgcgatcgagagcgagctacctccatggcggcggcggcggtggcgggcagccggagcagggaggaacggtggagcctcgctggtaagacggcgctcgtcaccggaggaagcaaggggatcgggcgcgcgatcgtggaggagctcgcggggttcggggtgcgcgtgcacacgtgcgcccgcaccgcggccgacctggacgagcgcctgcgcgcgtgggccgcggacgcccgcctgccgggccgcgtcacggcgtccgtgtgcgacgtgtcggcgcggggcgaccgggaggcgctggtggcggcggcgcgggcggagctggggcccaggctggacatcctcgtcaacaacgccgggcagagcatgttccgcgcggccacggagacggcggccggcgactacgcgcgcctcatggccaccaacctcgagtcctgcttccacctcgcgcagctggcgcacccgctgctcctcgccgcgggcgccggcgccgcggtggtgaacgtgtcctccatcgcggggctggtcgcgtacccggcgctggcggcgtactcggcgaccaagggcgggctgaaccagctcacgcgcagcctggccgccgagtgggccggcgacggcgtgcgcgtcaactgcgtcgcgccgggcggcgtccagacggacatgttcagcagcgtcgcgctggagatggacccggagacgtcgctgaggatgatggaggcggagctggcgcgggtgccgttgcgccgattcggcgataccgaggagatcgcgtcccttgtcgccttcctctgcatgcccgcctcgtcctacatcaccgggcaggtcatctgcgccgacggtggccgcaccattgctgcctaggccttcgcgctatgtgcatgctaccctgagtacctgtacggctgtactgtacttacgtgccgacggctccacacgcacggctaataatgaatccgatccgctcgccgaattccattc

SEQ ID NO: 59373 - protein, 276 aa, Zea mays subsp. mays
MAAAAVAGSRSREERWSLAGKTALVTGGSKGIGRAIVEELAGFGVRVHTCARTAADLDERLRAWAADARLPGRVTASVCDVSARGDREALVAAARAELGPRLDILVNNAGQSMFRAATETAAGDYARLMATNLESCFHLAQLAHPLLLAAGAGAAVVNVSSIAGLVAYPALAAYSATKGGLNQLTRSLAAEWAGDGVRVNCVAPGGVQTDMFSSVALEMDPETSLRMMEAELARVPLRRFGDTEEIASLVAFLCMPASSYITGQVICADGGRTIAA

SEQ ID NO: 59374 - DNA, 777 bp, Arabidopsis thaliana
  CDS (1)..(777)
atgacccaatcccgttggcgtttggatggccgtacggctttgatcacgggggctagtacaggtatcggtctggctgttgctcgtgagttgttgggcctgggtgccgatgtgctgttggtagcgcgtaatgctgatttgctggggcgagtacgcgatgaactggcagaggaattccctgagcgtgagttacatggattggctgctgatgttgctgacgatgtggaccgccgtgcgattctggattgggtcgaagattgcagtaatggtttgcatgtgttgatcaacaatgctggtggtaatgtgacgcgtgcagcgcttgaatatacagaagacgagtggcgtgagattttcgagatcaatctgttctctgcgttcgagttgtgtcgttacacgcagccgttgctggcgtgtcatgcaagtacggcgattgtcaatattggcagtgtatctggcttgacgcatgtgcgcagtggagtgccgtatgggatgagcaaggcggcgttgcaccaaatgacccgcaatttggctgtggaatgggctgaggatgggatccgtgtcaatgcggtagcgccttggtatatccgtacgcgtcgtacgtcggagccgctctctgatgtgtactattacgagcaagtcattgaacgtacgccgatgcgccgcattggagagccggaggaagtagctgcggcagtggcatttctttgtttgccagcgtccagttatgtgaccggcgaatgtattgcggtggatggcggttttatgcgctatggtttctga

SEQ ID NO: 59375 - protein, 258 aa, Arabidopsis thaliana
MTQSRWRLDGRTALITGASTGIGLAVARELLGLGADVLLVARNADLLGRVRDELAEEFPERELHGLAADVADDVDRRAILDWVEDCSNGLHVLINNAGGNVTRAALEYTEDEWREIFEINLFSAFELCRYTQPLLACHASTAIVNIGSVSGLTHVRSGVPYGMSKAALHQMTRNLAVEWAEDGIRVNAVAPWYIRTRRTSEPLSDVYYYEQVIERTPMRRIGEPEEVAAAVAFLCLPASSYVTGECIAVDGGFMRYGF

SEQ ID NO: 59376 - DNA, 765 bp, Bombyx mori
  CDS (1)..(765)
atgaattttgccggcaaagtcgttatcgtaaccggtgccagctccggaattggagcggccaccgccgtattcttatcaaaattaggcgctcaactatctttgacgggaagaaacgtggagaacttgcaaaaagtgagtaaggactgcgacaaatttgcgtcaacactgtcaataaccgcagatttgaccaaagaaagtgatattgagaaaatcattaagaaaaccattgaccattacggaaagtgggacgttttagtgaataatgccggtattattgaaactggaaccatcgagaacacctccttggcccagtatgatcgtcttatgaacaccaatgtgcgttcaatttactatctgacgatgctggcggtccctcatctcctcgaaagcaaagggaatgttgtaaacgtatcgagtgttaatgggattcgctctttccctggagttctggcatacaacatctccaaagcatctgttgaccaattcactcgctgtgtggctttagaattagcaccgaaaggagtccgggttaactgtgtcaatcctggagtaattctaacagagctacaaagaaggggagggttgagtgaggagcaatatgcagcattcttagagaggactaaagaaactcatgcattgggacgtccaggtaaaccagatgaggtggcagcaacaattgcattccttgccagcgacttggcaagtaatatcactggtgccagtgtgccagtcgacggtggacgtcatgctatgtgtccgcgctaa

SEQ ID NO: 59377 - protein, 254 aa, Bombyx mori
MNFAGKVVIVTGASSGIGAATAVFLSKLGAQLSLTGRNVENLQKVSKDCDKFASTLSITADLTKESDIEKIIKKTIDHYGKWDVLVNNAGIIETGTIENTSLAQYDRLMNTNVRSIYYLTMLAVPHLLESKGNVVNVSSVNGIRSFPGVLAYNISKASVDQFTRCVALELAPKGVRVNCVNPGVILTELQRRGGLSEEQYAAFLERTKETHALGRPGKPDEVAATIAFLASDLASNITGASVPVDGGRHAMCPR

SEQ ID NO: 59378 - DNA, 780 bp, Bombyx mori
  CDS (1)..(780)
atgttcgctaataaagttgtaatcatcacgggagcaagttcaggaataggcgctgaaactgcatatgaattcgccaaattgaatgcgaaattggttttaactgggagaaaaaaggaaaatcttgataatgttgcatccgattgtgaaagtcaatctcccagtaaaataaaaccgttggtagtcgtggctgatatgaataatgagagcgatgtcgagaatataataaaaaaaactgttgataactatcaccaattggatgtgcttgtaaataatgctggtgttttggaatctggtaccatagaaacaacatctttggctcaatacgatagaataatgaacactaatgttcgcggaccttattatttgacgatgttggcaattccgcatttgattaaaactaaaggaaacatcgtcaacgtttccagtgttactggtttgagatctttccctaatgtcctagcgtattgcatttctaaatcggcaatagatcagtttacaagatgtgtggctttagaagtagcattgaaaggagttcgcgtgaatgccgtcaaccctggggtgattgcgactggtttacataaaaaaggcgaaggaagtatgaacgaagaacaatatcaagcttttttggcaaaatgcgcagaaacccacgctctcggcagacctggggatgccaaagaagtatcttcagtcatcgttttcttagctagtgatgctgcaagcaacattactggtgccactttgcctgtagatggaggtcgtcatgccatgtgtcctagataa

SEQ ID NO: 59379 - protein, 259 aa, Bombyx mori
MFANKVVIITGASSGIGAETAYEFAKLNAKLVLTGRKKENLDNVASDCESQSPSKIKPLVVVADMNNESDVENIIKKTVDNYHQLDVLVNNAGVLESGTIETTSLAQYDRIMNTNVRGPYYLTMLAIPHLIKTKGNIVNVSSVTGLRSFPNVLAYCISKSAIDQFTRCVALEVALKGVRVNAVNPGVIATGLHKKGEGSMNEEQYQAFLAKCAETHALGRPGDAKEVSSVIVFLASDAASNITGATLPVDGGRHAMCPR

SEQ ID NO: 59380 - DNA, 846 bp, Oryza sativa (japonica cultivar-group)
  CDS (1)..(846)
atggcagcgtcgacgccggcggcgagcagagagcggcggtggagcctcgccggcaagacggcgctcgtcaccggcggcaccaaaggcatcgggcgcgcgatcgtggaggagctcgccgggttcggggtgagggtgcacacgtgttcacgccacgacgccgacctgcaggactgcctccgccggtggaacgccgccgacggtggcggcctcggcggcggcgcggcggcgcccgtcacggcgtccgtctgcgacgtgtcggtgcgcggcgacagggaggcgctggtggcggcggcgcgcgccgcgctcggcgggaggctggacatactcgtcaacaacgtcggccagacgctgttcggcgcggccgcggcgtgcgcggcggaggactacgcgcgcatcatggcgaccaacctcgagtcctgcttccacctcgcccagctcgcgcaccctctcctcctcggcgccggcggcgccgccgcgagcgtggtgaacatctcctccgtcgcagggttcatcgcctacccggcgctgtccgtctactcggcgacgaagggcgccatgaaccagctcacgcggagcctcgccgccgagtgggcgcgcgacggcatccgcgtcaactgcgtcgcgccgggcggcgtccggaccgatatcgccggcagcagcggcgtggcgctggagccgggggcggcgcgggcgatggaggagagggaggcggcgcgggtcgtcatgggccgcatcggcgagcccgaggaggtggcgtcgctcgtcgcgttcctctgcatgccggcggcgccgtacatcaccgggcaggtcatctgcgtcgacggtggccgcaccatcaccgcctag

SEQ ID NO: 59381 - protein, 281 aa, Oryza sativa (japonica cultivar-group)
MAASTPAASRERRWSLAGKTALVTGGTKGIGRAIVEELAGFGVRVHTCSRHDADLQDCLRRWNAADGGGLGGGAAAPVTASVCDVSVRGDREALVAAARAALGGRLDILVNNVGQTLFGAAAACAAEDYARIMATNLESCFHLAQLAHPLLLGAGGAAASVVNISSVAGFIAYPALSVYSATKGAMNQLTRSLAAEWARDGIRVNCVAPGGVRTDIAGSSGVALEPGAARAMEEREAARVVMGRIGEPEEVASLVAFLCMPAAPYITGQVICVDGGRTITA

SEQ ID NO: 59382 - DNA, 813 bp, Oryza sativa (japonica cultivar-group)
  CDS (1)..(813)
atggccgcggcggagacctcgggcacggtggcggcgccggggaggtggtctctccatggcaagatggctctggtcaccggaggcacccgcgggattgggcgtgcggtggtggaggagctggcggcgctgggggcggccgtgcatacctgctcccgcaatgaggcggagctaggggagcgcctcaaggagtgggaggccagggggttccgcgtcaccatctccgtctgcgacctctccgcgcgggaccagcgggagcgcctcatcggcgacgtcgctgaccgcttcggcggcaagctcgacatcctcgtaaacaatgtggggacaaacataaggaaacctactactgagtattctgcagacgaatactcatttttgatggctacaaatcttgaatctgcatatcatttgtgtcaacttgggcatcctcttttaaaagcatctgggtcgggtagcattgttttcatatcatcagttgctggaattgtagccctatttagtggaactatctatgctatgactaaaggtgccatgaatcaattaaccaagaacttagcatgtgaatgggcaaaagacaacataagaaccaactgtgttgccccagggtacatcttaacttcgctttcagaaggaattttggcaaacaaggagttcgagggctctgttaagagccggactcctcttaggcgtgtcggagaaccagcagaaatctcatcgttagttgccttcctttgtatgcctggttcaacttacattactggtcagacgatcgccgtcgatggaggtatgactgtgaatgggctttaccccagttga

SEQ ID NO: 59383 - protein, 270 aa, Oryza sativa (japonica cultivar-group)
MAAAETSGTVAAPGRWSLHGKMALVTGGTRGIGRAVVEELAALGAAVHTCSRNEAELGERLKEWEARGFRVTISVCDLSARDQRERLIGDVADRFGGKLDILVNNVGTNIRKPTTEYSADEYSFLMATNLESAYHLCQLGHPLLKASGSGSIVFISSVAGIVALFSGTIYAMTKGAMNQLTKNLACEWAKDNIRTNCVAPGYILTSLSEGILANKEFEGSVKSRTPLRRVGEPAEISSLVAFLCMPGSTYITGQTIAVDGGMTVNGLYPS

SEQ ID NO: 59384 - DNA, 1098 bp, Oryza sativa (japonica cultivar-group)
  CDS (1)..(1098)
atgcgcgcgctttccctcgccagagcaagtagcccgccgcctcttcttcttcacctccgacgagcccttgcacccgcgtcgtcgtcttctccggcgccggtgctgttgctgcgtcctgcggtttcttgttcttctttgtttgttagcgacagggcggcggcggctcgccggagcagcggcagcagcaggagaagcatggcgtcgcagcagttcccgccgcagaatcaggagacgcagccggggaaggagcacgccatggatccccgccccgaggccatcatccagagctacaagccagccaacaagctgaaggacaaggtggcgatcgtgaccggcggcgactccggcatcgggcgggcggtgtgcctgtgcttcgcgctggagggcgcgacggtggcgttcacgtacgtgaaggggcaggaggagaaggacgcggaggagacgctccgcgcgctgcgcgacatcagggcgcgcaccggcgccaaggaccccatggcgatccccgccgacctcgggtacgacgacaactgccgcaaggtggtcgacgaggtcgccggcgcgtacggcggcgccatcgacatcctcgtcaacaacgccgccgagcagtacgagcgcccctccatcaccgacatcaccgaggacgacctggaacgcgtgttccgcaccaacatcttctcctacttcttcatgtcgaagcacgccgtgaagcggatgcgcgatcgccgcggcggcgccggcgccggcgggtgcagcatcatcaacacgtcgtcgatcaacgcgtacaaggggaacaagacgctgctggactacacggcgaccaagggcgccatcgtggcgttcacgagggcgctggcgctgcagctggcggaggaggggatccgggtgaacggcgtcgcgccggggccgatctggacgccgctgatcccggcgtcgttcgcggaggagaaggtgaggcagttcggctcccaggtgcccatgggccgcgccggccagccgtcggaggtggcgcccagcttcgtcttcctcgccagcgacgacgcctcctacatgtccggccagatgctgcacgtcaacggcggcgtcatcgtcaacggctag

SEQ ID NO: 59385 - protein, 365 aa, Oryza sativa (japonica cultivar-group)
MRALSLARASSPPPLLLHLRRALAPASSSSPAPVLLLRPAVSCSSLFVSDRAAAARRSSGSSRRSMASQQFPPQNQETQPGKEHAMDPRPEAIIQSYKPANKLKDKVAIVTGGDSGIGRAVCLCFALEGATVAFTYVKGQEEKDAEETLRALRDIRARTGAKDPMAIPADLGYDDNCRKVVDEVAGAYGGAIDILVNNAAEQYERPSITDITEDDLERVFRTNIFSYFFMSKHAVKRMRDRRGGAGAGGCSIINTSSINAYKGNKTLLDYTATKGAIVAFTRALALQLAEEGIRVNGVAPGPIWTPLIPASFAEEKVRQFGSQVPMGRAGQPSEVAPSFVFLASDDASYMSGQMLHVNGGVIVNG

SEQ ID NO: 59386 - DNA, 876 bp, Oryza sativa (japonica cultivar-group)
  CDS (1)..(876)
atggagaagaagaagcagaagagacagatcaaagatcaagatgttcagagcattgcagatcgtcctcaggggttggctgggaaggtggcggtgatcaccggcgcggcgagcggcatcggcaaggcgaccgcggcggagttcgtcaggaatggcgccaaggtcatcctcgccgacgtccaggacgacgtcggccgcgccgtcgcctcggagctcggcgcggacgcggcgtcgtacacccgctgcgacgtcaccgacgaggcgcaggtcgcggcggccgtggacctcgccgtggcgcggcacgggcagctcgacgtcatggtcaacaacgccggcatcgtgggctccctgtcgcgccccccgctcggcgccctcgacctcgccgacttcgacgccgtcatggcggtgaacacgcgcggcgtcctcgcgggcgtcaagcacgccgcgcgcgtcatggcgccgcgccgccgcggcagcatcatctgcgtggcgagcgtcgccggggtgctcggcagcgtgacgccgcacccgtacagcgtgtccaaggccgccgtgctcggcgcggtccgcgccgccgccggcgagatggcgcgctccggcgtgcgcgtgaacgccatctcccccaactacatccccacgccgctggtgatgcgcatcatggcggagtggtaccccggggcgagcgccgacgagcaccgccgcgtcgtggagcgggagatcaacgagatggagggcgcgacgctggagcccgaggacatcgcgagggcggcggtgtacctggcctccgacgaggccaagtacgtgaacggccacaacctcgtcgtcgacggcgggtacaccgtcggcaaggcgcccaacctgccggcgccgccgcaataa

SEQ ID NO: 59387 - protein, 291 aa, Oryza sativa (japonica cultivar-group)
MEKKKQKRQIKDQDVQSIADRPQGLAGKVAVITGAASGIGKATAAEFVRNGAKVILADVQDDVGRAVASELGADAASYTRCDVTDEAQVAAAVDLAVARHGQLDVMVNNAGIVGSLSRPPLGALDLADFDAVMAVNTRGVLAGVKHAARVMAPRRRGSIICVASVAGVLGSVTPHPYSVSKAAVLGAVRAAAGEMARSGVRVNAISPNYIPTPLVMRIMAEWYPGASADEHRRVVEREINEMEGATLEPEDIARAAVYLASDEAKYVNGHNLVVDGGYTVGKAPNLPAPPQ

SEQ ID NO: 59388 - DNA, 909 bp, Oryza sativa (japonica cultivar-group)
  CDS (1)..(909)
atgttcacagcgatgcatcgcatcctcagcagggggaggaggacacctgcagcttcgtcttcctccgtcactgccttcgccaccgcctccgattcacagaggttggccgggaaggtcgccgtcatcaccggcggcgccagcggcatcggcagggcgacggcggaggagttcgtcaggaatggcgccaaggtcatcctcgccgatgtgcaggacgacctgggacacgccgtcgccgcggagctcggcgcggacgcggcgtcgtacgcgcgctgcgacgtcaccgacgaggcgcaggtcgcggccgccgtggacctcgccgtggcacggcacgggcgtctcgacgtcgtcttcaacaacgccggcatccccggtgacctcacgccgacccccgtgggcgcgctggacctcgctgacttcgaccgcgtgatggcggtgaacaccagggcggtggtggcgggcgtcaagcacgccgcgcgcgtcatggtgccgcgccgccgcggcagcatcatctgcacggcgagcacggcgggggtgatcggtggcgtggcggtcccgcactacagcgtgtccaaggccgcggtgctcgggctggtgcgcgccgtggcgggcgagatggcgcgctccggcgtgcgcgtgaacgccatctcccccaactacatctggacgcccatggcggcggtcgccttcgcaaggtggtaccccagccggagcgccgacgaccaccgccggatcgtggagaatgacataaacgagatggatggcgtgacactggaggccgaggacgtggcaagggcggcggtgttcctcgcctccgacgaggctaagtacgtgaacgggcacaacctcgttgtcgacggcgggtacaccgtcggcaaggtgcccaacatgccggtcccagatggccattga

SEQ ID NO: 59389 - protein, 302 aa, Oryza sativa (japonica cultivar-group)
MFTAMHRILSRGRRTPAASSSSVTAFATASDSQRLAGKVAVITGGASGIGRATAEEFVRNGAKVILADVQDDLGHAVAAELGADAASYARCDVTDEAQVAAAVDLAVARHGRLDVVFNNAGIPGDLTPTPVGALDLADFDRVMAVNTRAVVAGVKHAARVMVPRRRGSIICTASTAGVIGGVAVPHYSVSKAAVLGLVRAVAGEMARSGVRVNAISPNYIWTPMAAVAFARWYPSRSADDHRRIVENDINEMDGVTLEAEDVARAAVFLASDEAKYVNGHNLVVDGGYTVGKVPNMPVPDGH

SEQ ID NO: 59390 - DNA, 903 bp, Oryza sativa (japonica cultivar-group)
  CDS (1)..(903)
atgttcagagctgcgcagctcctcctcagggagacgaacagagctcttggggcagcaacttcgcctgcaggcttcgtcagtggcttctccacggcttccaactctgcgcagaggttggctggcaaggtggctgtcataaccggtggagctagcggcatcggcaaagcgacagccaaggagttcatcgagaatggcgccaaggtcatcatggccgatgtccaggatgacctcggccactccaccgcagcggagctcggcccggacgcctcgtacacgcgctgcgacgtcaccgacgaggcacaggtcgcggcggccgtcgacctcgccgtgaagcggcacggccacctcgacatcctctacaacaacgccggtgtcatgggcgccatgccgcaggacgacatggcgtccgtcgacctcgccaacttcgaccgcatgatggcgatcaacgcccgggcggcgcttgtcggcatcaagcacgccgcgcgcgtcatgtcgccccgccgcagcggcgtcatcctctgcacggccagcgacacgggcgtcatgcccatgcccaacatcgccttgtacgccgtctccaaggcaaccaccatcgccatcgtgcgcgccgcggcggagccgctgtcgcgccacggcctgcgggtgaacgccatctcgccgcacggcaccaggacgccgatggcgatgcacgtgttatctcagatgtaccccggcgtaagcaaagatgatttggagaagatggcggacgccgccatggacgccggagaggtgatggaacctaagtacgtcgctagggcggcgctgtatttggcttcggacgaggctaagtatgtcaacgggcacaacctcgtcgttgacggcggcttcacgtcgcacaaaggatccgacacacgtttgaattag

SEQ ID NO: 59391 - protein, 300 aa, Oryza sativa (japonica cultivar-group)
MFRAAQLLLRETNRALGAATSPAGFVSGFSTASNSAQRLAGKVAVITGGASGIGKATAKEFIENGAKVIMADVQDDLGHSTAAELGPDASYTRCDVTDEAQVAAAVDLAVKRHGHLDILYNNAGVMGAMPQDDMASVDLANFDRMMAINARAALVGIKHAARVMSPRRSGVILCTASDTGVMPMPNIALYAVSKATTIAIVRAAAEPLSRHGLRVNAISPHGTRTPMAMHVLSQMYPGVSKDDLEKMADAAMDAGEVMEPKYVARAALYLASDEAKYVNGHNLVVDGGFTSHKGSDTRLN

SEQ ID NO: 59392 - DNA, 906 bp, Oryza sativa (japonica cultivar-group)
  CDS (1)..(906)
atgtgggagacgaagagagtggttggcccaaggatgacgacgatgacgtcgacttcgcctgaaagtctaatcgccggtggattctccacggcggcgagctcccaccagaggttggccggcaaggtggccgtcatcaccggcgccgccagcggcatcggcaaggcgaccgccgcggagttcatcaggaacggcgccaaggtgatcatcaccgacgtcaacgacgacctcggccacgccgcggcggcggagctcggcccggacgccacgtacgcgcgctgcgacgtcgccgacgaggcgcaggtcgccgccgccgtcgacctcgccgtggcgcgccacggccgcctcgacgtcatgcacaacaacgccgccatcccggggaggttcccgcaggacgacatggcgtccgtcgacctcgccgacttcgacgccatgatggcggtgaacgcccgcgcgtcgctcgccggcatcaagcacgccgcgcgcgtcatggcgccccgccgcgccggcgtcatcctctgcacggccagcgccgtcggcgtcctcccgctcccggcggtcgccacgcactccatcaccaaggccaccatcatcgccatcgtgcgcgcagcggcggagcccctggcgcgccacggcctgcgggtgaacgccatctcgccgggcgccgtcaggacgccggtcctgcagggcaaggtgtcggtgatgtcggcgtcgtctcctaccatgagcgacgagctgaagcagatgatcgacgtcgacgcgaacgacatgatgatggggccggaggaggtggccatggcggcggtgtacctcgcctccgacgaggccaggtacgtgaccggccacaacctcgtcgtcgacggcgggtacaccgtgcacaaaggagctgacacaccggcggcgcgttga

SEQ ID NO: 59393 - protein, 301 aa, Oryza sativa (japonica cultivar-group)
MWETKRVVGPRMTTMTSTSPESLIAGGFSTAASSHQRLAGKVAVITGAASGIGKATAAEFIRNGAKVIITDVNDDLGHAAAAELGPDATYARCDVADEAQVAAAVDLAVARHGRLDVMHNNAAIPGRFPQDDMASVDLADFDAMMAVNARASLAGIKHAARVMAPRRAGVILCTASAVGVLPLPAVATHSITKATIIAIVRAAAEPLARHGLRVNAISPGAVRTPVLQGKVSVMSASSPTMSDELKQMIDVDANDMMMGPEEVAMAAVYLASDEARYVTGHNLVVDGGYTVHKGADTPAAR

SEQ ID NO: 59394 - DNA, 1026 bp, Oryza sativa (japonica cultivar-group)
  CDS (1)..(1026)
atggccaacgtcgttttctttctcccggcgccatctccgcaaccatgccgagctaccgtgcttctgggcctgattgaacgaggactggagaccggaaaatgggcgctgtcgtcagatgctggaagaaacggcgattctgcgttctacttcgctatgacgggcaagagcagagcagggttgacgatgttgactggattcgtcaaccgcttctcttccgtgtcaagacccgaaaggttggctggaaaggtggccgtgatcaccggcggcgcaagcggcatcggcgaggcgacggccaaggagttcatccgcaatggcgccaaagtcatcatcgccgacgtacaagacgatctcggccacgccgtcgccgccgagctcggcccagatgcggcctacacccgctgcgatgtcaccgacgaggcgcagatcgcggcggccgtggacctcgccgtggcgtgccacggccgcctcgacgtcctgcacaacaacgccggggtcacgtgctcctacgtggggcccctcgcctccctagacctcgccgacttcgaccgcgtcatggcggtgaacgcccgggcggtgctcgccggcatcaagcacgcggcgcgcgtgatggcgccacggcgcgccggctccatcctctgcacggccagcgtggcgggcgtgatcggcagcgatgtcccccacgcgtacagcgtctccaaggcggcagccatcggcgtggtgaggtccgccgccggcgagctggcgcgccacggcgtgcggctgaacgccatctcgccgcacggcatcgcgacgccgctggcgatgcgcgggttcggcgacgtgctggcgtgggcggacgccgagagattgaagcgggtcatcgaggaggacatgaacgagctggagggcgcaaagctggaggcggaggacatcgcgagggcggcggtgtacctcgcctccgacgaggccaagtacatcactgggcataacctcgtcgtcgatggcgggttcaccgtcggcaagcgcctcaacttcgcgcatgcttga

SEQ ID NO: 59395 - protein, 341 aa, Oryza sativa (japonica cultivar-group)
MANVVFFLPAPSPQPCRATVLLGLIERGLETGKWALSSDAGRNGDSAFYFAMTGKSRAGLTMLTGFVNRFSSVSRPERLAGKVAVITGGASGIGEATAKEFIRNGAKVIIADVQDDLGHAVAAELGPDAAYTRCDVTDEAQIAAAVDLAVACHGRLDVLHNNAGVTCSYVGPLASLDLADFDRVMAVNARAVLAGIKHAARVMAPRRAGSILCTASVAGVIGSDVPHAYSVSKAAAIGVVRSAAGELARHGVRLNAISPHGIATPLAMRGFGDVLAWADAERLKRVIEEDMNELEGAKLEAEDIARAAVYLASDEAKYITGHNLVVDGGFTVGKRLNFAHA

SEQ ID NO: 59396 - DNA, 825 bp, Oryza sativa (japonica cultivar-group)
  CDS (1)..(825)
atgagattgagatgtatgcacaggttggctggtaaggtggctgtcatcaccggcgcggcgagcggcatcggcaaggcgacggcagcggagttcatcaagaatggcgccaaggtcatcctcgccgacatccaggacgacctcgcccgctcggtggcctccgagctcggcccggacgccgcgtacacgcgctgcgacgtcgccgacgaggcgcaggtcgccgcggccgtggacctcgccgtgaggctgcacggccgcctcgacgtgttccacagcaacgccggcatcccggggaggataccgcaggacgacgcgctgtccgtcgacctcgccggcttcgaccgcgtgatggcggtgaacgcccgcccggcgctcgcggccatcaagcacgccgcgcgcgtaatggcgcctcgccgcaccggctgcgtcatctgcacggcgagcggcgcgggcgtcgtccccatgccggcgctcgccatgtactccgtctccaaggccaccgtcatcgctgtggtgcgcgccatggcggagccgctggcgcgccacggcctgcgggtgaacgccatctcgccgggggcgacgaggacgccgatgatgctgaacgagatcccgcgcctcgccgtggtgtccccgggcctgagcggggagctgaggaggatggtggaggagggcgccagcgacgccgtcaaggtgctcgagccggaggatatcgcgagggcggcggtgtacctggcctccgacgaggccaggtacgtgaacgggcacaacatcgtcgtcgacgccggctactcggtgcacaaaggagcggagaactcgccggcgcgttga

SEQ ID NO: 59397 - protein, 274 aa, Oryza sativa (japonica cultivar-group)
MRLRCMHRLAGKVAVITGAASGIGKATAAEFIKNGAKVILADIQDDLARSVASELGPDAAYTRCDVADEAQVAAAVDLAVRLHGRLDVFHSNAGIPGRIPQDDALSVDLAGFDRVMAVNARPALAAIKHAARVMAPRRTGCVICTASGAGVVPMPALAMYSVSKATVIAVVRAMAEPLARHGLRVNAISPGATRTPMMLNEIPRLAVVSPGLSGELRRMVEEGASDAVKVLEPEDIARAAVYLASDEARYVNGHNIVVDAGYSVHKGAENSPAR

SEQ ID NO: 59398 - DNA, 795 bp, Oryza sativa (japonica cultivar-group)
  CDS (1)..(795)
atggccatggcgactaccagctctaaaaacgagaggtggagcctcgccggcgccaccgcgctcgtcaccggcggcagcaaaggcatcggccgcgccatcgtcgaggagctcgccagcttgggcgcgacggtgcacacctgcgcccggaccgaggcgccgctgaacagatgccgggaggagttgacggccaagggccttgccgtcaccgtctccgtctgtgacgtctcgttgcgtgccgacagggaggcgctcgccggcacggtgcgcgagctcttcggcggcaagctcagcatcctggtgaactgcgccgggatgtcgttcctgaagccggcggtggagctgacgccggacgattgctcgcaggtgatggggatgaacttcgagtcgtgcttccacttgagccagctggcgtaccctctcctcaaggcctctcagagaggttgtatcatcaacatctcgtccattgcttcggtggtcgcgttctgctctcttcccaacgccgtctactcagctgctaaaggagcaatgaaccaagtcacaaggaacctggctgctgagtgggcgaacgatgggatcagagttaactgtgttgcgccaggcttcattcgtactccgctcctatctgaattcgtggagggtaacgagttggggcgagcagagttcagccgtgttcccatgggccgtctcggtgaaccagaggacatcgcatcgctggtggcgtttctgtcaatgccagcgtcctcctatataaccggtcaggtcatatgcgccgacggcggtcgctgcctttcttga

SEQ ID NO: 59399 - protein, 264 aa, Oryza sativa (japonica cultivar-group)
MAMATTSSKNERWSLAGATALVTGGSKGIGRAIVEELASLGATVHTCARTEAPLNRCREELTAKGLAVTVSVCDVSLRADREALAGTVRELFGGKLSILVNCAGMSFLKPAVELTPDDCSQVMGMNFESCFHLSQLAYPLLKASQRGCIINISSIASVVAFCSLPNAVYSAAKGAMNQVTRNLAAEWANDGIRVNCVAPGFIRTPLLSEFVEGNELGRAEFSRVPMGRLGEPEDIASLVAFLSMPASSYITGQVICADGGRCLS

SEQ ID NO: 59400 - DNA, 795 bp, Oryza sativa (japonica cultivar-group)
  CDS (1)..(795)
atggcggccgccgcagctcgcagcatcccggaccggtggaccctcgccggcgcgacggcgctcgtcaccggcggcagcaaaggcatcgggcatgcgatagtggaggagctcgccggattcggggcgcgcgtgcacacgtgcgcccggaacgcggcggagctggaggcgagccggcggcggtgggaggagcgggggctccgcgtcaccgccaccgtctgcgacgtctccgcgcgcggcgaccgggagaggctggtcgccgccgcggcgggggagttcggcggcaggctggacatcctcgtcaacaacgtcggccggaccatgttccgggcggcggcggcgtgctccggcgaggacttcgccctgctcgtggccaccaacctcgagtcctgcttccacctctcccagctcgcgcacccgctcctgctcgccgccggcggcggaggcggctgcgtggtgaacatctcctccgtcgccggcaccgtcggcataccggcgctggccgtgtactccatgaccaagggcggcatgaaccagctcacccggagcctcgccgccgagtgggccggcgacggcatacgtgtcaactgcgtcgcgccgggaggcgtcaagactgacatctgccaagacgagacgatagacccggagctgatcaagagcgagatggaccggctgccgatgcggcggctggcggagccggaggaggtggcggcgacggtggcgttcctctgcatgccggcggcctcctacatcaccggccaggtcgtcggcgtcgacggcggacgcaccattacctag

SEQ ID NO: 59401 - protein, 264 aa, Oryza sativa (japonica cultivar-group)
MAAAAARSIPDRWTLAGATALVTGGSKGIGHAIVEELAGFGARVHTCARNAAELEASRRRWEERGLRVTATVCDVSARGDRERLVAAAAGEFGGRLDILVNNVGRTMFRAAAACSGEDFALLVATNLESCFHLSQLAHPLLLAAGGGGGCVVNISSVAGTVGIPALAVYSMTKGGMNQLTRSLAAEWAGDGIRVNCVAPGGVKTDICQDETIDPELIKSEMDRLPMRRLAEPEEVAATVAFLCMPAASYITGQVVGVDGGRTIT

SEQ ID NO: 59402 - DNA, 807 bp, Oryza sativa (japonica cultivar-group)
  CDS (1)..(807)
atggcggccgccgcagctcgcagcatcccctaccggtggaccctcgccggcgcgacggcgctcgtcaccggcggcagcaaaggcatcgggcatgcgatagtggaggagctcgccggattcggggcgcgcgtgcacacgtgcgcccggaacgcggcggagctggaggcgagccggcggcggtgggaggagcgggggctccgcgtcaccgccaccgtctgcgacgtctccgcgcgcggcgaccgggagaggctggtcgccgcggcggcggcggagttcggcggcaggctggacatcctcgtcaacaacgtcggccggaccatgttccgggcggcggcggcgtgctccggcgaggacttcgccgtgctcgtggccaccaacctcgagtcctgcttccacctctcccagctcgcgcacccgctcctgctcgccgccggcggcgcccgcggcggcggaggcggctgcgtggtgaacatctcctccgtcgccggcagcgtcggcatgccggcgctggccgtgtactccatgaccaagggcggcatgaaccagctcacgcggagcctcgccgccgagtgggccggcgacggcattcgtgtcaactgcgtcgcgccgggaggcgtcaagactgatatctgccaagacgagacgatagacccggagctgatcaagagcgagatggaccggctgccgatgcggcggctggcggagccggaggaggtggcggccacggtggcgttcctctgcatgccggcggcctcctacatcaccggccaggtcgtcggcgtcgacggcggacgcaccatttcctag

SEQ ID NO: 59403 - protein, 268 aa, Oryza sativa (japonica cultivar-group)
MAAAAARSIPYRWTLAGATALVTGGSKGIGHAIVEELAGFGARVHTCARNAAELEASRRRWEERGLRVTATVCDVSARGDRERLVAAAAAEFGGRLDILVNNVGRTMFRAAAACSGEDFAVLVATNLESCFHLSQLAHPLLLAAGGARGGGGGCVVNISSVAGSVGMPALAVYSMTKGGMNQLTRSLAAEWAGDGIRVNCVAPGGVKTDICQDETIDPELIKSEMDRLPMRRLAEPEEVAATVAFLCMPAASYITGQVVGVDGGRTIS

SEQ ID NO: 59404 - DNA, 777 bp, Agrobacterium tumefaciens
  CDS (1)..(777): transl_table=11
gtgaagtatggaagcttgctgaataagttcaggctcgatggaaaagttgctttgatcaccggcggaacgcgcgggatcggtctcgcgaccgcctatgcattcggggaggcaggtgcgaagctctacctgagtgctcgccgtgaagaatatgaggacgccggtgccatactcacagccggctatgatgtgaccttctatccggcggacttgaaaacgcgcgaggcagcgtgcgccctcgtgaagagggtcgccgacgacgcggggcgacttgatattctcatcaacaatgcgggtatcgccaatggtggcgacactccgctctttaccgaacaacaatggcgagacgtcatagcaaccaacgttgagactgttttctggtgctcgcaggccgccatcccggtgatgcgcgagggtggtcgaggcgcgattgtgaatgtcggatcaatgtcgggtattgtatcgaatattccgcagaaccaggtcgcgtataacagttccaaggcagcggtccatatgatgaccaagagccttgctagcgagttggccctcgacaatatcagggtcaacgctgtcgcacccggctacatcgacaccgatatgtcgcgaggcgggatggtacatcctgtcaggggaccaatctggcttgagatgacgcctatgaagcgatttggccgcccggatgaaatcgcaacagcaatacttttcctagcgtcagaagcgtcgagctacgtcacaggagatattcttgtcgttgatggcggctacacgacccgttga

SEQ ID NO: 59405 - protein, 258 aa, Agrobacterium tumefaciens
MKYGSLLNKFRLDGKVALITGGTRGIGLATAYAFGEAGAKLYLSARREEYEDAGAILTAGYDVTFYPADLKTREAACALVKRVADDAGRLDILINNAGIANGGDTPLFTEQQWRDVIATNVETVFWCSQAAIPVMREGGRGAIVNVGSMSGIVSNIPQNQVAYNSSKAAVHMMTKSLASELALDNIRVNAVAPGYIDTDMSRGGMVHPVRGPIWLEMTPMKRFGRPDEIATAILFLASEASSYVTGDILVVDGGYTTR

SEQ ID NO: 59406 - DNA, 807 bp, Arabidopsis thaliana
  CDS (1)..(807)
atggctaaagcaggagaaaactcgagagacaaatctagatggagccttgaaggcatgaccgctcttgttacaggtggctccaaaggcctcggagaagctgtagtggaggaactagccatgttgggagcaagagttcacacatgtgccagagacgaaactcagcttcaagaacgcttacgtgaatggcaagccaaaggatttgaggtcaccacttctgtctgcgacgtctcttctcgtgagcaacgagagaaactcatggaaaccgtttcctctgtcttccaaggaaaactcaacatcctcgtaaataatgcgggaacgggtataataaagccgagtacagagtatacagcagaagattactcgtttctgatggctacaaatctcgagtccgcttttcatctctcacagatcgcgcaccctttgttgaaagcctctggttccgggagcatcgtgttcatgtcctctgttgctggacttgtgcataccggtgcatcaatctatggagcatctaaaggagctatgaatcagctaggaagaagcttagcatgcgagtgggcaagtgacaacataagggttaactctgtgtgtccatgggtcataacaactcctttaactagctttattttcagtgatgaaaagttaagaaaagcagtggaggataagacaccaatgggacgtgttggagaagcaaatgaagtatcatcgcttgtcgcatttctctgttttccggcagcttcttatattacaggtcagactatctgcgtcgacggaggtgcttcggtgaatggcttctctttcaagccttag

SEQ ID NO: 59407 - protein, 268 aa, Arabidopsis thaliana
MAKAGENSRDKSRWSLEGMTALVTGGSKGLGEAVVEELAMLGARVHTCARDETQLQERLREWQAKGFEVTTSVCDVSSREQREKLMETVSSVFQGKLNILVNNAGTGIIKPSTEYTAEDYSFLMATNLESAFHLSQIAHPLLKASGSGSIVFMSSVAGLVHTGASIYGASKGAMNQLGRSLACEWASDNIRVNSVCPWVITTPLTSFIFSDEKLRKAVEDKTPMGRVGEANEVSSLVAFLCFPAASYITGQTICVDGGASVNGFSFKP

SEQ ID NO: 59408 - DNA, 969 bp, Arabidopsis thaliana
  CDS (1)..(969)
atggtgcttgacatggcttctcacttgtacacaaatccacctcaaaaccttcactttatttcttcttcttcttcccttaaacctcatttatgcctctctttcaaacgcataaaccctaaacacaaatcctcttcctcttccgtcttcgtcccttacgcatcacagagttccattgccattacctccaaggaaagatggtctctcaatggaatgtctgctcttgtcaccggcggcactcgtggaattgggcgtgcgattgtggaggaattggctggtcttggagcagaagttcacacttgcgctcggaatgagtacgagctggagaattgtttgagtgattggaaccgttctggttttcgagttgctggatccgtttgcgatgtctctgatcgatctcagagagaggctttgatggagaccgtgtcatctgtgtttgaagggaagcttcatatccttgtaaacaatgttgggacgaacattaggaaaccaatggtagagtttactgctggagaattttcgactctgatgtctacgaatttcgaatcggttttccatttatgtcaacttgcttatccattgcttagagaatctaaagctggaagtgttgtgttcatctcttctgtttctggttttgtttccctcaagaatatgtcggtccaatcttcaaccaaaggagcaattaatcaacttacgagaagtctggcttgcgagtgggccaaagacaatataaggatcaatgctgttgccccgtggtatatcaaaacatctatggtggagcaagtccttagcaacaaagagtacctagaagaagtctactcagtaactcctcttggtcgacttggcgaaccgagagaggtgtcttctgcagtggcttttttatgcctacctgcatcatcatatattacagggcagattctttgtgttgatggtggaatgtcaataaacggtttcttcccacgacatgattag

SEQ ID NO: 59409 - protein, 322 aa, Arabidopsis thaliana
MVLDMASHLYTNPPQNLHFISSSSSLKPHLCLSFKRINPKHKSSSSSVFVPYASQSSIAITSKERWSLNGMSALVTGGTRGIGRAIVEELAGLGAEVHTCARNEYELENCLSDWNRSGFRVAGSVCDVSDRSQREALMETVSSVFEGKLHILVNNVGTNIRKPMVEFTAGEFSTLMSTNFESVFHLCQLAYPLLRESKAGSVVFISSVSGFVSLKNMSVQSSTKGAINQLTRSLACEWAKDNIRINAVAPWYIKTSMVEQVLSNKEYLEEVYSVTPLGRLGEPREVSSAVAFLCLPASSYITGQILCVDGGMSINGFFPRHD

SEQ ID NO: 59410 - DNA, 789 bp, Arabidopsis thaliana
  CDS (1)..(789)
atggataagagatggagtctacaaggtatgactgctcttgtaaccggtgcagccagtggaatcgggtatgccatagtagaggagttagcaagttttggagctataatccatatatgtgacatctctgaaactcttctcagtcaaagtttaagtgaatgggaaaagaaagggtttcaagtgagtggttcaatctgtgatgtagcttctcggcccgatagagaaaaactgatgcaaaccgtctcctcgctgtttgatggcaaactcaacattcttgtaaacaatgttggtgtaatacgtggaaagccaacaacagaatatgtggcagaggatttctcttaccacatctcaacaaatttggaaccagctttccattttagccagctttcacatcttcttttaaaggcttcaggatttggaagcatcgtctttatgtcctctgctacaggggttgtatcagttcaatgtggatccatttatagtctaactaaaggagctttgaaccagttaactagaaatttagcatgtgaatgggcaaaagacggcataagagccaatgctgttgcacctaatgttgtcaagactcctttgtctcaatcttatctcgaggacgtcggtttcaaggaggcattgttcagtagaactccacttggtcgcgctggagagccgaatgaagttgcatcactagtggtcttcttgtgtctaccagcagcttcttatattactggtcaaaccatttgtattgatggtggtttcactgttaatgccttctcttataagccacaggcttga

SEQ ID NO: 59411 - protein, 262 aa, Arabidopsis thaliana
MDKRWSLQGMTALVTGAASGIGYAIVEELASFGAIIHICDISETLLSQSLSEWEKKGFQVSGSICDVASRPDREKLMQTVSSLFDGKLNILVNNVGVIRGKPTTEYVAEDFSYHISTNLEPAFHFSQLSHLLLKASGFGSIVFMSSATGVVSVQCGSIYSLTKGALNQLTRNLACEWAKDGIRANAVAPNVVKTPLSQSYLEDVGFKEALFSRTPLGRAGEPNEVASLVVFLCLPAASYITGQTICIDGGFTVNAFSYKPQA

SEQ ID NO: 59412 - DNA, 810 bp, Arabidopsis thaliana
  CDS (1)..(810)
atggtcactagaaaaatggacaaaagattatggagtcttcaaggtatgactgctcttgtgaccggtgcagccagcggaatcggttatgccatagtagaagagttagctggttttggagctaaaatccacatatgtgacatatccaaaactttgctcaatcaaagtttaagcgaatgggaaaataaagggtttcaagtgagtggttcagtatgtgatgtaacctctcatcctgagagagaaaaactgatgcaaaccgtctcctcgattttcgatggcaaactcaacattcttgtaaataacgtgggggtacttcgcggaaagccaacaacagaatatgtggcagacgatttcacttttcatatatcaactaacttggaagctgcttaccatttttgtcaactttcacatcctctcttaaaggcttcaggctatggaagcattgtattcctttcctctgttgctggggttgtatcactaattgactgtggatccatttatggtctaacaaaaggagctctaaatcaattagctagaaacttggcatgtgaatgggcaaaagacggcataagagccaatgctgttgcacctaatgttgtcaagactgctcagtctcaatcgtttcttgaagacgtcagtaaaaaggagggattgttgagtagaactccacttggccgtgttggagagccgaatgaagtttcatcactagtggtcttcttgtgtctacctgcagcttcttatatcacaggtcaaaccatttgtgttgatggaggtctcacggttaacggtttctcctatcaaccacatgcttga

SEQ ID NO: 59413 - protein, 269 aa, Arabidopsis thaliana
MVTRKMDKRLWSLQGMTALVTGAASGIGYAIVEELAGFGAKIHICDISKTLLNQSLSEWENKGFQVSGSVCDVTSHPEREKLMQTVSSIFDGKLNILVNNVGVLRGKPTTEYVADDFTFHISTNLEAAYHFCQLSHPLLKASGYGSIVFLSSVAGVVSLIDCGSIYGLTKGALNQLARNLACEWAKDGIRANAVAPNVVKTAQSQSFLEDVSKKEGLLSRTPLGRVGEPNEVSSLVVFLCLPAASYITGQTICVDGGLTVNGFSYQPHA

SEQ ID NO: 59414 - DNA, 783 bp, Arabidopsis thaliana
  CDS (1)..(783)
atggataaaaggtggagtctccaaggtttgactgctcttgtgaccggtggagccagcggaatcggtcatgctatagtagaagaactcgccggttttggggccaaaatccatgtgtgtgacatatcgaaaactctgctcaatcaaagtttatccgaatgggagaagaaagggtttcaagtgagtggttcagtctgcgatgcatccaatcgtctcgaaagagaaacacttatgcaaactgtcaccacaatatttgatggcaagcttaacattcttgtgaacaatgttggcacaattcgcacaaagccaacaatagaatatgaggcagaagatttttcgttccttatttcaacaaacttggaatctgcttatcatctaagccaactttcacatccactcctaaaggcttcaggcaacggaattattacttttatttcctctgctgcagggatcgtatcatttgatgctgcatccatttatggtctaacgaaaggagctttgaatcagctagcacgaaatttggcgtgtgaatgggcaaaagacggcattcgagccaacgcggttgcgcctaattttatcaccactgctctggctaaaccttttctcgaagacgctggttttaacgagattttgtcgagtagaactccacttggtcgcgctggagaaccaagagaggttgcctcacttgtggcttttctgtgtctacctgctgcttcatatattactggtcagaccatttgtgttgatggaggtctcactgttaatggcttctcatatcagccatag

SEQ ID NO: 59415 - protein, 260 aa, Arabidopsis thaliana
MDKRWSLQGLTALVTGGASGIGHAIVEELAGFGAKIHVCDISKTLLNQSLSEWEKKGFQVSGSVCDASNRLERETLMQTVTTIFDGKLNILVNNVGTIRTKPTIEYEAEDFSFLISTNLESAYHLSQLSHPLLKASGNGIITFISSAAGIVSFDAASIYGLTKGALNQLARNLACEWAKDGIRANAVAPNFITTALAKPFLEDAGFNEILSSRTPLGRAGEPREVASLVAFLCLPAASYITGQTICVDGGLTVNGFSYQP

SEQ ID NO: 59416 - DNA, 810 bp, Arabidopsis thaliana
  CDS (1)..(810)
atggcaaaggaagggggcttgggagagaactcaagatggagtcttggaggcatgaccgctcttgtcactggtggctctaaaggcatcggggaagctgtggtggaggaactagccatgttgggagcaaaagtccacacgtgtgccagagacgaaactcagcttcaagaacgcttacgtgaatggcaagcaaaagggtttcaggtcaccacttctgtctgcgacgtctcttctcgtgaccaacgagtgaaactcatggaaactgtttcctctctctaccaaggaaaactcaacatcctcgtcaacaatgtgggaacgtcaatattcaagccgaccacagagtatacagcagaagatttctcttttgtaatggctacaaatctcgagtcagctttccatctctcacagcttgcccacccattgttaaaagcctctggctcagggagcatcgtgctcatatcctctgctgctggagtcgtgcatgtcaatgttggatccatctatggagcaaccaaaggagccatgaatcagctggctagaaacttagcttgcgaatgggcgagcgacaacataaggacgaactctgtttgtccttggtatatcacaactcctttaagtaacgattttttcgatgaagagtttaagaaagaagcggtgcgtacgacaccaatggggcgtgttggagaagcaaatgaagtctcaccgcttgtggcatttctttgtcttccttcagcttcttatattactggtcagaccatttgcgttgacggcggtgccactgttaacggtttttccttcaagactatgccataa

SEQ ID NO: 59417 - protein, 269 aa, Arabidopsis thaliana
MAKEGGLGENSRWSLGGMTALVTGGSKGIGEAVVEELAMLGAKVHTCARDETQLQERLREWQAKGFQVTTSVCDVSSRDQRVKLMETVSSLYQGKLNILVNNVGTSIFKPTTEYTAEDFSFVMATNLESAFHLSQLAHPLLKASGSGSIVLISSAAGVVHVNVGSIYGATKGAMNQLARNLACEWASDNIRTNSVCPWYITTPLSNDFFDEEFKKEAVRTTPMGRVGEANEVSPLVAFLCLPSASYITGQTICVDGGATVNGFSFKTMP

SEQ ID NO: 59418 - DNA, 795 bp, Arabidopsis thaliana
  CDS (1)..(795)
atggaaactgacaaaagatggtctctcgccgggaaaacagctctggtaaccggcgggactcgtggaatcgggagagcagttgtagaggaactagcaaaatttggtgcaaaagttcatacttgttcaaggaaccaggaagagctaaatgcatgcttgaatgattggaaagcgaatggtttagtcgtgtctggttcggtttgtgatgcttcggttagggatcagagggagaagttgattcaggaagcttcttctgccttcagtggcaagctcaacatccttataaacaatgttggaactaatgtcaggaaaccaacagttgaatactcaagcgaggaatatgccaaaatcatgtcgaccaacttagaatccgctttccatttatctcaaattgctcatcctcttctaaaagcatctggtgtcggaagcattgtgttcatctcctctgtagctggcctggtgcatcttagcagtggatctatctatggtgcaactaaaggagcacttaatcagcttacaagaaatctagcttgcgagtgggcaagcgacaacatcagaaccaattgcgtggcgccatggtacatcaagacctcacttgtggaaacgctacttgagaagaaagaatttgtggaggctgtagtttcaaggaccccacttgggcgcgttggagaaccagaggaagtctcatcgttggttgcctttctctgccttcccgcatcatcttatattaccggacaggtcatatccgtcgatggaggattcactgtcaacggttttagctatgctatgaagccttaa

SEQ ID NO: 59419 - protein, 264 aa, Arabidopsis thaliana
METDKRWSLAGKTALVTGGTRGIGRAVVEELAKFGAKVHTCSRNQEELNACLNDWKANGLVVSGSVCDASVRDQREKLIQEASSAFSGKLNILINNVGTNVRKPTVEYSSEEYAKIMSTNLESAFHLSQIAHPLLKASGVGSIVFISSVAGLVHLSSGSIYGATKGALNQLTRNLACEWASDNIRTNCVAPWYIKTSLVETLLEKKEFVEAVVSRTPLGRVGEPEEVSSLVAFLCLPASSYITGQVISVDGGFTVNGFSYAMKP

SEQ ID NO: 59420 - DNA, 762 bp, Escherichia coli O157:H7 EDL933
  CDS (1)..(762): transl_table=11
  misc_feature (27)..(27): y is t or c
  misc_feature (102)..(102): n is a, g, c or t
atggcacaggtagcgattattaccgcytccgattcggggatcggcaaagagtgcgcgttattactggcgcagcaagggtttgatattggcattacctggcantcagatgaagaaggggcaaaagataccgcgcgtgaggtagttagccacggcgtacgtgcggagatcgtgcaactggatctcggcaatctgccagaaggtgcgcaggcgctggagaaacttattcaacggctggggcgtattgatgtgctggtgaataatgcgggcgcaatgaccaaagtgccgtttcttgatatggctttcgatgagtggcgcaagatttttaccgttgatgtcgatggtgcatttttatgctcgcaaattgctgcccgccagatggtgaaacaaggacagggtggtcgcatcatcaacattacgtcggtacatgaacatacgccgctgccggatgccagcgcctacacagccgctaaacatgcgctcggcgggttaaccaaagcaatggcgctggagttggtcaggcataagattttggtgaacgcagtcgcacctggggcgatcgctacgccaatgaacggcatggatgatagcgacgtgaagcccgacgcggagccttcgattcctctgcggcgttttggcgcaacgcatgagattgccagcctggtggcgtggctttgttcggagggcgcaaattacaccaccgggcagtcgttgatagtggatggcggctttatgttggcgaatccgcagttcaacccagaatag

SEQ ID NO: 59421 - protein, 253 aa, Escherichia coli O157:H7 EDL933
  misc_feature (34)..(34): The Xaa at location 34 stands for Gln, or His.
MAQVAIITASDSGIGKECALLLAQQGFDIGITWXSDEEGAKDTAREVVSHGVRAEIVQLDLGNLPEGAQALEKLIQRLGRIDVLVNNAGAMTKVPFLDMAFDEWRKIFTVDVDGAFLCSQIAARQMVKQGQGGRIINITSVHEHTPLPDASAYTAAKHALGGLTKAMALELVRHKILVNAVAPGAIATPMNGMDDSDVKPDAEPSIPLRRFGATHEIASLVAWLCSEGANYTTGQSLIVDGGFMLANPQFNPE

SEQ ID NO: 59422 - DNA, 762 bp, Escherichia coli O157:H7 EDL933
  CDS (1)..(762): transl_table=11
  misc_feature (246)..(246): r is g or a
  misc_feature (298)..(298): r is g or a
atgattttaagtgcattttctctcgaaggtaaagttgcggtcgtcactggttgtgatactgggctgggccaggggatggcgttggggctggcgcaagcgggctgtgacattgttggcattaacatcgttgaaccgactgaaaccatcaagcaggtcacggcgctggggcgtcgttttttaagcctgaccgccgatctgcgaaagattgatggtattcctggactgctggatcgcgcggtagctgartttggtcatattgatatcctggtgaataacgccggattgattcgccgcgaaratgctctcgagttcagcgaaaaggactgggacgatgtcatgaacctgaatatcaagagcgtattcttcatgtctcaggcagcggcgaaacacttcatcgcgcaaggcaatggcggcaagattatcaatatcgcgtcaatgctctccttccagggcgggatccgtgtgccttcttataccgcatcaaaaagcggcgtgatgggcgtgacgcgattgatggcgaatgaatgggctaaacacaacattaatgttaatgcgatagctccgggttacatggcgaccaacaatacccaacaactgcgggcagatgaacaacgtagcgcggaaattctcgaccgcattccagctggccgttggggactgccgagtgacctgatggggccggtagtgtttcttgcctccagcgcttcagattatgtaaatggttataccattgctgtggatggcggttggctggcgcgttaa

SEQ ID NO: 59423 - protein, 253 aa, Escherichia coli O157:H7 EDL933
MILSAFSLEGKVAVVTGCDTGLGQGMALGLAQAGCDIVGINIVEPTETIKQVTALGRRFLSLTADLRKIDGIPGLLDRAVAEFGHIDILVNNAGLIRREBALEFSEKDWDDVMNLNIKSVFFMSQAAAKHFIAQGNGGKIINIASMLSFQGGIRVPSYTASKSGVMGVTRLMANEWAKHNINVNAIAPGYMATNNTQQLRADEQRSAEILDRIPAGRWGLPSDLMGPVVFLASSASDYVNGYTIAVDGGWLAR

SEQ ID NO: 59424 - DNA, 783 bp, Agrobacterium tumefaciens str. C58
  CDS (1)..(783): transl_table=11
atgaacgagatgacgccaatgatgcaagcccaatttccagacctcaaggatgcgggcgtgctcgttaccggcggcggttcgggcatcggggcatcgctggtcgaagccttcgcgatgcagggggcgaaggtttcgttcatcgacatcgccgaacagccgagcatagcgcttgtcgagcggcttgcggcgacggtgcctcacccggtccattatttcagggccgacctcagtgatatcgacgcgatcaagcgtacggtggatatggccgcctccgccaccggcggcatcaaggtgctggtcaacaatgccgcctgggacgaccgtcacgacatcgacagcgtcacagaggcctattgggacgccaaccaggcggtcaatctcaagcagatgttcttcacggttcaggctgcccttccccatctgcgacaggcgaaggatgcctcgatcgtcaatttttcgtctatctcgtttttgctgaacatgggcgagttgccttcctatgcagcggcgaaagccggcattatcggtctcaccaagagccttgccggcaggctggggccggaaaatatccgcgtcaacacgctcctgccgggcatgatcgtgacggagcggcagaaggaactgtggctgacggatgagggcattacggccaccacggcgcggcagtgcctgaagcgcacgctcgtcgctgccgatctttccgggccgtgcctgtttctcgcatcatcggcatcgagcgccatcacggcgcaatccattatcgtagacggaggcctgttataa

SEQ ID NO: 59425 - protein, 260 aa, Agrobacterium tumefaciens str. C58
MNEMTPMMQAQFPDLKDAGVLVTGGGSGIGASLVEAFAMQGAKVSFIDIAEQPSIALVERLAATVPHPVHYFRADLSDIDAIKRTVDMAASATGGIKVLVNNAAWDDRHDIDSVTEAYWDANQAVNLKQMFFTVQAALPHLRQAKDASIVNFSSISFLLNMGELPSYAAAKAGIIGLTKSLAGRLGPENIRVNTLLPGMIVTERQKELWLTDEGITATTARQCLKRTLVAADLSGPCLFLASSASSAITAQSIIVDGGLL

SEQ ID NO: 59426 - DNA, 750 bp, Agrobacterium tumefaciens str. C58
  CDS (1)..(750): transl_table=11
atgaaattactcgaaaacaaggttgctatcatcaccggcgcgtcatccggcatcggccgggcgacggcgatgctgtttgtcacgcaaggcgcggcagtcgtcatcaatgcgcgcggtgaaaaggcgctgcaggaggttgcagccgacattcgtgatgccggcggccgtgtccatgcggttgcgggcgacgccggtgttgcggaaacccattcccggttggcggatgcggccgtgggcgttttcggtggcctcgatatcgccatcaataatgccggggcggtgggggctatgaagccgctggcggagatttcgcccgaggagtgggatcatgtcctcaacgtcaatctcacctccgcctttctgggggcgcgttaccagattccgccgatgctgaagcggggcggcggttccatcgtctttacgtcgagcttcgtcggcaccagcgccggcattcctggcatgtcggcttatggaactgcgaaggcagcgttaatggggctggtgaagggcattaccgccgattatgcgatcaatggcattcgcgccaatgccctgctccccggcggggtcgatacaccggccgcaggagacccggcgcagaaggaatgggccgccggcctgcatgcgatgaagcgcattgcccagcccgaggaaattgcgcaggccgctcttttcctcgcaagcccaatggcaagcttcgtcgccggggccgcattgtttgccgatggcggcaatgccgcggtgaaatga

SEQ ID NO: 59427 - protein, 249 aa, Agrobacterium tumefaciens str. C58
MKLLENKVAIITGASSGIGRATAMLFVTQGAAVVINARGEKALQEVAADIRDAGGRVHAVAGDAGVAETHSRLADAAVGVFGGLDIAINNAGAVGAMKPLAEISPEEWDHVLNVNLTSAFLGARYQIPPMLKRGGGSIVFTSSFVGTSAGIPGMSAYGTAKAALMGLVKGITADYAINGIRANALLPGGVDTPAAGDPAQKEWAAGLHAMKRIAQPEEIAQAALFLASPMASFVAGAALFADGGNAAVK

SEQ ID NO: 59428 - DNA, 738 bp, Agrobacterium tumefaciens str. C58
  CDS (1)..(738): transl_table=11
atggaggccgatatgagccgggttgcgttgatttccggcgggacgagcggcataggtgccgcaatcgcccgcgcccttcaggcagccggctaccgcgtggccgtcaactacgccttcacgacggacagggccgaagcattccagaaagaaaccggcatcccggcgtttcagtgggatgttcgcgattatgacgcctgcgtcgacggcataacgaaggttgaggaaaccttcggaccggtcgaagtgctcgtcaataatgcgggcatcacccgcgacgcgatgtttcacaagatgtcgccgcagcaatggcgagaggtgatcgacaccaacctcaccggcgtcttcaacatgacacaccccgtctggccgggcatgcgcgagcgcggcttcggccgcatcgtcaacatttcctccatcaacggccagaaaggacaggcgggacaggtcaattattccgcctcgaaagcgggtgatatcggcttcaccaaggcgcttgcccaggaaggcgccagccgtaacatcaccgtcaacgccatctgccccggctatatcggcacggagatggtgcgggcgataccggaaaaggttctggcggaacggatcgtgccgcaaattcccgtcggacgcttgggtgaaccggaagaaatcgcgcgttgcgtcctgtttctggtgtcggacgaggcgggtttcatcaccggctccacgatgacagccaatggcgggcaatatttcgcctga

SEQ ID NO: 59429 - protein, 245 aa, Agrobacterium tumefaciens str. C58
MEADMSRVALISGGTSGIGAAIARALQAAGYRVAVNYAFTTDRAEAFQKETGIPAFQWDVRDYDACVDGITKVEETFGPVEVLVNNAGITRDAMFHKMSPQQWREVIDTNLTGVFNMTHPVWPGMRERGFGRIVNISSINGQKGQAGQVNYSASKAGDIGFTKALAQEGASRNITVNAICPGYIGTEMVRAIPEKVLAERIVPQIPVGRLGEPEEIARCVLFLVSDEAGFITGSTMTANGGQYFA

SEQ ID NO: 59430 - DNA, 786 bp, Agrobacterium tumefaciens str. C58
  CDS (1)..(786): transl_table=11
atggaggatcaaccaaaaaccgtgctcgttacgggttccaccagcggcatcgggctcgccatcgccaagcgttttgccgaagccgggtttctggtcgccgtccacggtgtggagacggcggcggagggcgcgcaggcccttgaagcggttgcgacagtggcgcgccaccggccggtctatttttccgccaatctcgcccattacgacgagagcgcgcaccttccggaaaaagtcatcgccgagttcggccatatcgatgtgctggtcaacaatgccggcatccagaaggtcgcgccgatcgacgagttcgattttgccgatttctcgcgcatcgtcgcgatctcgctcgacagcgctttccatacgatccacgcagccctgccgggcatgaaggaaaggggctggggccgcatcgtcaatatcgcgtccgcgcatggattacgcgcctcgcccttcaaggcaccttatgtggcaaccaaacacgccgtggttgggctgacgaaaagcgtggcgctggaagtggccgagcagggcatcacctgcaacgccatctgcccgggttatgtctggacccccctggttgcagcccaggtggccgatcaggcgcgggtgcatggcatgagcgaggacgatgtggtgaagaaggtgatgcttgcgccacagccgaccagacggttcgtgcagccggaggaagtggcggaaatggcgctttatcttgcgggcgatatggcgcgctccatcaccggcacgaccatttccatcgacggcggctggacggcgaaataa

SEQ ID NO: 59431 - protein, 261 aa, Agrobacterium tumefaciens str. C58
MEDQPKTVLVTGSTSGIGLAIAKRFAEAGFLVAVHGVETAAEGAQALEAVATVARHRPVYFSANLAHYDESAHLPEKVIAEFGHIDVLVNNAGIQKVAPIDEFDFADFSRIVAISLDSAFHTIHAALPGMKERGWGRIVNIASAHGLRASPFKAPYVATKHAVVGLTKSVALEVAEQGITCNAICPGYVWTPLVAAQVADQARVHGMSEDDVVKKVMLAPQPTRRFVQPEEVAEMALYLAGDMARSITGTTISIDGGWTAK

SEQ ID NO: 59432 - DNA, 741 bp, Agrobacterium tumefaciens str. C58
  CDS (1)..(741): transl_table=11
atggaactgaaacacaagaccgcgctcgtaacgggcgcgtgcggcggcatcggccgcgccgtggttgcggcgctggtggcgcaaggggcgagggtgatcgccttcgatcgcgatatcgaggctgtaacagcgctcgcgaaggggttcggcagtgcctgcgatccagtcgccgtcgatctcggtgatgcggcggcgctacaggccgtcatgagggatatagccggccgtttcaaggtcatcgacattctcgtcaacaatgccggtgtgctgtctccgcacaagctggccgcgaccacgctcgaagaatggcacaggctgatggccgtcaatctcgatgccgcgctgctgctgacgcaggccgtcgttcccgccatgaaggaaaaccgctgggggcgactgatcaacatctcctcctacgcctggaaatccggcggactgacggcgggtacggcctattcggtctcgaaatcggcactggtcggcctcacctactcctccgcccgtgaactcgcctccttcggcatcactgccaatgcggtcgcgccggcctatgtggtttcgccgatgatcatggagcaattgtcggaggaagatcgtcagcgccagcttgcagccattcccgtcggccgtttctgccagccggaagaggtcgcgcatgcggtgcgtttccttgcctcgccgctgtccggcttcatgaccggcactgtcgttgacatgaatggtggcctgcaattcggctga

SEQ ID NO: 59433 - protein, 246 aa, Agrobacterium tumefaciens str. C58
MELKHKTALVTGACGGIGRAVVAALVAQGARVIAFDRDIEAVTALAKGFGSACDPVAVDLGDAAALQAVMRDIAGRFKVIDILVNNAGVLSPHKLAATTLEEWHRLMAVNLDAALLLTQAVVPAMKENRWGRLINISSYAWKSGGLTAGTAYSVSKSALVGLTYSSARELASFGITANAVAPAYVVSPMIMEQLSEEDRQRQLAAIPVGRFCQPEEVAHAVRFLASPLSGFMTGTVVDMNGGLQFG

SEQ ID NO: 59434 - DNA, 735 bp, Agrobacterium tumefaciens str. C58
  CDS (1)..(735): transl_table=11
atggctgttcctttcatgcttctgaccggcgccagccgcggaatagggcacgccaccgtcaagctgtttcaggagaagggctggaggattctcaccgtttcgcggcagcccttttccgaggaatgccggtggccatctgcgcgcgagagccatatccaggccgatcttgaggacttgtcgcggattgatgatctggcagacgaggtgcgttcgcgcctgcctgaaggcaagcttgccgccctcgtcaacaatgccggtatttcgccaaagggcgaaggcggcagccgtcttggcgtggtggacaccacggccgacatctggacgcgggtgatgaatgtcaatctcatctcaaccgcgctgcttgcccgtgcgctgctgccggaactggaagtcgccaaaggctcgatcgtcaacgtcacctccatcgtcgggtcgcgggtccacccatttgcgggcgttgcctatgccgcttccaaggcggcgcttgcagcgctgacgcgcgaactggcgcatgaattcggaccgcgtggcgtacgcgccaacgccatcgcgccgggtgaaatcaacaccgccatcctgtcgcccggaacggctgaactggtggatgcgcaggtgccgctcggccgcctcggcacgacgacagaggtggcgcagaccatctatttcctgtgctcggaacagtcgagctacatcaacggcgctgaaattcacatcaatggcggccagcacgtctga

SEQ ID NO: 59435 - protein, 244 aa, Agrobacterium tumefaciens str. C58
MAVPFMLLTGASRGIGHATVKLFQEKGWRILTVSRQPFSEECRWPSARESHIQADLEDLSRIDDLADEVRSRLPEGKLAALVNNAGISPKGEGGSRLGVVDTTADIWTRVMNVNLISTALLARALLPELEVAKGSIVNVTSIVGSRVHPFAGVAYAASKAALAALTRELAHEFGPRGVRANAIAPGEINTAILSPGTAELVDAQVPLGRLGTTTEVAQTIYFLCSEQSSYINGAEIHINGGQHV

SEQ ID NO: 59436 - DNA, 774 bp, Agrobacterium tumefaciens str. C58
  CDS (1)..(774): transl_table=11
atgtctcagaaactgtcgaacaaagtcgccctcataacgggaagttcaaggggcatcggccgtgccgccgccctggcatttgccaaggagggcgcaggtcttatcggcgtccattatggcgcaaaccccgatgccgcgcaggcgacgatccgcgagatcgaagccctcggctcgaaggcgatcgccctcaaggccgatctacgcgatgggaaagcggcaacagacaacctgtgggatcagttcaagcaagcgtccatcgctttcaccggcacgccatcgctcgacattctcgtcaataatgcgggcatcgcgccggcgacaccgttgaaagacatgaccgaggccgcgttcgacgagttgatgacgatcaacttcaaagcgcccttcttcctcatccaggctgtcgccgatcatctccgcgacaatggccgtatcatcaatatctcgaccggtttcacccgcatcgcggcaccgacccatccggcttatgccgcttccaagggggcgcttgaaacattgacgctggcgcttgcaccggaattcggccggcgcggaattactgttaattcggtgcttccgggcgtgactgaaaccgacatgaacgccggatggctggcagcgcctgaagcgcgtgccggtgccgaagccctgtcggtcttctcacggatcggccgcgccgaggacatcgctgacgtcattacgttcctcgcctccgatgatgcccgctggacgaccgggcagatgattgacgcgacgggtggtgcgcggatttga

SEQ ID NO: 59437 - protein, 257 aa, Agrobacterium tumefaciens str. C58
MSQKLSNKVALITGSSRGIGRAAALAFAKEGAGLIGVHYGANPDAAQATIREIEALGSKAIALKADLRDGKAATDNLWDQFKQASIAFTGTPSLDILVNNAGIAPATPLKDMTEAAFDELMTINFKAPFFLIQAVADHLRDNGRIINISTGFTRIAAPTHPAYAASKGALETLTLALAPEFGRRGITVNSVLPGVTETDMNAGWLAAPEARAGAEALSVFSRIGRAEDIADVITFLASDDARWTTGQMIDATGGARI

SEQ ID NO: 59438 - DNA, 756 bp, Agrobacterium tumefaciens str. C58
  CDS (1)..(756): transl_table=11
atgaccaacagacttcaaaacaagatcgccgtcgtcaccggagcaaccagcggcatcggccttgcaacggccaaacttttcgctgtcgaaggtgcacgcgtctacatcaccggccggcgcaaggatgccctggacaaggcggtggccgagatcggccatggcgctgtcggcgtacaggccgactccgcaagtaacgaaaatctcgacaagctgttcgcccaggtgaaggcggagcaaggccgcctcgacgccctcgttgtgaacgccggtggcggcagcatgcttccgctcggccagatcaccgaggagcagatcgaccacaccttcggccgcaacgtgaaggctgtcatcttcacggtgcagaaggcgcttccgttgatgggcaagggcgcatccatcgtgctgaccggttcgaccgcaggcaccgaaggcacggccgccttctccgtttactccgcctccaaggccgccgtccgcaacctggcccgctcctgggcgcttgacctgaaaggcaccggcatccgcgtcaacgtcgtctcgcccggtgcgacacgtacgcctggcctcgtcgagcttgccggtgacgacaaggaacagcagcagggcctgctcgactatctcgcctcgcgcatcccactcggccgcgttggtgaatccgaggagatcgccaaggcaaccctgttcctcgcctctgacgacgcgagcttcgtcaacggcgccgaactcttcgccgacggcggccaggcccaggtctaa

SEQ ID NO: 59439 - protein, 251 aa, Agrobacterium tumefaciens str. C58
MTNRLQNKIAVVTGATSGIGLATAKLFAVEGARVYITGRRKDALDKAVAEIGHGAVGVQADSASNENLDKLFAQVKAEQGRLDALVVNAGGGSMLPLGQITEEQIDHTFGRNVKAVIFTVQKALPLMGKGASIVLTGSTAGTEGTAAFSVYSASKAAVRNLARSWALDLKGTGIRVNVVSPGATRTPGLVELAGDDKEQQQGLLDYLASRIPLGRVGESEEIAKATLFLASDDASFVNGAELFADGGQAQV

SEQ ID NO: 59440 - DNA, 864 bp, Agrobacterium tumefaciens str. C58
  CDS (1)..(864): transl_table=11
atggaagacacccgacaccctaccccgccctatccggaacaacagcaggagccaccgggcaagacagccgagatgaaacccatcccggatcatggtgaacagtcctacgtgggtgacggtaagctgaaaggcagggttgccctcatcaccggagccgattcaggaattggcaaggctgtcgccattgcttttgcgcgagaaggcgccgacatcgtcatttcctacctcaacgaggacgatgacgcccgcgacactgcaaagtgggtaaaggaagccggccaaggagctttgttggtacccggcgacatcaagtctgaggaacattgcaagaatctcgtacatcgcgccgtcaatgagctcggtgctgtcgacattctcgtgaacaacgcagcgttccagcgaacctatgacgatatagccgacatcaccgccgaggagtgggacgaaacttttcgcaccaacatctatgcacctttcttcctgtcgaaagcggccgctccccacatgaaaccgggtagctcgatcatcaacacgacctcaattcagtcgcggcagccctcgcctcaacttctcgcctacgcttccacaaagggcgcgatatccaacttcactgcgggtctggcggaaatgctggcggaaaaaggtattcgcgtgaatgcggtcgcaccggggccgatctggacccctctcattccctcgaccatgcccgctgaaaaggctgccaagtttggagagaataccctcattggccgtgccgggcagccggcagagctcgcaggagcctacgtcctgcttgcttcggatctgggaagctacatgacgggagccgtcattcccgtgaccggcggcgagatcatgatctga

SEQ ID NO: 59441 - protein, 287 aa, Agrobacterium tumefaciens str. C58
MEDTRHPTPPYPEQQQEPPGKTAEMKPIPDHGEQSYVGDGKLKGRVALITGADSGIGKAVAIAFAREGADIVISYLNEDDDARDTAKWVKEAGQGALLVPGDIKSEEHCKNLVHRAVNELGAVDILVNNAAFQRTYDDIADITAEEWDETFRTNIYAPFFLSKAAAPHMKPGSSIINTTSIQSRQPSPQLLAYASTKGAISNFTAGLAEMLAEKGIRVNAVAPGPIWTPLIPSTMPAEKAAKFGENTLIGRAGQPAELAGAYVLLASDLGSYMTGAVIPVTGGEIMI

SEQ ID NO: 59442 - DNA, 771 bp, Agrobacterium tumefaciens str. C58
  CDS (1)..(771): transl_table=11
atgacatatccttcgcaaatccccaacatctcgaagctgtttgacctttccggtcggagggccgtcatcacgggcggcgctcgggggatcgggcgcgctatcgctgacggcttcttagaagtgggagctgatgtcgtctgcatcgaccgtggatgggaaagctctgacctcccggccgataaccggcagattgtcacggccgatcttagcgaccgcagcgacctgaagcgcggattcgatgaagctgtggagcgactggggggccagatcgatgtccttgtcaacaacgcaggcatctgggacgacacgccgtcgctccatatggagcttgagatgtgggacaggatcatcgaggtcaatctgactgcggccttcgcgctgagcaggcatgcagccaggctgatgcttccccgaggccgcggacgaataataaacattggctccatccgcagtctgaggggaggccacaatgcggctgcctatgcagccagcaagggagggatcgccttgctcactcagaccttgtcgaatgaatgggcaccttcaggactaagggtcaatgccatagcgcccggcgctatggtcaccgtcctgactgaaaagctgcgccacgatcctgaagtggtcacccgcttcatcgagcgcatccctgccagaagatggggatcgcccgccgatgtggcgggcctggcgatcttcctggccagcgacgcctccgattatgtcactggtgcaatcatcccctgcgacggggggttccttgccggttaa

SEQ ID NO: 59443 - protein, 256 aa, Agrobacterium tumefaciens str. C58
MTYPSQIPNISKLFDLSGRRAVITGGARGIGRAIADGFLEVGADVVCIDRGWESSDLPADNRQIVTADLSDRSDLKRGFDEAVERLGGQIDVLVNNAGIWDDTPSLHMELEMWDRIIEVNLTAAFALSRHAARLMLPRGRGRIINIGSIRSLRGGHNAAAYAASKGGIALLTQTLSNEWAPSGLRVNAIAPGAMVTVLTEKLRHDPEVVTRFIERIPARRWGSPADVAGLAIFLASDASDYVTGAIIPCDGGFLAG

SEQ ID NO: 59444 - DNA, 810 bp, Nostoc sp. PCC 7120
  CDS (1)..(810): transl_table=11
atgaacgggttaaaaggtaaaaacactctgattacgggtgctagttctggtattgggcaggcgatcgctatccgtctggctcaagaaggttgtaacattgctattaattaccgcaaaagtccctcaggtgcagaggaaactgaagaaatggctttgcagaaggcttgtaaaaatgttgaaatttgcggtgttaagtctttgttagtacagggtgatgtttctcaggaagaagatgttgtcgagatggtcaacactgtaattgaggagtttggtagtctcgatattctcatcaataacgccgggattcaaactgaatgtccatcccacgaaatcacagcagaagactttgatcgcgtaattggagtcaatctgcggggttcttacttgtgcgcgcgtgaaactattaaacacctgctgactcaaaatcgttcaggggtaattattaatatttccagtgtccacgaaattatccctcgaccaatgtatgtcagctattccatcagtaaaggtggaatggaaaatatgaccaaaactctagctttggaatatgctcatcggggtattcgtgtcaattctgtagcgcctggagcgacaattacacctatcaatgaagcttggactgatgacccggaaaagaaagcagttgtagaaagtcatattcccatgaggcgtgctggtacttccgaggaaatggcggcagcagtagcatttttagcatcagatgaagcagcatacatcacgggacaaactttgtttgtagatggtggtctgtcgctgtacgctgactttagagaaccttggtcagcttga

SEQ ID NO: 59445 - protein, 269 aa, Nostoc sp. PCC 7120
MNGLKGKNTLITGASSGIGQAIAIRLAQEGCNIAINYRKSPSGAEETEEMALQKACKNVEICGVKSLLVQGDVSQEEDVVEMVNTVIEEFGSLDILINNAGIQTECPSHEITAEDFDRVIGVNLRGSYLCARETIKHLLTQNRSGVIINISSVHEIIPRPMYVSYSISKGGMENMTKTLALEYAHRGIRVNSVAPGATITPINEAWTDDPEKKAVVESHIPMRRAGTSEEMAAAVAFLASDEAAYITGQTLFVDGGLSLYADFREPWSA

SEQ ID NO: 59446 - DNA, 732 bp, Agrobacterium tumefaciens str. C58
  CDS (1)..(732): transl_table=11
atggtgcaggattttaacggccggacagtggtgatcaccgccgccggtcagggtatcggccgggcgacggcggagcgtttcatatcgctcggcgcgcgcgtcatcgccaccgatatcaacgagcaggcgctttccaccctgaagggtgcggaaacgcgggttctaaacgtgcttgacggtgatggcgtcgaggatttcgcagccgatatcggccatgccgacgtgctgttcaactgcgccggcttcgtccattccggcaccattctcgattgtgaagagaaggactgggatttctccttcgacctcaacgccaaggcgatgtatcgcacctgccgcgccttcctgcccggcatgctggaaaagggcaagggcgcgatcgtcaacatgtcatcggttgcgtcaagcgtgaagggcgtgccgaaccgtttcgcctatacggcttccaaggcggccgtggtgggtctcaccaaggccatcgccgccgatttcgtcaccaagggcattcgctgcaacgccatttgccccggcacggtcgatagcccgtccttgcatgaccgcctgcgcgccaccggcaattacgaacaggcgttggcggatttcatcgcccgccagccgatgggccgcatcgccacaccggaagaaatcgcagcgctcgtcacctatctcgcttccgacgaggcaggtttcaccaccggccagattcatgtgatcgatggcggctggacgggctga

SEQ ID NO: 59447 - protein, 243 aa, Agrobacterium tumefaciens str. C58
MVQDFNGRTVVITAAGQGIGRATAERFISLGARVIATDINEQALSTLKGAETRVLNVLDGDGVEDFAADIGHADVLFNCAGFVHSGTILDCEEKDWDFSFDLNAKAMYRTCRAFLPGMLEKGKGAIVNMSSVASSVKGVPNRFAYTASKAAVVGLTKAIAADFVTKGIRCNAICPGTVDSPSLHDRLRATGNYEQALADFIARQPMGRIATPEEIAALVTYLASDEAGFTTGQIHVIDGGWTG

SEQ ID NO: 59448 - DNA, 840 bp, Brucella melitensis 16M
  CDS (1)..(840): transl_table=11
atggtctattcaagatttgagagcgaggttgttatgtccccagattccaacaccgataattccaggcccggcgtttcctcatctgaaatcccaaggacggatacggaacgcaaaacactggtcctgaccggcgcaagccgcggcattggccatgcgacggtgaaacggttttcccttgccggatggcgcgtcatcacctgctcacggcaggatttttccgaaaactgcccctggcccgcaggacctgaagaccatatcaaggtcgatctttccgacccggaagatatcggcaaggccattgccgaaattcgccgcaggctggaagccaatggcagcaagctgcacgccctcgtcaataatgcgggcatttcacccaaggcggaaggcggccgccgcatgaactccatcgaaacgccgatggccgtctggcgcgatgtgtttcaggtgaatttcatggccccgatcatgctggcgcgcgggctgttcaaggagcttgaagcagcccagggctcggtcgtcaacgtgacctccatcgcaggcagccgcgtgcacccctttgccggaactgcctatgccacatccaaggcagcccttgccgcgctgacccgcgaaatggcatcggatttcggcccctatggcattcgcgtcaatgcgattgcgccgggcgagatcgacacggctatcctatcacctggcaccgacaagctggttgaacaactgccgatgcgccggctcggcaagacctcggaagtagccgaaacaatctacttcctgtgcaccgaagcctcgtcctatgtcaccggctcggaaatccacatcaatggtggccagcacgtctga

SEQ ID NO: 59449 - protein, 279 aa, Brucella melitensis 16M
MVYSRFESEVVMSPDSNTDNSRPGVSSSEIPRTDTERKTLVLTGASRGIGHATVKRFSLAGWRVITCSRQDFSENCPWPAGPEDHIKVDLSDPEDIGKAIAEIRRRLEANGSKLHALVNNAGISPKAEGGRRMNSIETPMAVWRDVFQVNFMAPIMLARGLFKELEAAQGSVVNVTSIAGSRVHPFAGTAYATSKAALAALTREMASDFGPYGIRVNAIAPGEIDTAILSPGTDKLVEQLPMRRLGKTSEVAETIYFLCTEASSYVTGSEIHINGGQHV

SEQ ID NO: 59450 - DNA, 756 bp, Drosophila melanogaster
  CDS (1)..(756)
atgagtctcagcaacaaggtggtgatcgtgacgggagctagcagcggaattggtgccgccatcgcccaagttcttgctcgcgaaggtgccactttggcgctggtgggtcgcaatgtggccaatctggaggccacgaagaagagcctgaagggcacgcaggcagaaatcgtggtggccgatgtgaccaaggatgcggacgcgattgtccagcaaacgttggccaagttcggacgcatcgacgtgcttgtcaacaatgccggcattctgggcaagggtggcctcatcgatctggacatcgaggaattcgacgcggtgctcaataccaatctgcgtggtgtcattctgttgaccaaggcggtgctcccgcacctcctgaagaccaagggagccgtggtcaacgtgagcagctgtgccggcattcgtcccttcgccggagcactgagctatggagtttcgaaggccgccctcgatcagttcaccaagattgtggccctcgaaatggcgcctcagggtgtgcgcgtgaactcggtgaatcccggcttcgtggtgaccaacatccatcggaacattggcatcgtcgacgaggagtacaacggaatgctccagcgggccatcaattcgcatcccatgggccgtgtaggcgacgtcaccgaagtggccgaggcagtggcctttttggccagctccaaggcaagtttcaccaccggcgccctcttccccatcgatggtggcaagcacaatctgacgcctcgttaa

SEQ ID NO: 59451 - protein, 251 aa, Drosophila melanogaster
MSLSNKVVIVTGASSGIGAAIAQVLAREGATLALVGRNVANLEATKKSLKGTQAEIVVADVTKDADAIVQQTLAKFGRIDVLVNNAGILGKGGLIDLDIEEFDAVLNTNLRGVILLTKAVLPHLLKTKGAVVNVSSCAGIRPFAGALSYGVSKAALDQFTKIVALEMAPQGVRVNSVNPGFVVTNIHRNIGIVDEEYNGMLQRAINSHPMGRVGDVTEVAEAVAFLASSKASFTTGALFPIDGGKHNLTPR

SEQ ID NO: 59452 - DNA, 750 bp, Drosophila melanogaster
  CDS (1)..(750)
atgtcagtgggagtactagctggaaaagtagccctggtaacaggtgccggatcaggaattggtcgtgccacctgccgccttttggccagagatggtgccaaagtgatcgccgttgaccgcaatctaaaggcggcccaagaaaccgtacaggaattgggctctgagcgatctgccgccctggaggtggacgtttcctctgcccagagtgttcaattctcggtggccgaggccctaaagaaattccagcaggcacccactattgtggtcaattcggctggaataacccgagatggttatctgctcaagatgcccgaacgggactacgatgacgtatacggggtcaatctgaagggcacctttctggttacccaggcctatgccaaggccatgatcgagcagaaactggaaaacggcaccattgtgaacctctcaagcatcgtggccaagatgaacaacgtgggccaggccaactatgcggccaccaaggcgggcgtgatctccttcacggaggtggcctccaaggagttcggaaagtttggcatccgtgtgaactgcatcctgccaggctacatagacacgcccatggtagcggttgtgcccgattctgtaaagcaggaggtggtacaacgatgccccttgggccgattgggtcagccggaggagatcgccgaggtcattgcctttttggcctccccgcaatcgtcatacgtcaatggggctgccatcgaggtcaccgggggccttaaataa

SEQ ID NO: 59453 - protein, 249 aa, Drosophila melanogaster
MSVGVLAGKVALVTGAGSGIGRATCRLLARDGAKVIAVDRNLKAAQETVQELGSERSAALEVDVSSAQSVQFSVAEALKKFQQAPTIVVNSAGITRDGYLLKMPERDYDDVYGVNLKGTFLVTQAYAKAMIEQKLENGTIVNLSSIVAKMNNVGQANYAATKAGVISFTEVASKEFGKFGIRVNCILPGYIDTPMVAVVPDSVKQEVVQRCPLGRLGQPEEIAEVIAFLASPQSSYVNGAAIEVTGGLK

SEQ ID NO: 59454 - DNA, 777 bp, Schizosaccharomyces pombe 972h-
  CDS (1)..(777)
atgactgttgaaggacgagtagttttgattactggagctgcgggcggcattggcaaagtcttgtgtaaaatgtttaccgagttaggagatcgtgtagcaggaatcgacattgtagatccttcgaaagttcaagatgctgcacttgctttgcaagcagatgtcagcaaagcagaccaaatagagactgcgatcgagaaggtcattcagacccttggtccaattgatgtactcattaataacgctggtctagcagatgatactccttttgagcaattgtctcatgaatcttgggatcatgatgttagcttagtgctcagaggtaattatcttactcaacgttatgttattcctcatatggccaagcaaggtaaaggaggtagtattgtcaatatcggatctgttaacggccacatttatcttggatctcctgcttacagtgctgctaaagctggtttggaaaacctcaccaaagcattggctgttcgatatgggcctttaggaatccgcgttaacgtatgtgctcccggaacaatctggagtccagcatgggatgagcgttttaagaagcatccagacgttggtgacagaatgaaaagatggtatcctgtaggaaggttaggaacaccggaggatgtagctcgcgcagtaatttttctggccgattccaaaaactcattcatcaccggtactaccctatacgttgatggaggcttacttgctggtaacccttgtttaatccaagacatttactctgaaaacaacaattttgtcttttaa

SEQ ID NO: 59455 - protein, 258 aa, Schizosaccharomyces pombe 972h-
MTVEGRVVLITGAAGGIGKVLCKMFTELGDRVAGIDIVDPSKVQDAALALQADVSKADQIETAIEKVIQTLGPIDVLINNAGLADDTPFEQLSHESWDHDVSLVLRGNYLTQRYVIPHMAKQGKGGSIVNIGSVNGHIYLGSPAYSAAKAGLENLTKALAVRYGPLGIRVNVCAPGTIWSPAWDERFKKHPDVGDRMKRWYPVGRLGTPEDVARAVIFLADSKNSFITGTTLYVDGGLLAGNPCLIQDIYSENNNFVF

SEQ ID NO: 59456 - DNA, 747 bp, Corynebacterium glutamicum ATCC 13032
  CDS (1)..(747): transl_table=11
atgcctagtccacgcactgttcttatcactggtgccgctggcggtttgggtcgggcattcgctgaaggtttcgcagcccaaggagaccgtatcgcggtggcggatatcaatctggatggggcgcaagagaccgttgacaagctgaaagcattgggcgcagatgccgcagcctttgaagttgatgtcacgtctttggagtccaccgaggccctagccgccggtgccgctgagtttggcggtggccgaattgatgtccttattaataacgcagcgatatatgcgacagtgactcgttcaccgtttgaggatattgaccctgcggagtgggatttggtcatgggagtcaatctcaaaggcccgtggttggtgacgcgttctgtgagtccgtttttgtccgataatgcccgtgtggtcaatctttccagcgcgactgtgttttcaggatctgcacactgggcgcactacgtggcatccaaaggtggggtcattgctttaaccagggtgcttgctaaagagctgggtggtcgtgggatcacggtcaatgcggttgcgcctgggtttacgctgactgaagccagcttgggactcatggatagcgcggaaacgtacggtgtcgatcgcggatccatcaagcgcgcaagccaaccgaaagacatcgtcggcaccaccatgtttcttgcatccccagaagccgaatacatcactgggcaaacactcatcgttgatggtggccgacagttcatctaa

SEQ ID NO: 59457 - protein, 248 aa, Corynebacterium glutamicum ATCC 13032
MPSPRTVLITGAAGGLGRAFAEGFAAQGDRIAVADINLDGAQETVDKLKALGADAAAFEVDVTSLESTEALAAGAAEFGGGRIDVLINNAAIYATVTRSPFEDIDPAEWDLVMGVNLKGPWLVTRSVSPFLSDNARVVNLSSATVFSGSAHWAHYVASKGGVIALTRVLAKELGGRGITVNAVAPGFTLTEASLGLMDSAETYGVDRGSIKRASQPKDIVGTTMFLASPEAEYITGQTLIVDGGRQFI

SEQ ID NO: 59458 - DNA, 888 bp, Corynebacterium glutamicum ATCC 13032
  CDS (1)..(888): transl_table=11
atgatttcattgctaaatgatccacgtacgctattcccgaaagtcgatcccccaaagcaaagccagccggaaccaggcctagatataaaactttccccccaagccgatattggtctctccagctatcaaggaagtggaaggcttaagggccgcaaggctcttattactggtggcgattctgggattggagctgccgtagcaatcgcttatgctcgcgagggggcagatgttgcgatcgcttacttgcccgaagaacaagccgatgctgacagagtgctccaagcaatcgaggaaacaggtcaaaaagctttttctttccctggtgatctccgtgatccagaatactgtcgctcgctggtccaagagacggtgaacgctttaggtggcctagacatcttggtcaacaacgcgtcacgtcaggtgtgggcacctggtttgaccgaaattaccgacgaaaacttcgaccagactttgcaggttaacctctatggtagttttcgggttaccaaagcagctatacctcatctgaagcccggatcatcgataatctttacatcgtccattcaggcgtaccaaccttcggaaaccctcttggattacgccatgactaaggcggcattgaacaatttgtcaaagggcttggcaagtagtctgataggcgatggcattcgggtaaattctgtagccccaggtcctttctggacgccgttgcaacccagccatggtcagccacaagagaaaatagaaggatttggccagcacgctccgattggaagagcgggtcaccctgttgagttggcaggtgcgtacgtttttctcgcttctgacgaagccagctatgtggtaggagaaaccctgggagtcacaggtgggacgcccaccccatag

SEQ ID NO: 59459 - protein, 295 aa, Corynebacterium glutamicum ATCC 13032
MISLLNDPRTLFPKVDPPKQSQPEPGLDIKLSPQADIGLSSYQGSGRLKGRKALITGGDSGIGAAVAIAYAREGADVAIAYLPEEQADADRVLQAIEETGQKAFSFPGDLRDPEYCRSLVQETVNALGGLDILVNNASRQVWAPGLTEITDENFDQTLQVNLYGSFRVTKAAIPHLKPGSSIIFTSSIQAYQPSETLLDYAMTKAALNNLSKGLASSLIGDGIRVNSVAPGPFWTPLQPSHGQPQEKIEGFGQHAPIGRAGHPVELAGAYVFLASDEASYVVGETLGVTGGTPTP

SEQ ID NO: 59460 - DNA, 798 bp, Streptomyces coelicolor A3(2)
  CDS (1)..(798): transl_table=11
atgacatccgtcgacaacgccaccccccgtaccgccgtcgtcaccggcgcggcccggggcatcggccgcggcatcgccgaacggctggccgaggacggtctggacgtggtcgtcgccgacctccccagcatggccgaggagttgagcgcggtggcggccggcatcgagaagacgggccgccgggccctcgccgtgcacgccgacgtgaccagcaaggaacagaccgacgcactggtcgccgcggcggcggaccgcttcggccggatcgacgtctacgtggccaacgccggtatcgcccgggtgaccccgctgctggagaccgacctcgacgagttcgagcaggtcatggccgtgaacctgcgcggtgtcttcctctcctaccaggccgccgcgcggcagatgatcgcccagggcggcggcggcaagatcatcggcgccgcctcgatcgtcgcgcaccgccccttcgcgctgctcggcgcctactcggcgtcgaagtggggcgtacgcgggctgacccaggccgcggcgatggagtgggcgcgccacggcatcaccgtcaacgcgtactgcccgggcatcgtcggcaccgacatgtgggacctgatcgacgagcggctggccgaggaggcgggcatcgagaagggccaggccatcaagaagcacgcggagtcgatcgccctcggccgggtcgaggaacccgccgacgtagcggccttcgtctcctacctggcctcacgggactcggactacatgaccggccagtcggtgatgatcgacggcggtatccagttcgcctga

SEQ ID NO: 59461 - protein, 265 aa, Streptomyces coelicolor A3(2)
MTSVDNATPRTAVVTGAARGIGRGIAERLAEDGLDVVVADLPSMAEELSAVAAGIEKTGRRALAVHADVTSKEQTDALVAAAADRFGRIDVYVANAGIARVTPLLETDLDEFEQVMAVNLRGVFLSYQAAARQMIAQGGGGKIIGAASIVAHRPFALLGAYSASKWGVRGLTQAAAMEWARHGITVNAYCPGIVGTDMWDLIDERLAEEAGIEKGQAIKKHAESIALGRVEEPADVAAFVSYLASRDSDYMTGQSVMIDGGIQFA

SEQ ID NO: 59462 - DNA, 759 bp, Streptomyces coelicolor A3(2)
  CDS (1)..(759): transl_table=11
atgcggcttgcggacaggaccgcgctggtgaccggggcgaccagcaacatcggacgggccatcgcggaggccttcgcggccgagggggcccatgtggtcgtctccgggcgcagcgccgaacggggcagggaggtcgtcgacggcatccgcgccgccggcggccgggccgacttcgtccacgccgacctggacggcagcgcggccgcctcacgggcgctggcccgcgaggcgacccgcgtgctgggcggacgcgtggacgtgctggtcaacaacgccgggatctatccgcccggcaccacgaccgacaccgacgaggagaccttcgaccgggtctacgccgtgaacgtcaaggccccgttcttcctcaccgcggtcctggcacccgccatggtccgggccgggggcgggacggtcatcaacctgggctcctggatcgcgcgcctgggcgtcccggtcggcgcgctctacagctccaccaagggtgccgtggagaccctgacgcgggcgtgggcggcggagttcggggcgcgaggcgtacgggtgaacgccatctcgccgggggtggtgcagacgcccccgcccggcgaggtccatcccgccgaggtcatgatgaggggcacgccggcgggacggatgggcacgcccgaggcgatcgcgagcgcggccgtctacctggccggcgacgagtcctcgttcgtgcacggcaccgtgctcgacgtcgacggcgggcgcaccgcggcggccgtcatcgccgcctga

SEQ ID NO: 59463 - protein, 252 aa, Streptomyces coelicolor A3(2)
MRLADRTALVTGATSNIGRAIAEAFAAEGAHVVVSGRSAERGREVVDGIRAAGGRADFVHADLDGSAAASRALAREATRVLGGRVDVLVNNAGIYPPGTTTDTDEETFDRVYAVNVKAPFFLTAVLAPAMVRAGGGTVINLGSWIARLGVPVGALYSSTKGAVETLTRAWAAEFGARGVRVNAISPGVVQTPPPGEVHPAEVMMRGTPAGRMGTPEAIASAAVYLAGDESSFVHGTVLDVDGGRTAAAVIAA

SEQ ID NO: 59464 - DNA, 801 bp, Streptomyces coelicolor A3(2)
  CDS (1)..(801): transl_table=11
atgacctcgcccagcgtcctccaggccccccacgcctcctcgctcgacctgcacggccgcaccgccctcgtcaccggcgccgccggcggcatcggccgcgcctgcgcactgcggctggccgcggccggggccgaggtcagagcggtcgaccgggacgccgccggtctcgaggcgctcgccggcagctgcggggacctcgccggcagcgtcgagccgcaggtcctcgacctgaccgacctggacgccgccgaacgcgcagcggccggcaccgacgtcctcgtcaacaacgccgggctgcaactggtgcggcctctggaggagttcccgccggacgtcttccacaccgtgctcaccgtgatgctggaggcccccttccggctgatccgcggcgccctgccccacatgtacgggcagggctggggccgcatcgtcaacatctcctccgtccacggtctgcgggcctccgcctacaaggccgcctatgtgtccgccaagcacgggctggagggactgtccaagaccgccgccctcgaaggcgccgcccacggcgtcacctccaactgcgtgaaccccgcctacgtccgcaccccgctggtggagcggcagatcgccgaccaggcccgggcccacgggctccccgaggagcaggtgctctccgacgtactgctgcgcgacagcgccctgcggcggctgatcgaacccgacgaggtcgccgaagcggtggcatacctgtgcggcccgtacacggtaggcctcacgggcacctcactcgtcctggacggcggctggaccgcgcactga

SEQ ID NO: 59465 - protein, 266 aa, Streptomyces coelicolor A3(2)
MTSPSVLQAPHASSLDLHGRTALVTGAAGGIGRACALRLAAAGAEVRAVDRDAAGLEALAGSCGDLAGSVEPQVLDLTDLDAAERAAAGTDVLVNNAGLQLVRPLEEFPPDVFHTVLTVMLEAPFRLIRGALPHMYGQGWGRIVNISSVHGLRASAYKAAYVSAKHGLEGLSKTAALEGAAHGVTSNCVNPAYVRTPLVERQIADQARAHGLPEEQVLSDVLLRDSALRRLIEPDEVAEAVAYLCGPYTVGLTGTSLVLDGGWTAH

SEQ ID NO: 59466 - DNA, 762 bp, Streptomyces coelicolor A3(2)
  CDS (1)..(762): transl_table=11
atgactgaactgcccgagccctccggcaaggtcgcgctcgtcaccggcgcgagccgcggcatcggctacggcgtcgccgaggcactcgtcgcgcgcggcgaccgggtctgcatcaccggccgcaacgaggacgcgctgaaggaggccgtcgaccggctcggccccgaccgggtcatcggcgtcgccggcaaggcgcacgacgaggcccaccaggccgtcgccgtcgagcgcgtgatggaggccttcggccgcgtcgacttcctggtcaacaacgccggtaccaacccggtgttcggcccgatcgccgacctcgacctgaacgtggcgcgcaaggtcttcgagaccaacgtgatctcggcgctcggcttcgcccagcgcacctggcacgcctggcagaaggacaacggcggcgcgatcgtcaacatcgcctccgtcgcgggcctctcaccctcgcccttcatcgccgcgtacggcgtcagcaaggccgcgctgatcaacctcaccgcgcagctggcgcacgagttcgccccccgggtgcgggtcaacgcgatcgccccggcggtcgtgaagaccaagttcgccgccgccctgtacgaggggcgtgaggaggaggccgccgcgggctacccgctgggccggctcggcgtgccctccgacatcgggggcgccgccgagttcctcacctcggagcagtccgcctgggtcacgggtcagacactcgtcgtcgacggcggcatcttcctgaacgccggcgtggcctga

SEQ ID NO: 59467 - protein, 253 aa, Streptomyces coelicolor A3(2)
MTELPEPSGKVALVTGASRGIGYGVAEALVARGDRVCITGRNEDALKEAVDRLGPDRVIGVAGKAHDEAHQAVAVERVMEAFGRVDFLVNNAGTNPVFGPIADLDLNVARKVFETNVISALGFAQRTWHAWQKDNGGAIVNIASVAGLSPSPFIAAYGVSKAALINLTAQLAHEFAPRVRVNAIAPAVVKTKFAAALYEGREEEAAAGYPLGRLGVPSDIGGAAEFLTSEQSAWVTGQTLVVDGGIFLNAGVA

SEQ ID NO: 59468 - DNA, 783 bp, Streptomyces coelicolor A3(2)
  CDS (1)..(783): transl_table=11
gtgagcgaagacatcgtctgccgcaggctcgtcggccgtaccgcggtcgtcaccggggcgggcagcggcatcggactcgccgccacccgcaggctcgcctccgagggcgcccacgtcgtctgtggcgacgtggacgagacccggggcagggccgcggccgaggagaccggcggcatcttcgtccaggccgacgtcaccgaccccgagcaggtcgaggcgctgttcgcggcggcgtacgacacctacggcagcgtcgacgtcgcgttcaacaacgccggcatctcgccgcccgacgacgactccatcctggagacggggctggaggcgtggcagcgcgtccaggaggtcaacctcacctccgtctacctgtgctgcaaggccgccatcccctacatgcgccgccagggccgggggtccatcatcaacaccgcctccttcgtggcccggatgggcgcggccacctcgcagatctcgtataccgcgtccaagggcggcgtcctcgcgatgtcccgggaactgggcgtgcagttcgcgcgggagggcatccgcgtcaacgcgctgtgcccgggaccggtcgacaccccgctcctccgggagctgttcgccaaggacccggagcgggccgcgcgccgcctcgtgcacatcccggtggggcggttcgccgaggccgaggagatcgccgccgccgtcgccttcctggccagcgacgactcctccttcgtcaacgccaccgacttcctggtggacggcggcatctccggggcgtacgtcacaccgctgtag

SEQ ID NO: 59469 - protein, 260 aa, Streptomyces coelicolor A3(2)
MSEDIVCRRLVGRTAVVTGAGSGIGLAATRRLASEGAHVVCGDVDETRGRAAAEETGGIFVQADVTDPEQVEALFAAAYDTYGSVDVAFNNAGISPPDDDSILETGLEAWQRVQEVNLTSVYLCCKAAIPYMRRQGRGSIINTASFVARMGAATSQISYTASKGGVLAMSRELGVQFAREGIRVNALCPGPVDTPLLRELFAKDPERAARRLVHIPVGRFAEAEEIAAAVAFLASDDSSFVNATDFLVDGGISGAYVTPL

SEQ ID NO: 59470 - DNA, 705 bp, Streptomyces coelicolor A3(2)
  CDS (1)..(705): transl_table=11
atgagccgctcggttctcgtcaccggaggaaaccggggcatcggcctcgccatcgcccgcgctttcgccgacgccggcgacaaggtcgcgatcacgtaccgctcgggtgagccgccggagggcttcctggccgtcaagtgcgacatcaccgacaccgagcaggtggagcaggcctacaaggagatcgaggagacgcacggtcccgtcgaggtcctgatcgccaacgccggcgtcaccaaggaccagctcctgatgcgcatgtcggaggaggacttcacctccgtcgtcgaaaccaacctcaccggcaccttccgcgtggtcaagcgtgccaaccgcgccatgctgcgcgccaagaagggccgcgtcgtcctcatctcgtcggtggtcggactgctcggctccgcggggcaggcgaactacgccgcctccaaggccggtctggtcggcttcgcgcgctccctcgcccgtgagctggggtcgcgcaacatcaccttcaacgtcgtcgcgccgggcttcgtcgacaccgacatgaccaaggtgctcaccgacgagcagcgggcgaacatcgtgtcgcaggtgccgctggggcggtacgcgcggcccgaggagatcgccgcgacggtgcggttcctcgcctcggacgacgcctcgtacatcactggagccgtcattcccgttgacggcggactgggaatgggtcactga

SEQ ID NO: 59471 - protein, 234 aa, Streptomyces coelicolor A3(2)
MSRSVLVTGGNRGIGLAIARAFADAGDKVAITYRSGEPPEGFLAVKCDITDTEQVEQAYKEIEETHGPVEVLIANAGVTKDQLLMRMSEEDFTSVVETNLTGTFRVVKRANRAMLRAKKGRVVLISSVVGLLGSAGQANYAASKAGLVGFARSLARELGSRNITFNVVAPGFVDTDMTKVLTDEQRANIVSQVPLGRYARPEEIAATVRFLASDDASYITGAVIPVDGGLGMGH

SEQ ID NO: 59472 - DNA, 768 bp, Streptomyces coelicolor A3(2)
  CDS (1)..(768): transl_table=11
atgaccacccagcgcttcaccggcaaaaccgccctcgtcaccggcgcgggctccggcatcggacgggccgtcgccctcgccctggccgccgagggcgcgcacgtcgtcgtcgccgggcgcgcgaggggaccgctcgacgagacggcggccctggtcgagcaggcgggcggcaaggcactggccgtcaccgcggacgtcacccggcgcgaagacgtggacgccctggtgtccgccgcggtggagcacttcggctccctcgacgtggcggtgaacaacgcgggcgtcttccgcggcggggtacccgtcgcggacctgtccgaggaggactggcacacgcagctcgacatcaacgtcaccggcgtgttcctcgccctgcgcgccgaggtccggcacatgcgcgcccagccgggcggcggcacgatcgtgaacatcgcctccaccttcggcgcacacaagcgcagccccggcgccacggcctacgcggcgaccaaggcggccgtctcggccctcacccggggcgccgccctggaccacatcggggacggggtccgcatcaacgccgtcagccccggcgccacggcgacctccatgtccctgcgaccgggcgagacggaggccgggcgggccgagcggatgcggcaggagacgccgctcggccgggtctcggcggtggcggaggtcgcggcggccgtgctgtacctggcgtccgacgacgcggcgtcggtggtggggaccgacctcgtggtggacggcggccagacggcctga

SEQ ID NO: 59473 - protein, 255 aa, Streptomyces coelicolor A3(2)
MTTQRFTGKTALVTGAGSGIGRAVALALAAEGAHVVVAGRARGPLDETAALVEQAGGKALAVTADVTRREDVDALVSAAVEHFGSLDVAVNNAGVFRGGVPVADLSEEDWHTQLDINVTGVFLALRAEVRHMRAQPGGGTIVNIASTFGAHKRSPGATAYAATKAAVSALTRGAALDHIGDGVRINAVSPGATATSMSLRPGETEAGRAERMRQETPLGRVSAVAEVAAAVLYLASDDAASVVGTDLVVDGGQTA

SEQ ID NO: 59474 - DNA, 765 bp, Streptomyces coelicolor A3(2)
  CDS (1)..(765): transl_table=11
atgcacgacctgaccggcaagaacgtgatcatcaccggcggcgcccggggtctcggcgcggaggccgcgaggcaggcggtcgccgccggggcgcatgtcctgatcaccgacgtgctggacgacgacggcgagaacgccgcccgcgaactcggcgaccgcgcccgcttcctgcaccacgacgtgacctcggaggaggactggagccgggccgccgacttcgccgtcaccgagttcggcgcgctgcacggactggtgaacaacgccgggatctcgaccggtacgccgctggagtcggagtccgtcgaccacttccgcaaggtcctcgacgtcaacctcaccggcgtcttcatcggcatgaagaccgtggtccccgcgctgaaggaggccggcgggggatcgatcgtcaacatctcgtccgcggccggcctgatgggcctcgccctcacggccggctacggcgcctccaagtggggcgtgcgcgggctcacgaagatcggcgccgtggagtggggcaccgcccgcgtccgcgtgaactccgtgcaccccgggatgacgtacaccccgatgaccgcggccgtcggcatcgagcgcggcgaggggaagtacccgaacacgcccatgggccgggtcggcgaggccgacgagatcgccggcgcggtcgtcttcctgctctcggacgccgcgtcctacgtcaccggcgccgaactcgcggtggacggcggctggaccaccggcccgacggtggcgtacgtcatggggcagtga

SEQ ID NO: 59475 - protein, 254 aa, Streptomyces coelicolor A3(2)
MHDLTGKNVIITGGARGLGAEAARQAVAAGAHVLITDVLDDDGENAARELGDRARFLHHDVTSEEDWSRAADFAVTEFGALHGLVNNAGISTGTPLESESVDHFRKVLDVNLTGVFIGMKTVVPALKEAGGGSIVNISSAAGLMGLALTAGYGASKWGVRGLTKIGAVEWGTARVRVNSVHPGMTYTPMTAAVGIERGEGKYPNTPMGRVGEADEIAGAVVFLLSDAASYVTGAELAVDGGWTTGPTVAYVMGQ

SEQ ID NO: 59476 - DNA, 768 bp, Streptomyces coelicolor A3(2); identical to SEQ ID NO: 40405
  CDS (1)..(768): transl_table=11

SEQ ID NO: 59477 - protein, 255 aa, Streptomyces coelicolor A3(2); identical to SEQ ID NO: 40406

SEQ ID NO: 59478 - DNA, 954 bp, Drosophila melanogaster
  CDS (1)..(954)
atgttgcatctgagcaaacaactggtggtcagggcgcccaagatccgtctgaatgccagcgctgtgagtggaagtggtcaaagttcaagtttcgatcaaaacagcaacaattacagccgaaaacttgttggccctaatctcaatcaatgccacaaacgcttgtccagcagtagtcaaagttcgacagccggcacgatgaagcgtttggcaggaaaagtagccgtggtcaccgcctccaccgatggcattggtttcgcgattgccaaaaggctggccgaagatggcgccgcagtggtcatcagcagtcgcaagcaaaagaatgtggactctgctctggcggagctgcgcaaactgaacttgaatgtccacggtctgaagtgccatgtcagcgaacccgaggatcgcaaacagctctttgaggagaccattagcaagtttggcaagctcaacattctggtcagcaatgcagccaccaatcctgcggtcggcggtgtcctcgagtgcgatgagaaggtgtgggacaagatcttcgatgtgaacgtgaagagttcctatctgctggccaaggaggcactgcctctcctgcgccagcaaaagaactccagcatcgttttcgtctcctccattgctggctatgatgcctttgagctactgggagcctattccgtcagcaagaccgcgctgattggcttgaccaaggcagccgccaaggatctggcgcccgagggcattcgcgtcaactgcctggctccaggagtcatcaggacaaagttctcgaaagcactgtacgagaatgagtcggcgaatgaagcggctttgagcaaaatacccatgggtcgtctgggcaccagtgaggagatggctggcgtggtctcctttttggtctccgaggatgcgggctacattaccggagagtccattgtggctggcggtggaatgacagctcgtttgtaa

SEQ ID NO: 59479 - protein, 317 aa, Drosophila melanogaster
MLHLSKQLVVRAPKIRLNASAVSGSGQSSSFDQNSNNYSRKLVGPNLNQCHKRLSSSSQSSTAGTMKRLAGKVAVVTASTDGIGFAIAKRLAEDGAAVVISSRKQKNVDSALAELRKLNLNVHGLKCHVSEPEDRKQLFEETISKFGKLNILVSNAATNPAVGGVLECDEKVWDKIFDVNVKSSYLLAKEALPLLRQQKNSSIVFVSSIAGYDAFELLGAYSVSKTALIGLTKAAAKDLAPEGIRVNCLAPGVIRTKFSKALYENESANEAALSKIPMGRLGTSEEMAGVVSFLVSEDAGYITGESIVAGGGMTARL

SEQ ID NO: 59480 - DNA, 774 bp, Drosophila melanogaster
  CDS (1)..(774)
atgcccagtttcaaggataaagttataatcgtgaccggagccagttcgggaattggagcgggtacttcggtgctcttggctaaactgggaggcctgctcaccatcgtgggcaggaatttggataagctcaacgagaccgcggagcagatagtggcagctggaggagcgccagcactccaggtggcggcggacataaacagcgagtccgacgtccagggcatcgtctccgccacattggccaagcacggtcgcatcgacgtgctggtgaacaacgccggaatcttggagctaggcagcatcgagaacaccagtctggagcagtttgaccgcgttatgaacaccaacgtccggtcgctctaccagctgacccacctggtcacaccggagctaatcaagaccaagggcaacattgtaaacgtgtctagtgtgaacggcatccgttcctttcccggagtcttagcatacaatgtttccaaggctgccgtggatcagttcaccaggtgcgtggctctggagctagctcccaagggtgtgcgtgtgaactccgtgaatcccggcgtaatcatcaccgagctgcagcgtcgtggtggactggaccaggaagcctacgtcaagttcctcgagcacgccaaggtcacccatgccctgggtcgacccggcgaagtcaaggaggtggctgcggccattgcattcctggccagcgacgaggccagcttcagcaccggtatcagcctgcccgtggacggcggtcgccatgccatgtgccccagataa

SEQ ID NO: 59481 - protein, 257 aa, Drosophila melanogaster
MPSFKDKVIIVTGASSGIGAGTSVLLAKLGGLLTIVGRNLDKLNETAEQIVAAGGAPALQVAADINSESDVQGIVSATLAKHGRIDVLVNNAGILELGSIENTSLEQFDRVMNTNVRSLYQLTHLVTPELIKTKGNIVNVSSVNGIRSFPGVLAYNVSKAAVDQFTRCVALELAPKGVRVNSVNPGVIITELQRRGGLDQEAYVKFLEHAKVTHALGRPGEVKEVAAAIAFLASDEASFSTGISLPVDGGRHAMCPR

SEQ ID NO: 59482 - DNA, 774 bp, Drosophila melanogaster
  CDS (1)..(774)
atgtcatccttcaaggacaaagtgattattgttaccggcgccagctccggcatcggagcaagtgccgccgtccatttggcgaaactcggagggctcctggtcatcgtgggtcgcaacgaggagaagctgaaggagacggccgacaacattgtggcggccggaggagcaacgccattggaactgcaggcggacatgaccaaggaggcggaggtgcagcagattgtgggcgccactctggccaagcacggtcgcatcgatgtgctcgttaacaatgcgggcatcctggagacaggctccatcgaagccaccagcctggagcaattcgatcgtctgatgaacaccaatgtgcgttccctgtaccaactaaccatgctggccactccagagctagtcaagaccaagggcaatatcgtaaacgtatccagtgtctgtggactgcgtgcctttcctggtgtcctggcctacaatgtgtctaaggcagcggtggaccagttcacggcctgcatagccctggaactggcccccaaaggagtccgcgtaaacgccgtgaatcccggcgtgattgtgactgacattcacaagcgtggcggcatggacgaggagacctatgccaagttcctcgaacactgcaagataacccacgccttgggccgtcctggcgatgtcaaggaggtggctgccgccattgccttcctggccagcgatcaggccagcttcaccacgggaatcagtctgcccgtcgatggaggtcgtcacgccatgtgcccgcgatag

SEQ ID NO: 59483 - protein, 257 aa, Drosophila melanogaster
MSSFKDKVIIVTGASSGIGASAAVHLAKLGGLLVIVGRNEEKLKETADNIVAAGGATPLELQADMTKEAEVQQIVGATLAKHGRIDVLVNNAGILETGSIEATSLEQFDRLMNTNVRSLYQLTMLATPELVKTKGNIVNVSSVCGLRAFPGVLAYNVSKAAVDQFTACIALELAPKGVRVNAVNPGVIVTDIHKRGGMDEETYAKFLEHCKITHALGRPGDVKEVAAAIAFLASDQASFTTGISLPVDGGRHAMCPR

SEQ ID NO: 59484 - DNA, 795 bp, Drosophila melanogaster
  CDS (1)..(795)
atgggcagcaagggcaaggctggtctggacttctccggcaaagtggtgcttatcacgggcgcagcctccgggatcggggccgccgcggcggagatgttctcgaagctgggtgcctgcctggccctggtggatcgggaggaggagggcctcatatgtgtgatgaaacgctgcatgaagatgggccacgagccgtacggcatagccggagatctgctcaagcctccggagatcgaatgcattgcgcggaagaccacggagcgctacgagggcaagctggatgtgctggtaaatggggctggcatcatgcccacgggaacgctgcagagcacggaactggcctgcttcacccacgtgatggaggccaatgtgcgttctgggttttatctgaccaagttgctgctgccccagttgctgcagtgtaagggcagcattgtcaacgtgtccagcgtctgcggacttcgcgcttttcccaatctggtggcctacaacatgtccaaggcggcggtggaccagtttacccgctcccttgccctggatctgggtccccagggtgttcgggtgaatgcggtcaatccgggtgtgattcgcaccaatctgcaaaaggcggggggcatggacgagcagagctacgccgaatttctggagcactcgaagaagacccacgccctgggccggattggggagccaaaggaggtggcggccgccatttgcttcctggccagcgagctggccagcttcgtgaccggcgtgacccttcctgtggacggtggcaagcaggtcatgtgtccgcgctag

SEQ ID NO: 59485 - protein, 264 aa, Drosophila melanogaster
MGSKGKAGLDFSGKVVLITGAASGIGAAAAEMFSKLGACLALVDREEEGLICVMKRCMKMGHEPYGIAGDLLKPPEIECIARKTTERYEGKLDVLVNGAGIMPTGTLQSTELACFTHVMEANVRSGFYLTKLLLPQLLQCKGSIVNVSSVCGLRAFPNLVAYNMSKAAVDQFTRSLALDLGPQGVRVNAVNPGVIRTNLQKAGGMDEQSYAEFLEHSKKTHALGRIGEPKEVAAAICFLASELASFVTGVTLPVDGGKQVMCPR

SEQ ID NO: 59486 - DNA, 771 bp, Drosophila melanogaster
  CDS (1)..(771)
atgaatttcgcgggcaaagtggtccttattacgggagcaagctccggaatcggagctgcaaccgccattaagtttgccaagtacggcgcctgtctggctctcaatggacgcaatgtggagaacctgaagaaggtagccgctgagtgcagcaaggtgagccaatcacagccggccctggtggtgggcgacattgccaaggaggcggacacccagaggatttggtcggaaaccctgcagcagtacggcaaattggatgtgctggtcaacaatgccggaatcatcgagacgggcaccatcgagacgactagcctggagcagtacgaccgcgtcatgaacaccaacctgagggcaatctaccaccttactatgctggccacccccgagctggtcaagaccaagggcaacatcgtgaacgtgtccagtgtcaatgggattcgctccttccctggcgttctggcctacaacatatccaaaatgggagtggatcagttcacccgctgtgtggcgttggagctggctgccaagggtgtgcgcgtgaactgcgtgaatcccggcgtgacggtcaccaatctgcatgcccgcggcggcatggatgcggagacgtacaaaaagttcctggaacactccaagaccacccatgccttgggtcgtcctggagatgtcaaggaggtggctgcggccattgccttcctggccagcgatgaggccagcttcagcactggagtcagcctgccggtggacggcggtcgccatgccatgtgcccacgctaa

SEQ ID NO: 59487 - protein, 256 aa, Drosophila melanogaster
MNFAGKVVLITGASSGIGAATAIKFAKYGACLALNGRNVENLKKVAAECSKVSQSQPALVVGDIAKEADTQRIWSETLQQYGKLDVLVNNAGIIETGTIETTSLEQYDRVMNTNLRAIYHLTMLATPELVKTKGNIVNVSSVNGIRSFPGVLAYNISKMGVDQFTRCVALELAAKGVRVNCVNPGVTVTNLHARGGMDAETYKKFLEHSKTTHALGRPGDVKEVAAAIAFLASDEASFSTGVSLPVDGGRHAMCPR

SEQ ID NO: 59488 - DNA, 762 bp, Pseudomonas putida KT2440
  CDS (1)..(762): transl_table=11
atgagcatgaccttttctggccaggtagccctggtgaccggcgcgggtgccggcatcggccgggcaaccgccctggcgttcgcccacgagggcatgaaagtggtggtggcggacctcgacccggtcggcggcgaggccaccgtggcgcagatccacgcggcaggcggcgaagcgctgttcattgcctgcgacgtgacccgcgacgccgaggtgcgccagttgcatgagcgcctgatggccgcctacggccggctggactacgccttcaacaacgccgggatcgagatcgagcaacaccgcctggccgaaggcagcgaagcggagttcgatgccatcatgggcgtgaacgtgaagggcgtgtggttgtgcatgaagtatcagttgcccttgttgctggcccaaggcggtggggccatcgtcaataccgcgtcggtggcggggctaggggcggcgccaaagatgagcatctacagcgccagcaagcatgcggtcatcggtctgaccaagtcggcggccatcgagtacgccaagaagggcatccgcgtgaacgccgtgtgcccggccgtgatcgacaccgacatgttccgccgcgcttaccaggccgacccgcgcaaggccgagttcgccgcagccatgcacccggtagggcgcattggcaaggtcgaggaaatcgccagcgccgtgctgtatctgtgcagtgacggcgcggcgtttaccaccgggcattgcctgacggtggatggtggggctacggcgatctga

SEQ ID NO: 59489 - protein, 253 aa, Pseudomonas putida KT2440
MSMTFSGQVALVTGAGAGIGRATALAFAHEGMKVVVADLDPVGGEATVAQIHAAGGEALFIACDVTRDAEVRQLHERLMAAYGRLDYAFNNAGIEIEQHRLAEGSEAEFDAIMGVNVKGVWLCMKYQLPLLLAQGGGAIVNTASVAGLGAAPKMSIYSASKHAVIGLTKSAAIEYAKKGIRVNAVCPAVIDTDMFRRAYQADPRKAEFAAAMHPVGRIGKVEEIASAVLYLCSDGAAFTTGHCLTVDGGATAI

SEQ ID NO: 59490 - DNA, 774 bp, Pseudomonas putida KT2440
  CDS (1)..(774): transl_table=11
gtgatcgaaatcagcggcagcaccccgggccacaatggccgggtagccttggtcacgggcgccgcccgcggcatcggtctgggcattgccgcatggctgatctgcgaaggctggcaagtggtgctgagtgatctggaccgccagcgtggtaccaaagtggccaaggcgttgggcgacaacgcctggttcatcaccatggacgttgccgacgaggcccaggtcagtgccggcgtgtccgaagtgctcgggcagttcggccggctggacgcgctggtgtgcaatgcggccattgccaacccgcacaaccagacgctggaaagcctgagcctggcacaatggaaccgggtgctgggggtcaacctcagcggccccatgctgctggccaagcattgtgcgccgtacctgcgtgcgcacaatggggcgatcgtcaacctgacctctacccgtgctcggcagtccgaacccgacaccgaggcttacgcggcaagcaagggcggcctggtggctttgacccatgccctggccatgagcctgggcccggagattcgcgtcaatgcggtgagcccgggctggatcgatgcccgtgatccgtcgcagcgccgtgccgagccgttgagcgaagctgaccatgcccagcatccaacgggcagggtagggaccgtggaagatgtcgcggccatggttgcctggttgctgtcacgccaggcggcatttgtcaccggccaggagtttgtggtcgatggcggcatgacccgcaagatgatctatacctga

SEQ ID NO: 59491 - protein, 257 aa, Pseudomonas putida KT2440
MIEISGSTPGHNGRVALVTGAARGIGLGIAAWLICEGWQVVLSDLDRQRGTKVAKALGDNAWFITMDVADEAQVSAGVSEVLGQFGRLDALVCNAAIANPHNQTLESLSLAQWNRVLGVNLSGPMLLAKHCAPYLRAHNGAIVNLTSTRARQSEPDTEAYAASKGGLVALTHALAMSLGPEIRVNAVSPGWIDARDPSQRRAEPLSEADHAQHPTGRVGTVEDVAAMVAWLLSRQAAFVTGQEFVVDGGMTRKMIYT

SEQ ID NO: 59492 - DNA, 765 bp, Pseudomonas putida KT2440
  CDS (1)..(765): transl_table=11
atgagccagttacgcacgattgtgattaccggcgcggccaatggtattggccgcgccgtcgcggaaagttttgcagcccaggccgagcaccttttgatcttgcttgatcgggatctggcaaccttgcaggggtgggtcaccgagggcgaatttgccgctcgtatcgaaacccatcaagcgaacatcgccgatctcgccagcctgcaacttctgttcaagggcctggccgaccgggtcggctttgtcgatgtgctggtcaacagcgccggggtctgcgacgagaacgaacccgaagacctcgacaactggcacaaggtcatttcgatcaacctcaacggcaccttttacgtcacctcgttgtgcctgccactgatggcggatggtgggcggatcgtcaacatgtcgtcgatcctcggccgagcgggcaaggtccgcaacaccgcttactgcgcctccaagcacggcatcatcggcatgaccaaagccttggcgctggacctggcgccacggcgaatcaccgtcaatgccatcctgcccgcctggatcgacacaccgatgctgcaaggcgaattggcggctcaagcgcgcatcgccgggatcacccatgagcagatcctgcgcaatgccaagaagaagttgcccctgcggcgcttcattcagggcgacgaagtggcggccatggttcgttatctggcgagcccgcaggcgagtggtgtcacggcgcaaagcctgatgatcgacggcggtgccgggttgggaatgtag

SEQ ID NO: 59493 - protein, 254 aa, Pseudomonas putida KT2440
MSQLRTIVITGAANGIGRAVAESFAAQAEHLLILLDRDLATLQGWVTEGEFAARIETHQANIADLASLQLLFKGLADRVGFVDVLVNSAGVCDENEPEDLDNWHKVISINLNGTFYVTSLCLPLMADGGRIVNMSSILGRAGKVRNTAYCASKHGIIGMTKALALDLAPRRITVNAILPAWIDTPMLQGELAAQARIAGITHEQILRNAKKKLPLRRFIQGDEVAAMVRYLASPQASGVTAQSLMIDGGAGLGM

SEQ ID NO: 59494 - DNA, 747 bp, Pseudomonas putida KT2440
  CDS (1)..(747): transl_table=11
atggagaacgtcattgtcatcaccggcggcagccgcggtatcggcgccgccactgcgctgctggccgcccgccagggctaccgcatctgcatcaattatcacgccgatgaccaggccgccgaagccatcctcagccaggtccgcgccctgggcgccgaagccatcgcggtgcgcgccgacgtcagcgtcgaagatgaaatcatccagctgttcctgcgcgtcgacgacgagctcggccccgtcaccgcactggtcaacaacgccggcaccatcggccagcagagcagggtcgaggacatgtccgagttccggctactgaacgtcatgaagaccaacgtcgtcggccccatgctctgcgccaagcacgccctgctgcgcatggcgcgccggcatggcgggcaaggcggggccatcgtcaacgtatcatcggtagccgcacgcctgggttcgcccaacgaatatgtcgactatgccgcctccaagggcgcgctcgacaccttcaccatcggcctggccaaagaagtggcaggcgagggcgtgcgcgtcaatggcgtacgaccaggctatatccataccggtttccatgcgctttcgggtgacccggaccgcgtcagcaagctcgaacctggcttgcccatgggccgaggggggcgtcccgaggaagtggccgaggccatcctctggttgctttcggacaaagcctcctatgccaccggcagcctcatcgacctgggcggcgggcgctga

SEQ ID NO: 59495 - protein, 248 aa, Pseudomonas putida KT2440
MENVIVITGGSRGIGAATALLAARQGYRICINYHADDQAAEAILSQVRALGAEAIAVRADVSVEDEIIQLFLRVDDELGPVTALVNNAGTIGQQSRVEDMSEFRLLNVMKTNVVGPMLCAKHALLRMARRHGGQGGAIVNVSSVAARLGSPNEYVDYAASKGALDTFTIGLAKEVAGEGVRVNGVRPGYIHTGFHALSGDPDRVSKLEPGLPMGRGGRPEEVAEAILWLLSDKASYATGSLIDLGGGR

SEQ ID NO: 59496 - DNA, 738 bp, Gloeobacter violaceus PCC 7421
  CDS (1)..(738): transl_table=11
gtgccgacgaccgcagtgatcaccggcgccaacggcggtatcggacgggcgctctgctcggtcttcaaggccgccggccaccgggtggtggctctcgatgtgcaggagggtgagtgcgagtgcgatcacttcgtgccggtggatttgcaaaaactatgtctggaggagagctaccgggatgactttctggaccgattgcgcgccgagttgccccctgaggggctccacgccctgatcaacaacgccgctgtccaacggctcggtgcaaccgggcaaatcaccctggccgattggcgtgagaccctcgatgtcaatctgacggcaccgtttttgctcatccagggattgcttggcgagttggagcgggcgggcggctcggtggtcaatatcgccagcgtgcacgccaaagcgaccaaacccggcttcgtcagctacgccaccagcaaagccgccctagtggggctcacccacagcctcgcagtcgatcttggtgcgcgcgtgcgcgtcaacgccgtctgcccggcagcagtggctacaccgatgctcaaagccggcttcgagggcaaagaccagcagtggcgggatttggcccgcatgcacccgctgggccgcattgccgaacccgaagaagtagcccgtgcggcgttgtttttagcctcgccgcaggcagcatttgtgagcggaacagccctcgacctcgacggcggcatcagccaccgcctgcacgacccggtttaa

SEQ ID NO: 59497 - protein, 245 aa, Gloeobacter violaceus PCC 7421
MPTTAVITGANGGIGRALCSVFKAAGHRVVALDVQEGECECDHFVPVDLQKLCLEESYRDDFLDRLRAELPPEGLHALINNAAVQRLGATGQITLADWRETLDVNLTAPFLLIQGLLGELERAGGSVVNIASVHAKATKPGFVSYATSKAALVGLTHSLAVDLGARVRVNAVCPAAVATPMLKAGFEGKDQQWRDLARMHPLGRIAEPEEVARAALFLASPQAAFVSGTALDLDGGISHRLHDPV

SEQ ID NO: 59498 - DNA, 753 bp, Strongylocentrotus purpuratus
  CDS (1)..(753)
atggaaggaaaagttgctctcattacaggatccagttcgggtataggtgctggtatcgcagagcgtttcgctgagattggttgccgccttgctctcactggaagagacgcagaaaaactgaaagatgtcgggaaatcatgctgtgaacgtgggctcagcgaaaaagagatcttagttattgctgccgatttgactgaagatgaagacttggaaaggatattttcaaagacaatagaaaagtttggacgcctcgatatccttataaataacgcaggtcgtccagctaaaggaagattccatgacctgcagatgacattctttgatgacgtcatgaggctgaatctgaggtcagctatttacctttccaagctggccatcccatatttgaaagaatcaaaaggctgcgtcgtgaacatgtcgagtgttgcttccaaaactacatgcgattacaaccctacatattcaatatcgaaggtcgctcttgatcagttcacaaaaagccttgcagttgaactgggaccgtacggcgtaagagttaattctctcaatcctggcgtcatcttgactcctctctatcgaaacctcgggaagagcgacgctcaagtgatcacgtggtccaagtcaatgcatcccattggtcgccacgggaccgtggatgaggttgtcaaggcaaccgaatatttggtgtcggatgcttcaagatgtgtgactggtacgctgctttctattgatggaggacgctttctaatgtga

SEQ ID NO: 59499 - protein, 250 aa, Strongylocentrotus purpuratus
MEGKVALITGSSSGIGAGIAERFAEIGCRLALTGRDAEKLKDVGKSCCERGLSEKEILVIAADLTEDEDLERIFSKTIEKFGRLDILINNAGRPAKGRFHDLQMTFFDDVMRLNLRSAIYLSKLAIPYLKESKGCVVNMSSVASKTTCDYNPTYSISKVALDQFTKSLAVELGPYGVRVNSLNPGVILTPLYRNLGKSDAQVITWSKSMHPIGRHGTVDEVVKATEYLVSDASRCVTGTLLSIDGGRFLM

SEQ ID NO: 59500 - DNA, 774 bp, Strongylocentrotus purpuratus
  CDS (1)..(774)
atgtttttgtacatccaaacaggagccagcgcagggattggagcagagactgcccgccattttgcttccctaggatgtcggttggctttgacgggacggaacatggatgctttacaagcagtcaccgatgaatgtgttagcagaggacttgatagagatcagattctaatgatccaggctagtttggaattggaagctgatgtgaagaaaactgcggaacaaacaatccagaaattcaaccaagtggatgtactggttaacaatgcaggaatcgttatcccagattcaatcgagaccgttactttagaatcttttgataagacctttgcagtgaatgttagagcaccccttcagctcactcaactcctgacaccacacttaatcaaaaccaaaggcactattgtgaatgtatccagtgtaaatggtgtcagagctatgcgtggagtattgacatactgtatgtctaagacagcattggaccacatgacaagatgtgttgctgaagaattggcacctcatggaatcagagtcaatgcagtaaaccctggtgttatccaaactcagattcttcagcgaggaggtatgtccgatgagcgctacaaacagttcctggagcattccaagacgactcacgccatgcgccggactggtacggtggatgaggtatccaagctcattgcgttcctggcatccagcgactcgtccttcaccacaggagaaaccgtcaccatagatggagggcgccatctcttgtgcaaccctgttcagaattag

SEQ ID NO: 59501 - protein, 257 aa, Strongylocentrotus purpuratus
MFLYIQTGASAGIGAETARHFASLGCRLALTGRNMDALQAVTDECVSRGLDRDQILMIQASLELEADVKKTAEQTIQKFNQVDVLVNNAGIVIPDSIETVTLESFDKTFAVNVRAPLQLTQLLTPHLIKTKGTIVNVSSVNGVRAMRGVLTYCMSKTALDHMTRCVAEELAPHGIRVNAVNPGVIQTQILQRGGMSDERYKQFLEHSKTTHAMRRTGTVDEVSKLIAFLASSDSSFTTGETVTIDGGRHLLCNPVQN

SEQ ID NO: 59502 - DNA, 735 bp, Nasonia vitripennis
  CDS (1)..(735)
atgaacatcacttttgaaggaaagcggattctcgttaccggtgctggtcaaggcatcggtagagaaacagctctgcgtctatccaaatttggcggcacagttatagccctctcgaaaaccaaagccaatctcgactccctggtaaaggaagatccgaaaatccaaactgtctgcgctgacctgcaggactggaataaagcgcgagcagctgttaagagcgttttgcccatagatttgcttgtcaataatgccgggattgcgatactggatccttttctctctctcaaacccgaggactttgatcaagtcttcaatgtaaatttaaaatcgatcatcaacgtctctcaagttgtggcggagaatatgatccaaagaaaagttgctggaagcatcgtcaatctatcgtcggtggccagtttggtagctgtcaaagatcacgctatttattgctcggcgaaagcagctttggacatgctgacaaaggtcatggctttggaactgggaccacataacattcgcgtcaacaccgtcaacccgacccttgtcatgacggccatgggcaaggccaattggagcgacccggcaaaggcggccacgttgcgagaaaaaattccactggaccgttttgcagagcctcaagaagtggtggattccatttgcttccttcttagtgacaagagcgcaatgaccaccggtgttgggcttacgatcgacggaggatacaccactcattaa

SEQ ID NO: 59503 - protein, 244 aa, Nasonia vitripennis
MNITFEGKRILVTGAGQGIGRETALRLSKFGGTVIALSKTKANLDSLVKEDPKIQTVCADLQDWNKARAAVKSVLPIDLLVNNAGIAILDPFLSLKPEDFDQVFNVNLKSIINVSQVVAENMIQRKVAGSIVNLSSVASLVAVKDHAIYCSAKAALDMLTKVMALELGPHNIRVNTVNPTLVMTAMGKANWSDPAKAATLREKIPLDRFAEPQEVVDSICFLLSDKSAMTTGVGLTIDGGYTTH

SEQ ID NO: 59504 - DNA, 759 bp, Nasonia vitripennis; identical to SEQ ID NO: 40423
  CDS (1)..(759)

SEQ ID NO: 59505 - protein, 252 aa, Nasonia vitripennis; identical to SEQ ID NO: 40424

SEQ ID NO: 59506 - DNA, 795 bp, Anopheles gambiae str. PEST
  CDS (1)..(795)
atggagcgcaatctttgcagcggttccgccattgcagccaagcgtctgacgggcaaagtggccgtcgtaaccgcctctacagagggtatcggttacgccatcgcggaacggttgggccaggaaggagccaaagtggttgtcagcagccgaaagcagcaaaatgttgaccgcgccgtgaacgacctgcgaaccgccgggctcgaggtgtccgggatcaagtgtcacgttgccaacgccaccgaccggaaggcgctgttcgagcatgcggcccaaaagttcggtggcatcgacattctcgtgtcgaacgcggccgtcaatccggaggtgggcggtgtgctggaatgtagtgaatcggcctgggataagattttcgacgtgaacgtaaagtgttcgtatctgctggccaaggaagtgttgccgttcatacgggagcgcaagggtggcagcattgtgttcatttcgtccattgccggctttcaaccgttctcgctgttgggcgcatactccgtcagcaagacggcactgttcggattgacgaaggcagccagccaagagttggcggcggagaacatccgcgtgaactgcattgctccgggtgtggtgcagacgaaatttgccggagcgctacaagaatccgatgccgccaaagaggaaacactgtcccgaattccgatgggacggattgcacaaccgaaggaaatttccggcgtgtgtgcgttcctcgtttcggacgacgcgagctacattaccggtgaaacgattgtagcttccggaggcatggcttcccggttataa

SEQ ID NO: 59507 - protein, 264 aa, Anopheles gambiae str. PEST
MERNLCSGSAIAAKRLTGKVAVVTASTEGIGYAIAERLGQEGAKVVVSSRKQQNVDRAVNDLRTAGLEVSGIKCHVANATDRKALFEHAAQKFGGIDILVSNAAVNPEVGGVLECSESAWDKIFDVNVKCSYLLAKEVLPFIRERKGGSIVFISSIAGFQPFSLLGAYSVSKTALFGLTKAASQELAAENIRVNCIAPGVVQTKFAGALQESDAAKEETLSRIPMGRIAQPKEISGVCAFLVSDDASYITGETIVASGGMASRL

SEQ ID NO: 59508 - DNA, 843 bp, Magnaporthe grisea 70-15
  CDS (1)..(843)
atggctggtcgtctcgctggcaagaatgccgtcataaccggtgccgcaggtggcattggactcgagacgtccatcttgttcgccaaggagggtgcccatgtcctgatggccgatatctctctcgacgccctggctaaggcacttgacaaggttaagtcgctggtgcctggcgctcaggttgagacagtgaaatgcgacgtatccaaagaagccgaggtgaaggccatgattgagcacgtcgatgcgtggggcggcctggacatcatcttcaacaacgccggcatcatgcacgccgacgacgccgacgcggtcgacacacccgagaacatctggaacctcacacaggacatcaatgtcaagggcgtgtggtacggcagcaaacatgctgttcttgcgctccgccgccacaagaagacaaagggctccatcatcaacacggcctcagtagtggcgcttgtcggttccgcgaccccgcagctcgcctacacggcttccaagggcgccgtcctggccatgacgcgcgagttggccatcgtgcacgcccgcgagggcttccgcttcaacaacctctgcccggcgccgctcaacacgccacttctgcaggattggctcggagacgaccaggccaagcgccacaggcgtgaggtgcacttcccgacaggcaggttcggcgaggctgtcgagcaggctcaggccgttctgttcctggctagcgacgagagcagctttgtcaatggccacgactttgtcgtggacggcggcatgaccaaggcctacgtcacccctgagggtccggctatggcggccccgcagaacaatgccagcaagtcgtcgcttgcgtga

SEQ ID NO: 59509 - protein, 280 aa, Magnaporthe grisea 70-15
MAGRLAGKNAVITGAAGGIGLETSILFAKEGAHVLMADISLDALAKALDKVKSLVPGAQVETVKCDVSKEAEVKAMIEHVDAWGGLDIIFNNAGIMHADDADAVDTPENIWNLTQDINVKGVWYGSKHAVLALRRHKKTKGSIINTASVVALVGSATPQLAYTASKGAVLAMTRELAIVHAREGFRFNNLCPAPLNTPLLQDWLGDDQAKRHRREVHFPTGRFGEAVEQAQAVLFLASDESSFVNGHDFVVDGGMTKAYVTPEGPAMAAPQNNASKSSLA

SEQ ID NO: 59510 - DNA, 807 bp, Gibberella zeae PH-1
  CDS (1)..(807)
atgacttcctctcacgctatctatcccagcctgcggggcaagacagtgcttattacgggtggcgcagaaggtataggttctgcgactgtggaactcttttctctccagggctgtcaagtcatttttatcgacattgctgaagattcggcccagaaaacaattgatcgagttatttctcgtcagaaagatagcaattctccgatcaaaccaccaatcttttacaagtgcagcgttgcagacctacctgaattgcaggaaaccgtcaagagcatccaggataaacatggcgcggtacatgtactggtgaataatgcagcggcggctggaaacagagctagacttaccacggagaatgtcacctcagacgactgggactttaacgtcaataccaaccttcgtcatgttttctttcttacccaagccgtgataccggcaatgaaggaggcaggaagcgggagtatcatcaatcttggttccatcacttggcgtatccccgccgcaggtactccagtctacggtgcttgcaaagccgctatcatgggtctcacgcgtacacagagcaaagaatatggcaaatacaacatccgcatcaacagcgtcatgcctggagccattgcgacgcaacgacagagagacgaagttcttacgcccgagtatcgtgaggaggtgatgcggggccagagcttacagcgggatcttgagcccgaagaggtggccaaggtgattgtgtttttgggtagtgatgaagccagcggcgttacggggagttcttatgtagttgatggcggctggtgcagcgatccatga

SEQ ID NO: 59511 - protein, 268 aa, Gibberella zeae PH-1
MTSSHAIYPSLRGKTVLITGGAEGIGSATVELFSLQGCQVIFIDIAEDSAQKTIDRVISRQKDSNSPIKPPIFYKCSVADLPELQETVKSIQDKHGAVHVLVNNAAAAGNRARLTTENVTSDDWDFNVNTNLRHVFFLTQAVIPAMKEAGSGSIINLGSITWRIPAAGTPVYGACKAAIMGLTRTQSKEYGKYNIRINSVMPGAIATQRQRDEVLTPEYREEVMRGQSLQRDLEPEEVAKVIVFLGSDEASGVTGSSYVVDGGWCSDP

SEQ ID NO: 59512 - DNA, 840 bp, Aspergillus nidulans FGSC A4
  CDS (1)..(840)
atggctaccccccgaggccgtctccaaggcaagaatgccatcatcaccggtgccgcaggcggtattggactcgaaactagcatcttattcgcccgcgaaggcgccaatgtcctgatggcagacatctccgcgtcggctctcgaaaaagccctcgcgaaggtcagagagctcgtccctgacgcgccccgtgttgagaccatcaagtgcgacgtctccaaggaatccgaggttcaggctatggtcgagtcccaggactcctggggcggcacagatgtgatcttcaacaatgccggaatcatgcacgcggacgacgccgatgccatcgacactcctgagaaaatttgggacttgacgcagaacatcaacgtcaagggcgtgtggtttggatgtaaacatgcggtactgagcatgcggagacacaagaagagcaagggcagtatcatcaacacggcgagtgttgttgcgctggtcgggagtgccacgccgcagctggcgtacacggcgtccaagggtgctgtgctggcgctgacgagggagctggcgatcgtgcatgctcgggagggaatccggttcaatgcactgtgcccggcaccattgaacactccactcttgcaagactggctgggtgacgaccaggccaagcgtcaccgccgcgaagtgcatttccccatgggacggttcggagaggccattgagcaggctcatgcggtggtcttcctggccagtgacgagagcagctttgtcaatggagccgactttgttgttgacggtggcatgagcaaggcgtacgttacccctgagggaccggctcctccggctcctaagaaccaggctcaatag

SEQ ID NO: 59513 - protein, 279 aa, Aspergillus nidulans FGSC A4
MATPRGRLQGKNAIITGAAGGIGLETSILFAREGANVLMADISASALEKALAKVRELVPDAPRVETIKCDVSKESEVQAMVESQDSWGGTDVIFNNAGIMHADDADAIDTPEKIWDLTQNINVKGVWFGCKHAVLSMRRHKKSKGSIINTASVVALVGSATPQLAYTASKGAVLALTRELAIVHAREGIRFNALCPAPLNTPLLQDWLGDDQAKRHRREVHFPMGRFGEAIEQAHAVVFLASDESSFVNGADFVVDGGMSKAYVTPEGPAPPAPKNQAQ

SEQ ID NO: 59514 - DNA, 810 bp, Strongylocentrotus purpuratus
  CDS (1)..(810)
atgggggaatttgtcggtaaagtggtcctaatcactggagcgagctcaggaattggagctgagacggctgtccactttgctgcagaaggagcaggtcttgctttagtgggtcgtgatgaagggagactagagaagactgcacaggattgcatggcaaaaggcctagcaaaggataaggttcttacaatcaaggcagacatgtgtgtagaagaagatgtgaagaggattgtggagtcaactatcacatactttggtagactggatgtcttggtaaacaatgcaggacaagccaaacttgacctcctcagaagtgaaactgttatggagaactttgacgatttgctcaagcttaatgtaagatctgttgtccaactcaccaacctagcagtacctcatcttattacttctaaaggctccgtggtgaatgtatccagcctagcaggaaaaagagtggcccacatgtcattttcgtacaatattttaagggctgccactgaccaattcacaagatgttgtgctgttgatttggctcccaaaggtgtccgagttaatgctgtgaacccaggagcaatcaagacgccccttttgacaggatttggaatacctgcagaacaaatcgaagaggtatgcgcaaagatgcatccattgggcaggataggacaaccaacagatgtagcgtcggccatcaagtttcttgcatccaacgcagcgtcctttatcactggagaaacactgtcaatagatggcggcagacatgcttactgtgcacgagagttggtcccatacgtacgaatggacgtgctgttttga

SEQ ID NO: 59515 - protein, 269 aa, Strongylocentrotus purpuratus
MGEFVGKVVLITGASSGIGAETAVHFAAEGAGLALVGRDEGRLEKTAQDCMAKGLAKDKVLTIKADMCVEEDVKRIVESTITYFGRLDVLVNNAGQAKLDLLRSETVMENFDDLLKLNVRSVVQLTNLAVPHLITSKGSVVNVSSLAGKRVAHMSFSYNILRAATDQFTRCCAVDLAPKGVRVNAVNPGAIKTPLLTGFGIPAEQIEEVCAKMHPLGRIGQPTDVASAIKFLASNAASFITGETLSIDGGRHAYCARELVPYVRMDVLF

SEQ ID NO: 59516 - DNA, 744 bp, Strongylocentrotus purpuratus
  CDS (1)..(744)
atgacaggagcgagttcaggaattggagctgagacagctctccactttgctgcagaaggagcaggtcttgctttagtgggtcgtgatgaagggagactagagaagactgcacaggattgcctggctaaaggccttgcaaaggataaggttctaacaatcaaggcagacatgtgtgtggaagacgatgtgaagaggatcatggaatcaactatcacacactttggtaaactggatgtcttggtcaataatgccggaggagcgagtccatgttccctgacaagtgaaaacttaatggagaattatgatcgggatgtgaggctcaatgtaaggtctgtcatccaacttaccaacctagcgactcctcatttgatagcatccaaaggaaatgtggtgaatgtttccagtgtttgtggaataagagtgatggccaatatgttaccttacaacatggcaaaggctgccgttgaccagctcactagatgcgctgctttagaattggcttccaagggagttcgagtgaatgcagtaaaccctggtactatcatgacccctattcagttcatgtatggccattcagacgagcaaattcgtgagcgagcaagtaagactcacccaatgggcagagcaggagaaacgaacgaggtggcacctgccatcaagttccttgcatccaacgcagcatccttcatcactggagaaaccctgtctatagatggcggcagacacgtcgcatgtgcacgataa

SEQ ID NO: 59517 - protein, 247 aa, Strongylocentrotus purpuratus
MTGASSGIGAETALHFAAEGAGLALVGRDEGRLEKTAQDCLAKGLAKDKVLTIKADMCVEDDVKRIMESTITHFGKLDVLVNNAGGASPCSLTSENLMENYDRDVRLNVRSVIQLTNLATPHLIASKGNVVNVSSVCGIRVMANMLPYNMAKAAVDQLTRCAALELASKGVRVNAVNPGTIMTPIQFMYGHSDEQIRERASKTHPMGRAGETNEVAPAIKFLASNAASFITGETLSIDGGRHVACAR

SEQ ID NO: 59518 - DNA, 753 bp, Strongylocentrotus purpuratus
  CDS (1)..(753)
atggaaggaaaagttgctctcattacaggatccagttcgggtataggtgctggtatcgcagagcgtttcgctgagcttggctgccgtcttgctctcaccggaagggacgcagaaaaactgaaagatgtcgggaaatcatgctgtgaacgtgggctcagcgaaaaagagattttacttattgctgccgatttgactgaagatgaagacttagaaaggatattttcaaagacaatagaaaagtttggacgccttgatatccttataaataacgcaggtcgtccagctaaaggaagatttcatgacctgcagatgaccttctttgatgacgtcatgaggctgaatctgagatcagctatttacctttccaagctggccatcccatatttgaaagaatcaaaaggctgcgtcgtgaacatgtcgagtgttgcttccaaaactacatgcgactacaaccctacatattcaatatcgaaggtcgctcttgatcagttcacaaaaagccttgcagttgaactgggaccctacggcgtcagagttaattctctcaatcctggcgtcatcttaactcctctctaccgaaacctcgggaagagcgacgcccaagtgatcacatggtccaagtcaatgcatcccattggtcgccacgggactgtggatgaggtcgtcaaggcaaccgaatatttggtgtcggatacttcaagatgtgtgactggtacgctgctttctattgacggaggacgctttctaatgtga

SEQ ID NO: 59519 - protein, 250 aa, Strongylocentrotus purpuratus
MEGKVALITGSSSGIGAGIAERFAELGCRLALTGRDAEKLKDVGKSCCERGLSEKEILLIAADLTEDEDLERIFSKTIEKFGRLDILINNAGRPAKGRFHDLQMTFFDDVMRLNLRSAIYLSKLAIPYLKESKGCVVNMSSVASKTTCDYNPTYSISKVALDQFTKSLAVELGPYGVRVNSLNPGVILTPLYRNLGKSDAQVITWSKSMHPIGRHGTVDEVVKATEYLVSDTSRCVTGTLLSIDGGRFLM

SEQ ID NO: 59520 - DNA, 801 bp, Tribolium castaneum
  CDS (1)..(801)
atgcccccaacaaaaatcctcacacttttcaggacaatgagttcggcttcctcacagcgtctttgtggcagaacagcaatagttacggcatcgaccgaaggaatcggttttgcgattgcccaacgttttgcacaagaaggagcaaaggtgataatcagcagccgcaaggaaaagaatgtcgaagcggcggtttctaaattaaaatcggaaggtttggacgtttgtgggctcgtatgtcatgtctccaattcagaacaccgtaaaaaattgttcgaaaaggcaacagggggtttagatattttggtctccaatgctgctgtaaacccctcggcaacggcggtcttggactgtgacgaaaaagcgtgggacaaaattttcgatgtaaacgtgaaagctgctttcatgttagcgaaagaagctttaccgttacttcgcaaaagtagctgcggtcgaattattttcatctcgtccattggtggtttccagcctttggatttgattggggcttactgtgtgagcaagtgtgcactctttggactcactaaaacagcagcagcccagttagctaaagaaaatatcaccgttaattgcatagccccgggtttaataaaaaccaagttttcgcactttctggtcgagaaagaggaagacaaaaagaaagttttatcaatgattccgatgggaagaatgggaatgccacatgaaatagctggcgcagctgcatttttagcatcagacgacgccagttacatgactggggaaacaattgtagtagcaggtggcatgctatcaagattataa

SEQ ID NO: 59521 - protein, 266 aa, Tribolium castaneum
MPPTKILTLFRTMSSASSQRLCGRTAIVTASTEGIGFAIAQRFAQEGAKVIISSRKEKNVEAAVSKLKSEGLDVCGLVCHVSNSEHRKKLFEKATGGLDILVSNAAVNPSATAVLDCDEKAWDKIFDVNVKAAFMLAKEALPLLRKSSCGRIIFISSIGGFQPLDLIGAYCVSKCALFGLTKTAAAQLAKENITVNCIAPGLIKTKFSHFLVEKEEDKKKVLSMIPMGRMGMPHEIAGAAAFLASDDASYMTGETIVVAGGMLSRL

SEQ ID NO: 59522 - DNA, 777 bp, Tribolium castaneum
  CDS (1)..(777)
atgagtggattcgctgggcctataacccgtctagctgggaaaatcgcaattgtgacagcttcaaccgatggtattggctttgccattgcccagcgtttggcccgagagggggccaaagtgatcgtcagcagccgcaagcaaaacaacgttgacgaagctgtctcacggctcaagtcggagggcttggacgtcactggcttaatgtgtcatgtctcgaaagccgaccaccgtaagaagctgttcgatactgcgaaaaaacttggagggcttgatattctcgtgtccaatgctgcggttaatccatcggtggccccagttttggattgcgatgaatcgtcctgggataaaatatttgaggtcaatgtgaaagcggcgtttttgttggcccaagaggccttgcctttgttgcgtgaaagaccgtttgggaggattatttttgttgcgtccattgctgggttccatccgtttgaattactaggggcttattcggtcagcaagaccgctctgtttgggctcactaaagcggcagcttcgcaattagcaagggagaatattacagttaattgtattgctcccggaataatccaaaccaaattttcaagcgctttgactgaaaccgaagccgcacgagaagaagccttgtctaggatcccaatgaacaggttgggggtcccccacgacatcagtggagccgctgcttacctggcatcagaagacgctagttacatgactggagaaacgctaattgtagctggaggaatgccttcaagactgtaa

SEQ ID NO: 59523 - protein, 258 aa, Tribolium castaneum
MSGFAGPITRLAGKIAIVTASTDGIGFAIAQRLAREGAKVIVSSRKQNNVDEAVSRLKSEGLDVTGLMCHVSKADHRKKLFDTAKKLGGLDILVSNAAVNPSVAPVLDCDESSWDKIFEVNVKAAFLLAQEALPLLRERPFGRIIFVASIAGFHPFELLGAYSVSKTALFGLTKAAASQLARENITVNCIAPGIIQTKFSSALTETEAAREEALSRIPMNRLGVPHDISGAAAYLASEDASYMTGETLIVAGGMPSRL

SEQ ID NO: 59524 - DNA, 735 bp, Tribolium castaneum
  CDS (1)..(735)
atggaaatttcatttactggtaaacgtgccctcgtgaccggtgccaccaaaggaattgggcgcgaaattgccaaacaactagccaaatgtggggcccaagtggtggcaataggtcgcgaccaaacccacttgaatactttaaaacaagaaagccccctgattgagacaatctgtgccgatttaagcgactggaacgccaccacttctgctttgtctaaaataggccctattgaccttttggtcaacaatgctggccttgggtgggttaagcccatgacggaaatcacagaggaagatgtggatagtgttttcgccattaatacaaaaggtttaatcaatgttacaagaatcgtgtcaaaaaatttactagccaggaaagcccccggttccattgtaaatctctcatctcaggcatcgctagctgggttaatgcaccacacggtttactgtgcttccaagggggctgtcgatgcgttcactcgagctgcagccctggaactgggcccccataatataagggttaattgtgttaacccaactgttattatgacagatatggggcgcttgggttggtctgatccgaaagttgcagaacccatgttgcagaaaataccactgaggaggtttggggaggttcaagaggttgttgacgtggttctgtttcttttgagtgataaggcgagcatgattacgggatcgtgtttacctatcgatggtggatttgtagcgtgttga

SEQ ID NO: 59525 - protein, 244 aa, Tribolium castaneum
MEISFTGKRALVTGATKGIGREIAKQLAKCGAQVVAIGRDQTHLNTLKQESPLIETICADLSDWNATTSALSKIGPIDLLVNNAGLGWVKPMTEITEEDVDSVFAINTKGLINVTRIVSKNLLARKAPGSIVNLSSQASLAGLMHHTVYCASKGAVDAFTRAAALELGPHNIRVNCVNPTVIMTDMGRLGWSDPKVAEPMLQKIPLRRFGEVQEVVDVVLFLLSDKASMITGSCLPIDGGFVAC

SEQ ID NO: 59526 - DNA, 732 bp, Tribolium castaneum
  CDS (1)..(732)
atggagattaactttcatggaaaaacggcccttgtgacgggggctagtcaagggattggtcgagacattgtgaaacaattggcgaagggcggggccaaggtggtggccgttgcccgaaacaaggaactattggagagcctcaaagaggaggttccctcaatcgaaatcattccttgcgacctctctgattggaacgcgacccaaaatgccttatcccacctttctcccgacctcctggtcaacaacgcaggccttgcaattctaaaacccctaacccgggttagcgaatcggacgttgaccaacttttcgccataaatgtcaaagccttgatccaggttactaaactagtaaccgagaagttactccaaaggggggtttccggttccattgtgaatatctcgtcccaagcctcaatggctgggcttttgaaccactccgtctactgcagtaccaagggggctgtcgatgcgttcactcgagccgcagccctggagcttggcccccataatatcagagttaattgtgttaacccaactgttataatgacggcaatggggcgcttgggttggtcggagccgaaagtggccgaacccatgttgcagaaaataccgttgaggaggtttggagaggttcaagaggttgttgatgcggttttgtttttattgagtgataaggcgagcatgattacggggacttgtcttcctgtagatggcggttatctcgctgtttaa

SEQ ID NO: 59527 - protein, 243 aa, Tribolium castaneum
MEINFHGKTALVTGASQGIGRDIVKQLAKGGAKVVAVARNKELLESLKEEVPSIEIIPCDLSDWNATQNALSHLSPDLLVNNAGLAILKPLTRVSESDVDQLFAINVKALIQVTKLVTEKLLQRGVSGSIVNISSQASMAGLLNHSVYCSTKGAVDAFTRAAALELGPHNIRVNCVNPTVIMTAMGRLGWSEPKVAEPMLQKIPLRRFGEVQEVVDAVLFLLSDKASMITGTCLPVDGGYLAV

SEQ ID NO: 59528 - DNA, 768 bp, Tribolium castaneum
  CDS (1)..(768)
atgaatttcgccggaaaagtggttctaataaccggagcgagctccggaattggcgcagccaccgcgaaacaattcgccggacttggtgccagcctagccctcgccggaagaaacctagataacctcaaagaagtagcctctcagtgcaactcccccagcaacaaacctctcctcttaaccggtgagctcaccaacgaaaaagacaccgaagacatcctccagaagaccatatcacactacggccgcctcgacgtccttgtgaacaacgccgggattttggaatcgggaagcattgaaacgacgaatttgcagcaatatgacagacttatgaacacaaatgtgcgctcgatttaccacttgaccacgttagcggtcccgcatttaatcaaaacgaagggaaacgtcgttaacgtgtccagtgttaacgggatcagagcgtttcccggagttttggcctactgtatgtctaaagcagcagtggatcatttcaccagatgtgcagctctggatctagcacccaaacaagtgagggtcaatgctgttaatccaggagtcacgatcacgaatttgcacaagaggggtggaatgaatcaggaacagtacgaagcttttattaagaagagtcaggaaacacatgccttgggacggcccggaaaaccggaagaagtcgccagaactatagttttcctggctagtgatgacgccagttttataactggggccacactccctgtggacgggggaagacacgccatgtgcccccgataa

SEQ ID NO: 59529 - protein, 255 aa, Tribolium castaneum
MNFAGKVVLITGASSGIGAATAKQFAGLGASLALAGRNLDNLKEVASQCNSPSNKPLLLTGELTNEKDTEDILQKTISHYGRLDVLVNNAGILESGSIETTNLQQYDRLMNTNVRSIYHLTTLAVPHLIKTKGNVVNVSSVNGIRAFPGVLAYCMSKAAVDHFTRCAALDLAPKQVRVNAVNPGVTITNLHKRGGMNQEQYEAFIKKSQETHALGRPGKPEEVARTIVFLASDDASFITGATLPVDGGRHAMCPR

SEQ ID NO: 59530 - DNA, 777 bp, Novosphingobium aromaticivorans DSM 12444
  CDS (1)..(777): transl_table=11
ttgaatccgaaccaggttttccttgaagggaaagtcgccatcgtcaccggcgcaggcgtcggcatgggcgctgcaactgcccgcctgctcgccgcgcggggggccagggtcgtcgtttcggacatcaaccccgacaccgccgccgcgaccgtcgagacgatccgcgccgatggcggcaccgcccacgccgtgcgtaccgacgtgtcggacgaagctcaggtcgaagcgctggtcgccgagaccgtcgccacgttcggcaggctggactgcgcggtcaacaatgccgcgataacgcccgacgtgctgcccatccacgaagcggacatggccgtgttcgacagggtgctgaacgtcgacctgcggtcggtcatgctgtgcatgaagtacgagattcgccagatgctggcgcaggagggaccagggtcgatcgtcaacatcggatcggtcagctcgttccgcccgcagccgaacaacgcggcctatgtcgcggccaagcacggcgtgatcggcctgaccaagaccgggagcctcgaatatgcggggcgcggcatccgggtgaacgccgtgctgcccggcgccatcgacacgccgatgctgcgcggggcgctggagacgacgggctttaccgaagcggacttcgccccggcgctgagcctgttcgggcgcttcggcaagccggaggaagtggccgaggccagcgcctggctctgttccgatgcagcaagctacgtgaccgggcacagcctcgcggtcgaaggtggctacctgacgcggtag

SEQ ID NO: 59531 - protein, 258 aa, Novosphingobium aromaticivorans DSM 12444
MNPNQVFLEGKVAIVTGAGVGMGAATARLLAARGARVVVSDINPDTAAATVETIRADGGTAHAVRTDVSDEAQVEALVAETVATFGRLDCAVNNAAITPDVLPIHEADMAVFDRVLNVDLRSVMLCMKYEIRQMLAQEGPGSIVNIGSVSSFRPQPNNAAYVAAKHGVIGLTKTGSLEYAGRGIRVNAVLPGAIDTPMLRGALETTGFTEADFAPALSLFGRFGKPEEVAEASAWLCSDAASYVTGHSLAVEGGYLTR

SEQ ID NO: 59532 - DNA, 729 bp, Bacillus clausii KSM-K16
  CDS (1)..(729): transl_table=11
atggaagaaaagcgagttgtcgttactggtggagctagcggcatagggaaagcgattgctcttgcatttgcgcaaaaaggggcgctcgtttttatccttgataaggaagaggcactttttcaaaaatggagtgaaaaagcggagaacattgtgttcattcaaacggatgtcaaagaagagcgcgatatcaaggctgcttttgccaccattgcctcccagtctggacctgtggacatattaatcaacaatgcaggagtctcaacatttacgccattattcgaactaagtgtggaagaatgggacaatgtcttgaatacgaacttgcgcagcgtttttcttgcctcaaaagaagcagctttacatatgcaacctacagggaagcctgctagcattattaatatttcctcgacacgggcgcgcatgtcagagccgaattctgaagcttatgcagcctctaaaggaggggttgaggcgttgacccatgcattggcattatctcttgcagaaaaaaacattgccgttaatgccattgctcctggatggattcatacaacgaatgacgccttaagggagatcgaccatgagcagcatccttcaaaaagagtgggaacgcctgaagacattgcgaacgcatgcctgtttttagcggatgagcgcaatcggtttataaatggcgaaacgattgttattgatggtggtatgacgagaaaaatgatgtatgagcagtaa

SEQ ID NO: 59533 - protein, 242 aa, Bacillus clausii KSM-K16
MEEKRVVVTGGASGIGKAIALAFAQKGALVFILDKEEALFQKWSEKAENIVFIQTDVKEERDIKAAFATIASQSGPVDILINNAGVSTFTPLFELSVEEWDNVLNTNLRSVFLASKEAALHMQPTGKPASIINISSTRARMSEPNSEAYAASKGGVEALTHALALSLAEKNIAVNAIAPGWIHTTNDALREIDHEQHPSKRVGTPEDIANACLFLADERNRFINGETIVIDGGMTRKMMYEQ

SEQ ID NO: 59534 - DNA, 768 bp, Pseudomonas fluorescens Pf-5
  CDS (1)..(768): transl_table=11
ttgtccacgccccagggcggcggcaacgggcgtgtcgcgctggtgaccggcgcggctcggggtatcggcctgggtatcgctgcctggctgatcagcgaaggctggcaggtggtgttgaccgacctcgatcgtgagcgtggctccaaggtggccaaggtgctgggtgaaagtgcctggttcatcaccatggacgtggccgatgaagtgcaagtggcccagggggtggctgaggtgctggggcagttcgggcgcctcgacgccctggtctgcaatgccgctgtagccgacccgcacaacatcaccctggaaagcctggatctggcctactggaatcgggtcatcgcggtgaacctgggcgggccgatgctgctggccaagcactgtgcgccgtatttgcgcgcccatggcggcgccatcgtcaatctggcctctacccgcgccaggcaatcggagcctgacagcgaagcctacgcggcgagcaagggggggctgctggccttgactcatgccctggcgatcagcctggggccggagattcgggtcaatgcggtaagccccggctggatcgatgcccgggatcctgcggtgcgtcgcgcagagccgttatccgatgccgatcatgcccagcatccggcaggcagggtagggacggtggaagatgtggcctccatggtggcctggctgctgtcccgcaattcgggctttgtcaccggccaggaattcgtggtggacggtggcatgaccaagaaaatgatttatcaggaataa

SEQ ID NO: 59535 - protein, 255 aa, Pseudomonas fluorescens Pf-5
MSTPQGGGNGRVALVTGAARGIGLGIAAWLISEGWQVVLTDLDRERGSKVAKVLGESAWFITMDVADEVQVAQGVAEVLGQFGRLDALVCNAAVADPHNITLESLDLAYWNRVIAVNLGGPMLLAKHCAPYLRAHGGAIVNLASTRARQSEPDSEAYAASKGGLLALTHALAISLGPEIRVNAVSPGWIDARDPAVRRAEPLSDADHAQHPAGRVGTVEDVASMVAWLLSRNSGFVTGQEFVVDGGMTKKMIYQE

SEQ ID NO: 59536 - DNA, 810 bp, Anabaena variabilis ATCC 29413
  CDS (1)..(810): transl_table=11
atgaacggattaaaaggcaaaaacactctgatcacgggtgctagttctggtattgggcaggcgatcgctatccgtcttgctcaagaaggttgtaatattgccattaattaccgcaaaagtccctcaggtgctgaagaaactgaggaaatggctttgcaaaaggcttgtaaaaatgtagaaaactgcggtgttaagtctttactagtacagggtgatgtctctaaggaatcagatgtgatagagatggtaaacactgtagttgagaagtttggtagtctcgatattctgattaacaacgccgggattcaaactgaatgtccatcccacgaaatcacagcagaagattttgatcgagtaattggagttaacctgcggggttcttacttgtgcgcgcgtgaaaccattaaacacctgctgactcaaaatcgtagaggggtaattattaatatttctagtgtccacgaaattatccctcgaccaatgtatgtcagctattccatcagtaaaggtggaatggaaaatatgaccaaaactctagctttggaatacgctcatcggggtattcgtgtcaattctgtagcgcctggagcgacaattacacctatcaatgaagcttggactgatgacccggaaaagaaagcagttgtagaaagtcatattccaatggggcgtgctggtacttccgaggaaatggcggcagcagtagcatttttagcatcggatgaagcagcatacatcacgggacaaactctctttgtagacgctggtctgacgctttacgctgactttagagaaccttggtcagcttga

SEQ ID NO: 59537 - protein, 269 aa, Anabaena variabilis ATCC 29413
MNGLKGKNTLITGASSGIGQAIAIRLAQEGCNIAINYRKSPSGAEETEEMALQKACKNVENCGVKSLLVQGDVSKESDVIEMVNTVVEKFGSLDILINNAGIQTECPSHEITAEDFDRVIGVNLRGSYLCARETIKHLLTQNRRGVIINISSVHEIIPRPMYVSYSISKGGMENMTKTLALEYAHRGIRVNSVAPGATITPINEAWTDDPEKKAVVESHIPMGRAGTSEEMAAAVAFLASDEAAYITGQTLFVDAGLTLYADFREPWSA

SEQ ID NO: 59538 - DNA, 780 bp, Rhodobacter sphaeroides 2.4.1
  CDS (1)..(780): transl_table=11
atgagccggttcgaggggcgggtcgcgctcgtcaccggcgggggccgcggcatcgggcaggccatcgcccggcgcctcgcctcggacggggcgcgggtcttcacggcgcagcgcggcgcggacgccgggttcgaggccatcgcggccgacttcgccgatgcggacgcgcccgcccgcgctgtggccgaggcggtggatcgggcggggcggctcgacgtcttggtgaacaatgcgggcgtgatgcaggaggcgcgggtcgaggagatggcgctggccgactgggagcgcacgatccgcgtgaacctgaccgcgccgttccttgcgatccgggcggcgctgccgcatctgcgggccgtgcggggcgccatcgtcaatgtgggctccatcgaggggctgggggcgaacccgcgccatgccgcctattgcgcctcgaaggcggggctgcacgggctgacgcgggcggtggccgtcgatcatggcgcggagggcatccgctgcaacgcggtcgcgccgggctggatcgagacggagctgaacgaggccttcgtggaagcgatgcccgaccccgaggccttccggcgcgggatcggccgcatccatcccgtgggccgcacgggccagcccgaggaggtcgcggcgctggtggcctggctcgcctcggacgaggcggccttcgtgaccgggcaggtctggaccgtcgacggagggcggatggcgcagctgagcctgccgcatgaggactactcggccgcagcgcgccattccttccagcgcagatag

SEQ ID NO: 59539 - protein, 259 aa, Rhodobacter sphaeroides 2.4.1
MSRFEGRVALVTGGGRGIGQAIARRLASDGARVFTAQRGADAGFEAIAADFADADAPARAVAEAVDRAGRLDVLVNNAGVMQEARVEEMALADWERTIRVNLTAPFLAIRAALPHLRAVRGAIVNVGSIEGLGANPRHAAYCASKAGLHGLTRAVAVDHGAEGIRCNAVAPGWIETELNEAFVEAMPDPEAFRRGIGRIHPVGRTGQPEEVAALVAWLASDEAAFVTGQVWTVDGGRMAQLSLPHEDYSAAARHSFQRR

SEQ ID NO: 59540 - DNA, 777 bp, Rhodobacter sphaeroides 2.4.1
  CDS (1)..(777): transl_table=11
atgcgccccgctcgcgtagcttcgccgaaaaggggaatggcgatcatgggcgaacagaagacgatggtgctgaccggcgccagccgcggcatcggccacgcaacggtcaagagattctcgcgcgagggctggcgggtgctgacctgctcgcgtcagccgttcgatccgcgctgcccctggcccggcggcgaggagaaccatatccaggtcgatctcgccaatcccgacatgaccatccgggccatcgaggcgatcaaggacaagatcgacggccggctccatgcgctggtcaacaatgcgggcgtctcgccgaaggggccgaagggcgagcggctgagcacgatcaccaccgacctgcgcacctggggacaggtgttccacgtcaatttcttcgcctgtgtcgtgctggcccgcggcctgcaggaagagttgacagccggcaagggctcgatcgtcaacgtgacctcgatcgcgggcagccgggtgcatccgttcgcgggcgcggcctatgccacctcgaaggcggcgctggcggcgctcacgcgcgagatggcgcacgatttcgggccgctcggcgtgcgggtgaatgcgcttgcgcccggcgaggtcgagaccgcgatcctctcgcccggcaccgacaagatcgtcgagaagctgccgctgcagcggctgggtcagccgagcgaggtcgcggatgcgatctggttcctccgctccgaccagtcgagctacatctcgggcgccgagatcgaggtcaacggcgcccagcacgtctga

SEQ ID NO: 59541 - protein, 258 aa, Rhodobacter sphaeroides 2.4.1
MRPARVASPKRGMAIMGEQKTMVLTGASRGIGHATVKRFSREGWRVLTCSRQPFDPRCPWPGGEENHIQVDLANPDMTIRAIEAIKDKIDGRLHALVNNAGVSPKGPKGERLSTITTDLRTWGQVFHVNFFACVVLARGLQEELTAGKGSIVNVTSIAGSRVHPFAGAAYATSKAALAALTREMAHDFGPLGVRVNALAPGEVETAILSPGTDKIVEKLPLQRLGQPSEVADAIWFLRSDQSSYISGAEIEVNGAQHV

SEQ ID NO: 59542 - DNA, 732 bp, Silicibacter sp. TM1040
  CDS (1)..(732): transl_table=11
atgcgtcgcaaaaccctgctcttgaccggagccagccggggcatcggccatgccaccgtgcgccggttcaacgccgagggatggcgggtgattacctgttcacgccaaccgtttcccaaggaatgcccctggggcggcggcgaggaaaaccatgtgcagctggatctgtcggacccctcggataccatcaatgcggttggtgtcattcaggaacgtctggaggacggcaggcttgacgctttggtcaacaacgcgggtatctcgcccaagggccccgatggcgagcggctgagcacgctcaacaccgatctgatggattgggccaaggtgtttcacgtcaatttctttgcctcggtggtgctggcgcgcggcctgcgcgaggaactggccgcggccaagggggcagtggtcaatgtgacctcgattgcgggcagtcgggtgcatccttttgcgggggcggcctatgccacctcaaaggcggcgctggcggcgctgacgcgcgagatggcgcatgacttcgggccgatgggcgtgcgcgtaaatgcgattgcgccgggcgaggtggagacctcgatcctcagccctggcaccgacaagatcgtggaaaagctgccgatgcgcaggcttggccagccctccgaggtggcggatgcgatctatttcctgtgctcggagaagagcagctatatttccggcaccgagatcgaggtgaacggcgcgcagcacgtctga

SEQ ID NO: 59543 - protein, 243 aa, Silicibacter sp. TM1040
MRRKTLLLTGASRGIGHATVRRFNAEGWRVITCSRQPFPKECPWGGGEENHVQLDLSDPSDTINAVGVIQERLEDGRLDALVNNAGISPKGPDGERLSTLNTDLMDWAKVFHVNFFASVVLARGLREELAAAKGAVVNVTSIAGSRVHPFAGAAYATSKAALAALTREMAHDFGPMGVRVNAIAPGEVETSILSPGTDKIVEKLPMRRLGQPSEVADAIYFLCSEKSSYISGTEIEVNGAQHV

SEQ ID NO: 59544 - DNA, 768 bp, Rubrobacter xylanophilus DSM 9941
  CDS (1)..(768): transl_table=11
atgccaggacgtctcgaaggaaaggtcgccgtcatcacgggcgccgcgagcggcataggccgggagagcgcccggaggttcgccgaggagggcgccggggtgtgcgtggtggatctcgatccgagcggcggaaaggaggtggccgcatccgtcgacggcctgtacgtgcgggcggacgttacggaccccaaagacgtgcagcggatgtaccgcgaggccgcagattacttcggtcgtctggacgtgctcttcaacaacgcgggcatctctcctcccgaggacgggtccatactggagaccagcatcgacgcctggcagcgggtgcaggacgccaacctcaagtccgtctacctctgctgcaagtacggtatcccgtacctcctcgagaacgggggcggctcggtgataaacaccgcctcgttcgtggcggtgatgggcgcagcgacctctcagatctcctacaccgcctcgaagggcggcgtgctcgcgatgagccgcgagctcggggtgcagttcgcccgccagggggtgcgcgtgaacgccctctgtccggggcccgtggacacccccctcttgcaggaactcttcgccaaggatccggagaaggccaagcggcggctcgtgcaccttccgatgggccgcttcgcgaaggcggccgagatcgccaacgctgctctctttctggcctccgacgagtcctcttacgtgacggcctccaccttcctggttgacggcggcctctccggggcatacgttaccccagaatag

SEQ ID NO: 59545 - protein, 255 aa, Rubrobacter xylanophilus DSM 9941
MPGRLEGKVAVITGAASGIGRESARRFAEEGAGVCVVDLDPSGGKEVAASVDGLYVRADVTDPKDVQRMYREAADYFGRLDVLFNNAGISPPEDGSILETSIDAWQRVQDANLKSVYLCCKYGIPYLLENGGGSVINTASFVAVMGAATSQISYTASKGGVLAMSRELGVQFARQGVRVNALCPGPVDTPLLQELFAKDPEKAKRRLVHLPMGRFAKAAEIANAALFLASDESSYVTASTFLVDGGLSGAYVTPE

SEQ ID NO: 59546 - DNA, 777 bp, Pseudomonas putida
  CDS (1)..(777): transl_table=11
atgaacaaacgtttccaggacaagactgccgttatcaccggcgctgcccagggcatcggtcgccgtgtggccgaacggatggcggccgaaggcggtcggctgctgctagtcgaccgttccgagctaatacatgagctggccgacgaactggtcggagtcgctgaggtgctgaccctgaccgccgaccttgagcagttcgccgagtgccaacgggtgatggcggcggcgctcgagcgcttcggtcggctggacattctgatcaacaacgttggcggcaccatttgggctaagccattcgagcattaccaggaacacgagatcgaggccgaagtgcggcgttcactgttccctaccctatggtgctgccacgccgcgctgccgctaatgctcgagcagggcagtggcgccatcgtaaatgtttcctccgttgccacgcgcgggatccatcgcgtgccttacggcgcggcgaagggtggcgtcaacgccctgaccgcctgtctggcctttgaaaccgccgagcgcggcatccgcgtcaacgccaccgcaccgggtggcaccgaggcgccgccacggcggattccgcgcaatagcgccgagccgagtgagcaggagaaggtctggtaccagcagatcgtcgaccagtccctcgacagcagccttatgaaacgctacggaagcattgacgagcaggtcgaggcaattctgttccttgcttctgacgccgcctcctacatcaccggtataactcttccggtggcagggggagacctgggttga

SEQ ID NO: 59547 - protein, 258 aa, Pseudomonas putida
MNKRFQDKTAVITGAAQGIGRRVAERMAAEGGRLLLVDRSELIHELADELVGVAEVLTLTADLEQFAECQRVMAAALERFGRLDILINNVGGTIWAKPFEHYQEHEIEAEVRRSLFPTLWCCHAALPLMLEQGSGAIVNVSSVATRGIHRVPYGAAKGGVNALTACLAFETAERGIRVNATAPGGTEAPPRRIPRNSAEPSEQEKVWYQQIVDQSLDSSLMKRYGSIDEQVEAILFLASDAASYITGITLPVAGGDLG

SEQ ID NO: 59548 - DNA, 738 bp, Hyphomonas neptunium ATCC 15444
  CDS (1)..(738): transl_table=11
atgggccggctagcaggcaaaaaagcactgattaccgccgcgggcgccggcattggccgcgcctccgccgaggcatttgcccgcgaaggcgcgcgcatcatcgccacagacatcagcgccgaggcgctcgccgccctcaagggtacagccaacatcgaaacacagcttctggacgtgaccgatcccgccgccatcgcggccctcttcacgacccatcccgatctcgacattctgttcaatgtcgcaggctgggtccatcatggaacgatcgagacctgcggccgggatgactgggaccgctcgctcctggtcaacctcacctccatgtatgaaacctcccgcgcagccctgccaaacatgctggcacatggcggcggcgtgatcctcaatatgagttccgtcgcctccagcgtcgtcggcgcgcccaaccgctttgcttacggcgccaccaaggccggtgtgatcgggctcacgaaagccatcgctgcggattatgcgggccgcaacattcgctgcaatgccatctgtccgggcacggttgatacaccctcgctacagggccgtatgtcggcgcagggcgactatgacagcgcgcgccagatgttcatcgcgcgccagcccatgggccgcctcggcaccgccgaagagatcgcacacctcgccgtctatctcgcctcagatgaggcatccttcacgacgggcgcgattcacgtcgttgacggcggctggacaaattag

SEQ ID NO: 59549 - protein, 245 aa, Hyphomonas neptunium ATCC 15444
MGRLAGKKALITAAGAGIGRASAEAFAREGARIIATDISAEALAALKGTANIETQLLDVTDPAAIAALFTTHPDLDILFNVAGWVHHGTIETCGRDDWDRSLLVNLTSMYETSRAALPNMLAHGGGVILNMSSVASSVVGAPNRFAYGATKAGVIGLTKAIAADYAGRNIRCNAICPGTVDTPSLQGRMSAQGDYDSARQMFIARQPMGRLGTAEEIAHLAVYLASDEASFTTGAIHVVDGGWTN

SEQ ID NO: 59550 - DNA, 774 bp, Mycobacterium sp. KMS
  CDS (1)..(774): transl_table=11
atggatctcacccaacgactcaaaggcaaggtcgccgtcatcaccggtggcgccagcggcatcggactcgccaccgccaagcgcatgcgggccgagggcgccaccatcgtcatcggtgacatcgacccggccaccggtaagaccgtcgccgacgacctcaacggcaccttcgtccaggtcgacgtgtccgaccaggtcgccgtcgacgcgctgttcgacaccgccgccgaggaacacggttcggtggacatcgccttcaacaacgccggcatcagcccgcccgaagacgatctgatcgaggtcaccgggatcgacgcgtgggaccgggtgcaggacatcaacctgaagtcggtgttcttctgctgcaaggccgcgctgcgccacatggtgcccgcgcagaaggggtcgatcatcaacaccgcgtcgttcgtcgctgtcaatgggtcggcgacctcgcagatctcctacaccgcctccaagggcggcgtgctcgccatgtcccgtgaactcggaatccagtacgcgcgacaggggatccgggtcaacgcgctgtgcccgggcccggtgaacaccccgctgctgcaggagttgttcgccaaggaccccgaacgcgcggcgcggcggttggtgcacgtgccgatggggcgcttcgccgaaccggcggagttggccgccgcggtggcgttcctggccagcgacgacgcgtcgttcatcaccggctcgacgttcctggtcgacggcggtatcaccggccactacgtcacgccgctgtag

SEQ ID NO: 59551 - protein, 257 aa, Mycobacterium sp. KMS
MDLTQRLKGKVAVITGGASGIGLATAKRMRAEGATIVIGDIDPATGKTVADDLNGTFVQVDVSDQVAVDALFDTAAEEHGSVDIAFNNAGISPPEDDLIEVTGIDAWDRVQDINLKSVFFCCKAALRHMVPAQKGSIINTASFVAVNGSATSQISYTASKGGVLAMSRELGIQYARQGIRVNALCPGPVNTPLLQELFAKDPERAARRLVHVPMGRFAEPAELAAAVAFLASDDASFITGSTFLVDGGITGHYVTPL

SEQ ID NO: 59552 - DNA, 792 bp, Acidovorax sp. JS42
  CDS (1)..(792): transl_table=11
atgtcccaaacactcaccacgtcaactatctccttcggccatcacggtcgcgtgtgtattgtcacgggcggtgcccagggcattggcgaggcctgcgtgcgcaggctggcgcgcgacggtgccaaggtggtgatcgcagacatggatgatgcccgcggacgtgctcttgccgatgcggtgccgcaagccgcctacattcattgcgatgtgggcaacaagtccgaagtggatgccctggtaggtcaaaccatggcgctgcacgggcgcatcgacgtattggtcaacaacgcgggcatcttccgcgctgcggactttctggatgtgaccgaggaggacttcgacgcggtactgcgcgtgaacctcaagggtgcctttctcatgggccaggccgtggcacgcgaaatggtgcgctcgggcggcggcagcatcgtgaacatgagttccgtcaatggcgttttggccattccgaacatcgccagctacaacgtgagcaagggcggcatcaatcagctcacccgcgtgatggcgctggcgctggcggaccgtggcatccgcgtgaacgcggtggcgcccggcaccattgccacggaactcgccgcgaaggccgtgctgacgagcgacgaggcccggctcaagatcctgagccgcacgccgatgaagcgcctgggtgagccttcggaggtcgctgatgtggtggcatggctcgccagcgacgccgccagttatgtgaccggcgagatcgtcaccgtggacggcggccgcatgacgctcaactacaccgtgccggtctag

SEQ ID NO: 59553 - protein, 263 aa, Acidovorax sp. JS42
MSQTLTTSTISFGHHGRVCIVTGGAQGIGEACVRRLARDGAKVVIADMDDARGRALADAVPQAAYIHCDVGNKSEVDALVGQTMALHGRIDVLVNNAGIFRAADFLDVTEEDFDAVLRVNLKGAFLMGQAVAREMVRSGGGSIVNMSSVNGVLAIPNIASYNVSKGGINQLTRVMALALADRGIRVNAVAPGTIATELAAKAVLTSDEARLKILSRTPMKRLGEPSEVADVVAWLASDAASYVTGEIVTVDGGRMTLNYTVPV

SEQ ID NO: 59554 - DNA, 822 bp, Exiguobacterium sibiricum 255-15
  CDS (1)..(822): transl_table=11
atgaaacgacttgaaaacaaagtggccgtcattaccggctcagcgacaggaatcgggcaggcaacggcacttgtctttgccgagcagggagcgacagtcgtctgcgcggacgtcgagcttgaaaaagcacaagtaacggttgaaaaaattaaagaagccggcgggaaagcagaggctgttcatgtcgatgtctcacaagtagacagcgtgaagcaactcgcagaccatttacaatctacatatggaacggttgatgttctgttcaacaatgccgggattgatcaacagggcgggaaggtgcatgaatatccgatcgaactgtttgatcaaatcatcgccgtcgatttacgcggaacgttcttaacgagtaaattcgtcattccattgatgctgaagaacggcggatcaatcatcaatacgtcatcgatgtcgggacgtgcagccgacttgaaccgttccggctacaatgccgcgaaaggcggcattgccaactttacacgggcgatggcgattgattatgcccgcgacggtatccgcgtcaattcgctttcaccggggacgattgaaacaccgctcatcgatacacttgttggcggaaaagaagaagaacaaggcaaacagttccgcgacgccaacgcctggatcacaccgctcggccggctcggaaaaccgcgtgagatggcgacggtcgccctgttcctggcgtcagatgacagctcttacgtcaccggcgaagacatcacagccgacggcggaatcatggcatacacatggccgggcgaaatgttaatcgacgacaaatggaaaacagaggctgaataa

SEQ ID NO: 59555 - protein, 273 aa, Exiguobacterium sibiricum 255-15
MKRLENKVAVITGSATGIGQATALVFAEQGATVVCADVELEKAQVTVEKIKEAGGKAEAVHVDVSQVDSVKQLADHLQSTYGTVDVLFNNAGIDQQGGKVHEYPIELFDQIIAVDLRGTFLTSKFVIPLMLKNGGSIINTSSMSGRAADLNRSGYNAAKGGIANFTRAMAIDYARDGIRVNSLSPGTIETPLIDTLVGGKEEEQGKQFRDANAWITPLGRLGKPREMATVALFLASDDSSYVTGEDITADGGIMAYTWPGEMLIDDKWKTEAE

SEQ ID NO: 59556 - DNA, 777 bp, Xylella fastidiosa Dixon
  CDS (1)..(777): transl_table=11
atgacccaatcccgttggcgtttggatggtcgtacggctttgatcacgggggctagtacaggtatcggtctggctgttgctcgtgagttgttgggcctgggtgccgatgtgctgttggtagcgcgtgatgctgatttgctgggacgagtacgcgatgaactggcagaggaattccctgagcgtgagttacatggattggctgctgatgttgctgacgatgtggaccgccgtgcgattctggattgggtcgaagattgcagtaatggtttgcatgtgttgatcaacaatgctggtggcaatgtgacgcgtgcagcgcttgaatatacagaagacgagtggcgtgagattttcgagatcaatctgttctctgcgttcgagttgtgtcgttacacgcagccgttgctggcgtgtcatgcaagtacggcgattgtcaatattggcagtgtatctggcttgacgcatgtgcgcagtggagtgccgtatgggatgagcaaggcggcgttgcaccaaatgacccgcaatttggctgtggaatgggctgaggatgggatccgtgtcaatgcggtagcgccttggtatatccgtacgcgtcgtacgtcggagccgctctctgatgtgtgctattacgagcaagtcattgaacgtacgccgatgcgtcgcattggagagccggaggaagtggctgcggcagtggcatttctttgtttgccagcgtccagttatgtgaccggcgaatgtattgcggtggatggcggttttatgcgctatggtttctga

SEQ ID NO: 59557 - protein, 258 aa, Xylella fastidiosa Dixon
MTQSRWRLDGRTALITGASTGIGLAVARELLGLGADVLLVARDADLLGRVRDELAEEFPERELHGLAADVADDVDRRAILDWVEDCSNGLHVLINNAGGNVTRAALEYTEDEWREIFEINLFSAFELCRYTQPLLACHASTAIVNIGSVSGLTHVRSGVPYGMSKAALHQMTRNLAVEWAEDGIRVNAVAPWYIRTRRTSEPLSDVCYYEQVIERTPMRRIGEPEEVAAAVAFLCLPASSYVTGECIAVDGGFMRYGF

SEQ ID NO: 59558 - DNA, 771 bp, Synechococcus sp. WH 5701
  CDS (1)..(771): transl_table=11
atgaaagattttcgactggatggcaaaagggctttgatttccggaggctcaaaaggcctcggtgccgcaatcgcggaaagattctccgaggctggagcagacatcggtgtgatcggcagggacagggagggactgggcaggatccaagggattgtcgagaacaatcatcgcaactgctgggtgatcgaagaagacgtgtcgtcgatcgagggagccaggcgagccggcgacaaagcactggcccttgatccagaatgggatgtccttgtcaacaatgccggcattgccagagttcagtcgatccttgaaaccacccaggacaactggaatgatatattttcagtcaatcttcgctcagccttgcttctttctcaagcaattgtcccccagatgatcaagaggggacatggaaaggtggtcaacatctcttcgattggggccttcatcggcaccccaggattaggggcctatgcggcatcaaaagcagccctcaatcaactgaccaggaccatggccgttgaatggggtccgcacaatgttcaagtgaatgccctctgccccactgttattctaacccaaatgggtcatgatatctgggacagcccatccatggaagagcccagaaaagaaaaagaaaaaagaattcccctgcatcgctttggagagccaacagaagtagccaatgtggccttatttctggccagccctgcatccaattttgttcatggagtttcgctgcctttggatggaggcatgtcaatagctccgtag

SEQ ID NO: 59559 - protein, 256 aa, Synechococcus sp. WH 5701
MKDFRLDGKRALISGGSKGLGAAIAERFSEAGADIGVIGRDREGLGRIQGIVENNHRNCWVIEEDVSSIEGARRAGDKALALDPEWDVLVNNAGIARVQSILETTQDNWNDIFSVNLRSALLLSQAIVPQMIKRGHGKVVNISSIGAFIGTPGLGAYAASKAALNQLTRTMAVEWGPHNVQVNALCPTVILTQMGHDIWDSPSMEEPRKEKEKRIPLHRFGEPTEVANVALFLASPASNFVHGVSLPLDGGMSIAP

SEQ ID NO: 59560 - DNA, 765 bp, Pseudoalteromonas tunicata D2
  CDS (1)..(765): transl_table=11
atgaatatattggccaacaaagttgctattgttactggtgccagcacaggtattggctatgcaaccgcgaagctttttgccaaagaaggtgctgccgttgtggtggctgccaggcgacagagggagcttgacgaactggtggatttaatcaatagggaaggtgggcaggcggttgcacttgcgggtgatgttagtgatgaggcttttgccaaagctttggtcgataaggcggtaagtcactttggtggcttggatattgcttttaacaatgctgccattctgggcgctatgggccctgtgccgcagatgtcgctcacggattgggatcaggttattgcgacaaacttaaccagcgcatttctgggcgcaaagtatcaactgcctgctatggctgcgcgaaaaggaggttcgttaattttcacctctaccttcgttggttacaccgcaggtatgccaggcatggctgcttacgctgccagtaaggctggccttattggtttgactcaagtgctggcgtcagagcatgggcctcagaatatccgggtcaatgcccttttgcctggtggtactgatacgccagcagggcgtgagtttgccaatacgccggaagcattggcgtttgtgcataacctgcatgcgctcaagcgtatggcgacaccagatgaaattgctcaatccgcattgtacttagcatccgatgcatccagtttcacaactggttctgcgatgttggtagatggcggtgtatctataaatcgtgtttga

SEQ ID NO: 59561 - protein, 254 aa, Pseudoalteromonas tunicata D2
MNILANKVAIVTGASTGIGYATAKLFAKEGAAVVVAARRQRELDELVDLINREGGQAVALAGDVSDEAFAKALVDKAVSHFGGLDIAFNNAAILGAMGPVPQMSLTDWDQVIATNLTSAFLGAKYQLPAMAARKGGSLIFTSTFVGYTAGMPGMAAYAASKAGLIGLTQVLASEHGPQNIRVNALLPGGTDTPAGREFANTPEALAFVHNLHALKRMATPDEIAQSALYLASDASSFTTGSAMLVDGGVSINRV

SEQ ID NO: 59562 - DNA, 720 bp, Vibrio sp. Ex25
  CDS (1)..(720): transl_table=11
atgaaagacgaaaaagtcgccgtcgttacaggggctgctcgcggtatagggcaggccatttgcgaacaattactagaagatggattccacgtcgtggggctagatatctcgcctgtggagtggagtcagtcgccaaacctttcaagttatcaagtgaatctctgtgaggccgcagcggtaagtgaagtggtcgaccgcatcgtcgcgaaacatcaacgcattgatgttctggtcaacaacgccgggataacgagagatgcactgctgccagacatgttagagcaagactgggacagcgttatcgacgtgaacctaaaggcggtgtttttactcacccagcgcgttgctcctgtcatgctagagcagggtgtaggtagtattgtcagcatttcttctattgtgggaacggatggcaatattggtcaaagtaattatggcgcgagtaaaggtggcgtgatagcgatgagcaaaggctgggcgaaagagttagcaagaaaaggcgctcaaatccgagtcaactgtgttgctccaggttttatcgctaccgacatgacaaagagcttgcctgaaaaagtcattcaaatgatggaaagtaaaacgcctctgggacgcatgggctcggcgcaagacattgcgaatggcgttgcgtttctagcgtctgataaaagtgcgtttataaccggacaagtgctcaagattgatggtgggttggtgttataa

SEQ ID NO: 59563 - protein, 239 aa, Vibrio sp. Ex25
MKDEKVAVVTGAARGIGQAICEQLLEDGFHVVGLDISPVEWSQSPNLSSYQVNLCEAAAVSEVVDRIVAKHQRIDVLVNNAGITRDALLPDMLEQDWDSVIDVNLKAVFLLTQRVAPVMLEQGVGSIVSISSIVGTDGNIGQSNYGASKGGVIAMSKGWAKELARKGAQIRVNCVAPGFIATDMTKSLPEKVIQMMESKTPLGRMGSAQDIANGVAFLASDKSAFITGQVLKIDGGLVL

SEQ ID NO: 59564 - DNA, 795 bp, marine gamma proteobacterium HTCC2143; identical to SEQ ID NO: 40469
  CDS (1)..(795): transl_table=11

SEQ ID NO: 59565 - protein, 264 aa, marine gamma proteobacterium HTCC2143; identical to SEQ ID NO: 40470

SEQ ID NO: 59566 - DNA, 753 bp, Candidatus Desulfococcus oleovorans Hxd3
  CDS (1)..(753): transl_table=11
atgaccatgccaggccaccagaaacgcgttgttgttgtcaccggcgggtcccgtggtatcggccgggcgatctgccttgcctttgccgatgccggcacccgtgtctatgtcaattatgccgcatcggtcgatcaggccgaagagacaaaaaagcaggttgaagcgcggggtggatcggctgtctgcattcaggccgacgtgtcccgtgaggcggatgtaacagccctgttcaagaccgtggtggccgagtcgggccgcatagacgtgctggtgaacaatgcgggcatttcccgggacgggctggtgccccgcatgtccggggcggactgggacgatgtgatggccgtcaatttacggggcgcgtttttctgcatcaaggccgcctcccggcagatgctcaagcagcgcggcggccggattattaacatcacctccgtggtggggttttccggcaacgcgggccaggccaattacgcggccgccaaggcgggcctggccgggctgacccggtccgtggccctggagtttgcctcccggaacatcacggtcaatgccgtggcgccgggcctggtaaacaccgacatggcggccgggctttccgaccaggaccgggaacgcatcgcggaaaagattcccctgggccgcatgggcacctcggacgatgtggccggggtggtggcgtttctggcctcggacgcggcggcttacatcaccggccaggtggttcatgtcaatggcggcctttacctgtag

SEQ ID NO: 59567 - protein, 250 aa, Candidatus Desulfococcus oleovorans Hxd3
MTMPGHQKRVVVVTGGSRGIGRAICLAFADAGTRVYVNYAASVDQAEETKKQVEARGGSAVCIQADVSREADVTALFKTVVAESGRIDVLVNNAGISRDGLVPRMSGADWDDVMAVNLRGAFFCIKAASRQMLKQRGGRIINITSVVGFSGNAGQANYAAAKAGLAGLTRSVALEFASRNITVNAVAPGLVNTDMAAGLSDQDRERIAEKIPLGRMGTSDDVAGVVAFLASDAAAYITGQVVHVNGGLYL

SEQ ID NO: 59568 - DNA, 753 bp, Escherichia coli B
  CDS (1)..(753): transl_table=11
atgagtaattttgcaggtaaagtggttttagttaccggaggtgctcacggtattggaaaagggatagctaaacaatttgctgatcgtggtgcacatactgttattgttgactataacgaagagaacggcaaggccactgcagcagagttaacttttggcgatgttaaatcgttgtttattaaaacagatgtctccgatccacaggcattagtggatgttcgggaaaaggtatttgctacctttggtcgcattgatgtgttgatattaaatgccggtgtggcatttgccaataaagttaacaatatttcttttgaggaatggaataagactatcgcaattaacttatcaggattatttaataccgttaaggcgttttatgatgatttcctgacaaataagggatctattgtttatatctcatcgggatcagcgctttcggggactgggggcggtgtcagttatcctgccagtaaagcgggaggcgaaggattgattcgtgggctggcaaaagagttaggaccaaaaggcgtcaatgtcaatgcgattgctccccgcttaatagacaccggagagatgatgcgggtcaactatccaacacaagccgatttagacgctgtcctggaaaaaatacccgtccgtcgtctggggactatcgatgatgtggctaacctggcaatatttttggcagataaagataactcttatattcagggacaaaccattttaatggatggtggccggactattgcttaa

SEQ ID NO: 59569 - protein, 250 aa, Escherichia coli B
MSNFAGKVVLVTGGAHGIGKGIAKQFADRGAHTVIVDYNEENGKATAAELTFGDVKSLFIKTDVSDPQALVDVREKVFATFGRIDVLILNAGVAFANKVNNISFEEWNKTIAINLSGLFNTVKAFYDDFLTNKGSIVYISSGSALSGTGGGVSYPASKAGGEGLIRGLAKELGPKGVNVNAIAPRLIDTGEMMRVNYPTQADLDAVLEKIPVRRLGTIDDVANLAIFLADKDNSYIQGQTILMDGGRTIA

SEQ ID NO: 59570 - DNA, 828 bp, Pseudomonas putida GB-1
  CDS (1)..(828): transl_table=11
atgaacaacaataagattgcctctcagtggctgggcctggactcggccgtatgcgtggtaaccggcgccgccggcggcattggtgccgcgctggccgcagccttggtggagcagcaggcccacgtggtgctgctggaccgcgacctggacaaatgccgcgaactggcggccaccttgggtgagcacagcacgggcgaagtcagcgccctggcctgtgacattgccgacccggccagcgtggggcaagcggctgcccaggtgcaggcactgcatgggcgctgcgatgtgctggtcaacaatgccagcgtgctgcgccccggcgcgctggacacgctgagcctggagcaatggaaccaggtgctggcggtcaacctcagcggctacctgttgtgtgcccaggccttcggccgctcgatgctggctcgcggccagggccgcatcgtgcatgtagcctcgattgccgcccattacccgcaacccaacagcggtgcctacagcgcggccaaggctggcgtgagcatgctgtcgcggcagcttgccgtggagtgggggccgcggggtgtgcgcagcaacgccgtgtgcccgggcttgatccgcacgcccttgtcggcggcgttctatgccgacccgcaggtggaacgccagcgtagcgccatgaccgccaaccgtcgcattggtgagccgctggatatcgccgaggccgtgctgtttctggccagccgccgcgccgactatatcaacggcgccgagctgaccgtggatggcgggctggagtgcatgcccatggcattgatcccgcgcccgggcttcgagggggctggccaatga

SEQ ID NO: 59571 - protein, 275 aa, Pseudomonas putida GB-1
MNNNKIASQWLGLDSAVCVVTGAAGGIGAALAAALVEQQAHVVLLDRDLDKCRELAATLGEHSTGEVSALACDIADPASVGQAAAQVQALHGRCDVLVNNASVLRPGALDTLSLEQWNQVLAVNLSGYLLCAQAFGRSMLARGQGRIVHVASIAAHYPQPNSGAYSAAKAGVSMLSRQLAVEWGPRGVRSNAVCPGLIRTPLSAAFYADPQVERQRSAMTANRRIGEPLDIAEAVLFLASRRADYINGAELTVDGGLECMPMALIPRPGFEGAGQ

SEQ ID NO: 59572 - DNA, 762 bp, Pseudomonas putida GB-1
  CDS (1)..(762): transl_table=11
atgaacaatagattccaaggcaaggtcgccctggtcaccggtgccgcccaaggcatcggccggggtgtgtgttggcggctcaaggccgagggcgcgcaagtggtcgcggtagaccgttccgagctggtccacgaactggccggcgagggcatgctcaccctcactgccgacctggagcaacacgctgactgcgcccgagtcatggccagtgcggtccaagccttcggccgcctggacatcctggtcaacaacgttggtggcactatctgggccaagcctttcgagcattacgaagtcgagcagatcgaagccgaagtgcgccgctcgctgttcccgaccctgtggtgctgccatgccgcgctgccgtacatgctcgaacgcggcagcggcgccatcgtcaacgtctcgtccatcgccacccgtggcgtcaaccgtgtgccctatggcgcggccaaaggtggcgtcaacgcgctgaccgcgtgcctggcctttgaaaccgccggccgcggcatccgcgtcaacgccaccgcgcccggcggcaccgaagcaccgcctcggcgcgtgccgcgtaacagcgccgagcagagcgagcaggaaaaacgctggtaccagcagatcgtcgaccagaccctcgacagtagcctgatgcaccgctacggcagcatcgacgagcaggtgggcgccattttgttccttgcctctgacgaggcttcgtacatcaccggcgtgaccctgccggtagggggcggcgacctcggctga

SEQ ID NO: 59573 - protein, 253 aa, Pseudomonas putida GB-1
MNNRFQGKVALVTGAAQGIGRGVCWRLKAEGAQVVAVDRSELVHELAGEGMLTLTADLEQHADCARVMASAVQAFGRLDILVNNVGGTIWAKPFEHYEVEQIEAEVRRSLFPTLWCCHAALPYMLERGSGAIVNVSSIATRGVNRVPYGAAKGGVNALTACLAFETAGRGIRVNATAPGGTEAPPRRVPRNSAEQSEQEKRWYQQIVDQTLDSSLMHRYGSIDEQVGAILFLASDEASYITGVTLPVGGGDLG

SEQ ID NO: 59574 - DNA, 747 bp, Pseudomonas putida GB-1
  CDS (1)..(747): transl_table=11
atggagaacgtcatcgtcatcaccggcggcagccgcggtatcggcgccgccacggcgttgctggccgcccgtcacggctaccgcatctgcatcaattaccacaccgacgaccaagctgcgcaaaacatcctcggccaggtacgcgccctgggcgccgaggccattgccgtgcgcgccgacgccagcgtcgaggatgaaatcatccagctgttccagcgcgtcgacgaagaactcggcccggtcaccgcattggtcaacaacgccggcaccatcggccagcaaagccgcgtcgaggaaatgtccgagttccgcctgctcaagatcatgaagaccaacgtcgtcggccccatgctctgcgccaagcacgccttgctgcgcatggcgcaccggcatggcgggcagggcggcgccatcgtcaacgtgtcgtcgatggccgcacggcttggttcacccaatgaatatgtcgactatgcagcctccaagggcgcgctcgataccttcaccatcggcctggccaaagaggtggcaggcgagggcgtacgggtcaatggcgtacgaccgggctatatccacaccggtttccatgcgctgtccggtgacccggatcgcgtcagcaagctcgaacccggcttgcccatgggccgcggtggacgccccgaggaagtggccgaggccatcctctggctgctctcggacaaagcatcctattccaccggtagtttcatcgacctgagcggagggcgctga

SEQ ID NO: 59575 - protein, 248 aa, Pseudomonas putida GB-1
MENVIVITGGSRGIGAATALLAARHGYRICINYHTDDQAAQNILGQVRALGAEAIAVRADASVEDEIIQLFQRVDEELGPVTALVNNAGTIGQQSRVEEMSEFRLLKIMKTNVVGPMLCAKHALLRMAHRHGGQGGAIVNVSSMAARLGSPNEYVDYAASKGALDTFTIGLAKEVAGEGVRVNGVRPGYIHTGFHALSGDPDRVSKLEPGLPMGRGGRPEEVAEAILWLLSDKASYSTGSFIDLSGGR

SEQ ID NO: 59576 - DNA, 774 bp, Pseudomonas putida GB-1
  CDS (1)..(774): transl_table=11
gtgatcgaaatcagcggcagtaccccaggccacaatggtcgggtagccttggtcaccggtgccgcgcgcggcatcggcctgggcattgccgcttggttgatctgcgaaggttggcaggtggtgctcagtgacctggaccgcaagcgcggcgccaaggtggccaaggcgttgggtgacaacgcctggttcatcaccatggacgttgccgacgaggcccaggtcagtgccggggtgtccgaagtgctcgggcagttcggtcggctggacgcgctggtgtgcaatgcggccattgccaacccgcacaaccagaccctcgaaagcctgagcctggcgcaatggaaccgggtgttggcggtcaacctcaacggcccgatgctgctggccaagcattgtgcgccgtacctgcgtgcgcacaatggggcgatcgtcaacctgacgtctactcgggcgcggcaatccgagcccgacaccgaagcttacgcggcaagcaagggcggcctggtggctttgacccatgctctggccatgagcttgggcccggagattcgcgtcaatgcggtgagcccgggctggatcgatgcccgtgacccgtcgcagcgccgtgccgagccgttgaccgaggccgatcatgcccaacacccgacggggagggtagggacggtggaagatgtggcggccatggttgcctggctgttgtcgcgccaggcggcgttcgtcaccggccaggagttcgtggtcgatggcggcatgacccgcaagatgatctacacctga

SEQ ID NO: 59577 - protein, 257 aa, Pseudomonas putida GB-1
MIEISGSTPGHNGRVALVTGAARGIGLGIAAWLICEGWQVVLSDLDRKRGAKVAKALGDNAWFITMDVADEAQVSAGVSEVLGQFGRLDALVCNAAIANPHNQTLESLSLAQWNRVLAVNLNGPMLLAKHCAPYLRAHNGAIVNLTSTRARQSEPDTEAYAASKGGLVALTHALAMSLGPEIRVNAVSPGWIDARDPSQRRAEPLTEADHAQHPTGRVGTVEDVAAMVAWLLSRQAAFVTGQEFVVDGGMTRKMIYT

SEQ ID NO: 59578 - DNA, 762 bp, Pseudomonas putida GB-1
  CDS (1)..(762): transl_table=11
atgagcatgaccttttctggccaggtagccctggtgactggcgctgccgccggtattggccgggcaaccgccctggctttcgcccgcgagggcctgaaggtggtggtggccgaccttgacccggtcggcggcgaagccaccgtggcgctgatccacgcggtgggcggcgaggcgcttttcattgcctgcgacgttacccgcgacagcgaggtgcgccagttgcacgagcgcctgatagccgcctatggtcggctggactatgcctacaacaatgccgggatcgaaatcgagcaacaccggctggccgaaggcagcgaggcggagttcgatgccatcatgggcgtgaacgtgaagggtgtgtggttgtgcatgaagtaccaactgcccttgctgttggcccagggcggtggggtgatcgtcaacaccgcttcggtggcggggctgggggcggcgccgaagatgagcatctacagcgccagcaagcatgcggtgatcggtttgaccaagtcggcggccatcgagtacgccaagaagggcgtccgcgtgaacgctgtgtgcccggcggtgatcgacaccgacatgttccgccgtgcctacgaggccgacccgcgcaaggccgagttcgccgccgccatgcacccggtggggcgcattggcaaggttgaggaaatcgccagcgcggtgctgtacctgtgtagcgacggtgcggcgtttaccaccgggcattgcctgacggtcgatggtggggctacggcgatctga

SEQ ID NO: 59579 - protein, 253 aa, Pseudomonas putida GB-1
MSMTFSGQVALVTGAAAGIGRATALAFAREGLKVVVADLDPVGGEATVALIHAVGGEALFIACDVTRDSEVRQLHERLIAAYGRLDYAYNNAGIEIEQHRLAEGSEAEFDAIMGVNVKGVWLCMKYQLPLLLAQGGGVIVNTASVAGLGAAPKMSIYSASKHAVIGLTKSAAIEYAKKGVRVNAVCPAVIDTDMFRRAYEADPRKAEFAAAMHPVGRIGKVEEIASAVLYLCSDGAAFTTGHCLTVDGGATAI

SEQ ID NO: 59580 - DNA, 762 bp, Marinobacter sp. ELB17
  CDS (1)..(762): transl_table=11
atgtctgatgatcgcaaagtggccctggtgaccggtggagctcatggcattggccggggcatagcggcgtacctgctgaagcagaattggcgtgtcgcttttttcgatctggatgacattgccgcgaatgagattgtcgcagcgtttggggatcccgccaacctgctttacgtgcgctgcaatgtggcagatgagggcgacgtcaagttggcgttgcgtcagcttataagctggggaagtaggctggatgcgctggtgaacaacgccggcttggccgatcccgtgaccggcgcggtggaagatctgtcgttggcggattggcagaaacgactggatgtaaacctgaccggtccctttctaatggcgaaacactcagtaccatacctgcgccttacccggggagctatcatcaacattgcctccacgcgggctatgcagtctgaagccaataccgaagcctacgctgccaccaagggcggacttgtagccctgacccacgcccttgccatcagcctggggccggaggtgcgagtcaactgcatcagcccggggtggatcgatacccgcgagccggaggcaggccaggagcccgcgcccttaagcgcacgggaccacgcccagcatcccgcaggcagggtcggtaaacccgacgacattgcggcgatggtgcattatttgatctcccctcaagccagtttcatcactgggcaaaacatcgtggtggatggcggcatggtgcgcaagatgatttaccaagagtag

SEQ ID NO: 59581 - protein, 253 aa, Marinobacter sp. ELB17
MSDDRKVALVTGGAHGIGRGIAAYLLKQNWRVAFFDLDDIAANEIVAAFGDPANLLYVRCNVADEGDVKLALRQLISWGSRLDALVNNAGLADPVTGAVEDLSLADWQKRLDVNLTGPFLMAKHSVPYLRLTRGAIINIASTRAMQSEANTEAYAATKGGLVALTHALAISLGPEVRVNCISPGWIDTREPEAGQEPAPLSARDHAQHPAGRVGKPDDIAAMVHYLISPQASFITGQNIVVDGGMVRKMIYQE

SEQ ID NO: 59582 - DNA, 765 bp, Pichia finlandica
  CDS (1)..(765)
atgtcttataacttccataacaaggttgcagttgttactggagctctatcaggaatcggcttaagcgtcgcaaaaaagttccttcagctcggcgccaaagtaacgatctctgatgtcagtggagagaaaaaatatcacgagactgttgttgctctgaaagcccaaaatctcaacactgacaacctccattatgtacaggcagattccagcaaagaagaagataacaagaaattgatttcggaaactctggcaacctttgggggcctggatattgtttgtgctaatgcaggaattggaaagttcgctcccacccatgaaacacccttcgacgtatggaagaaggtgattgctgtgaatttgaatggagtattcttactggataagctagccatcaattactggctagagaaaagcaaacccggcgtaattgtcaacatgggatcagtccactcttttgtagcagctcctggccttgcgcattatggagctgcaaaaggcggtgtcaaactgttaacacaaacattggctctagagtacgcatctcatggtattagagtaaattctgtcaatccggggtacatttcgactcctttgatagatgaggttccgaaagagcggttggataaacttgtaagcttgcaccctattgggagactaggtcgtccagaggaagttgctgatgcagtcgcatttctgtgttcccaggaggccactttcatcaacggcgtttctttgccggttgacggggggtacacagcccagtaa

SEQ ID NO: 59583 - protein, 254 aa, Pichia finlandica
MSYNFHNKVAVVTGALSGIGLSVAKKFLQLGAKVTISDVSGEKKYHETVVALKAQNLNTDNLHYVQADSSKEEDNKKLISETLATFGGLDIVCANAGIGKFAPTHETPFDVWKKVIAVNLNGVFLLDKLAINYWLEKSKPGVIVNMGSVHSFVAAPGLAHYGAAKGGVKLLTQTLALEYASHGIRVNSVNPGYISTPLIDEVPKERLDKLVSLHPIGRLGRPEEVADAVAFLCSQEATFINGVSLPVDGGYTAQ

SEQ ID NO: 59584 - DNA, 777 bp, Branchiostoma belcheri
  CDS (1)..(777)
atggcagagggaggaaaagggcgtctgacaggaaagcttgcgctggtgacagctggaggaggaggcatcggccgagctgtgtgtcaggccttcgccagggaaggtgccaaggttgttgtctcagacatcaacggaaccaccgccaaggacacgctgtcatcactggagggcgatcccagcagccaccgcgactacgtagctgacgtatcgtcgtcggaagacgtgcagaagatgtttgatttcgtgtgccacgagtacaaagcggcacctgacgtcgtggcacagattgcaggaggatgcaaggcgatcgggccgctcctggagctgtcggaggacgtgtttgaccacgcaatgaacgtaaacgtgaaggggacgtttctagtggtgcaagcagcagcacgagctatgctgaaacacaatgtgcagaatggctccatcatcactgttggcagtcttgcggcaaacaccccggaggaaacactgtctcactacggtgcggcgaaggccggagtggtgcagctcactcgtaccgcggccttggagctggcaccgcatggcatccgctgtaacgctgtcctacccggccccattgcgactgaatcgttgatggggggcgcgaaatacgtttctgaagacacgttcaagcaatgggtgaacactccgttagggcgccctggtcagccaacagaggtggccaatcttttcaccttcctggcttctgaggaaagcagctttgtgaatggagcagccattgagatttctggaggaaagcattag

SEQ ID NO: 59585 - protein, 258 aa, Branchiostoma belcheri
MAEGGKGRLTGKLALVTAGGGGIGRAVCQAFAREGAKVVVSDINGTTAKDTLSSLEGDPSSHRDYVADVSSSEDVQKMFDFVCHEYKAAPDVVAQIAGGCKAIGPLLELSEDVFDHAMNVNVKGTFLVVQAAARAMLKHNVQNGSIITVGSLAANTPEETLSHYGAAKAGVVQLTRTAALELAPHGIRCNAVLPGPIATESLMGGAKYVSEDTFKQWVNTPLGRPGQPTEVANLFTFLASEESSFVNGAAIEISGGKH

SEQ ID NO: 59586 - DNA, 777 bp, Botrytis cinerea
  CDS (1)..(777)
  misc_feature (153)..(153): s is g or c
  misc_feature (155)..(155): k is g or t
atgtcctctcaaccattcacgaacaaagttatcgctctcacaggctcagcttcgggcatcggcctagaaacagcaaagttacttgcaagtcgtggagcgagattgtcacttgcagatatccaagaagacaaattgaaggaacttcaagcgcastkggaatcagagtaccacgtggacgtgattaccactaaggtcgatgtaaggaagtttggagaggtggaagcatggattaacaagaccatagacaacttcggaaagctagatggctcggcaaatctggctggtgttgctccggagtctattggactaaaaggcatcgtcgaacaagacttggacgagtgggagtttgtcttgggagtcaatttgaccgggacaatgaacagtttgaaggctcagctgaaagtaatggctaacaacggctcgatcgtgaacgcttcgtcgattcggggattaaccggggcagcaaaaaatgcttcttattcttcagctaagcatgggattattgggctcacaagaacggcagcaaaggaagtaggtgggaaaggaattagagtgaatgcaatttgtccgggccgcatttctacaccaatgctaaagactgccgaaaactcgattggtcttcacctgcagcctggaagtgcaaattatccaccaattgcactggggagagacggagaagctaaggaggttgctcagctggttgcatttctgttgagtgatgagtcgacgtatatctcaggagctgacattagcattgatggcggatggagatgttag

SEQ ID NO: 59587 - protein, 258 aa, Botrytis cinerea
  misc_feature (51)..(51): The Xaa at location 51 stands for Gln, or His.
  misc_feature (52)..(52): The Xaa at location 52 stands for Leu, or Trp.
MSSQPFTNKVIALTGSASGIGLETAKLLASRGARLSLADIQEDKLKELQAXXESEYHVDVITTKVDVRKFGEVEAWINKTIDNFGKLDGSANLAGVAPESIGLKGIVEQDLDEWEFVLGVNLTGTMNSLKAQLKVMANNGSIVNASSIRGLTGAAKNASYSSAKHGIIGLTRTAAKEVGGKGIRVNAICPGRISTPMLKTAENSIGLHLQPGSANYPPIALGRDGEAKEVAQLVAFLLSDESTYISGADISIDGGWRC

SEQ ID NO: 59588 - DNA, 771 bp, Aedes aegypti
  CDS (1)..(771)
atgaattttgaacaacaagtggttttgattactggagcatcttctggaattggagaagcaacagcaaagtatctatccaatttaggagcatcgttagttcttactgggcgtaattcagagcatctcacaagagtcggagaagcatgcgaagcgatttcaaaaaccactccattgttactgattgctgacgtcactaatatagatgataacaagagagttatcgatgaaactatcgctaaatatggaaaactggatgtacttattaataatgctggcatactgtcaaacggatcaattgaaaacaccagtctccaacaatatgatgaaataatgaatacaaacgttagagctgtttatcatttgacaatgctggcagtacctcatttaataaaaagcaaaggaaacatcgtaaatgtaagcagtgtagctggaaacaggtcctttcccggaatattagcttacggaatgtctaaggcagcaatcgatcaattcactcgctgtacggccttagaactagcccccaagcaggttcgcgtgaatgctgtaaatccgggtgtcatagtaactgatattcacaagcgaggaggaatggatgaagaaacgtatgcagagtttttggaaaaatgcaaacagactcatgcgttaggtcgtccaggcgaatcaatggaagttgcttcagtaatagcatttcttgcatctgatgctgctagttttataacaggagtgaatttaaatgtggatggtggacgtcacgctatgtgcccacggtga

SEQ ID NO: 59589 - protein, 256 aa, Aedes aegypti
MNFEQQVVLITGASSGIGEATAKYLSNLGASLVLTGRNSEHLTRVGEACEAISKTTPLLLIADVTNIDDNKRVIDETIAKYGKLDVLINNAGILSNGSIENTSLQQYDEIMNTNVRAVYHLTMLAVPHLIKSKGNIVNVSSVAGNRSFPGILAYGMSKAAIDQFTRCTALELAPKQVRVNAVNPGVIVTDIHKRGGMDEETYAEFLEKCKQTHALGRPGESMEVASVIAFLASDAASFITGVNLNVDGGRHAMCPR

SEQ ID NO: 59590 - DNA, 786 bp, Bacillus thuringiensis
  CDS (1)..(786): transl_table=11
atgtatagtgatttagaaggaaaggttgtcgttattacaggatcagcaagtggtcttggaagagcaatgggagtaaggtttgctgcggagaaagcaaaggtagtgattaattatcgctcacgggagtcagaagcgaatgatgtgttagaagaaattaaaaaggtaggcggagaagcgattgctgtaaaaggtgatgtgacggtcgaatcagatgtggcgaatctcattcaatctgctgtgaaagagtttggtacgcttgacgttatgattaacaacgcagggatagaaaatgcggtaccatcgcatgaaatgccgcttgaagattggaatagggtaattaacacaaatttaacaggtgcttttttaggaagccgtgaagcgattaaatattttgtagaacatgatattaaaggatctgtcattaacatgtcgagtgttcatgagaaaattccgtggccgctattcgtgcattatgcagctagtaagggcggtatgaaactaatgacagaaacgttagcgttagaatatgcaccaaaaggtattcgagtaaataatatagggccaggtgcaattaatacgccgatcaatgcagaaaagtttgctgatcctaaaaaacgtgctgacgtagaaagtatgataccgatgggctacattggaaaaccggaagaaattgcagcagtcgcaacgtggctcgcttcctcagaggcgagttatgtaactggaattacgctatttgcagatggtggaatgacgttatacccatcatttcaagctgggcgagggtaa

SEQ ID NO: 59591 - protein, 261 aa, Bacillus thuringiensis
MYSDLEGKVVVITGSASGLGRAMGVRFAAEKAKVVINYRSRESEANDVLEEIKKVGGEAIAVKGDVTVESDVANLIQSAVKEFGTLDVMINNAGIENAVPSHEMPLEDWNRVINTNLTGAFLGSREAIKYFVEHDIKGSVINMSSVHEKIPWPLFVHYAASKGGMKLMTETLALEYAPKGIRVNNIGPGAINTPINAEKFADPKKRADVESMIPMGYIGKPEEIAAVATWLASSEASYVTGITLFADGGMTLYPSFQAGRG

SEQ ID NO: 59592 - DNA, 783 bp, Bacillus licheniformis
  CDS (1)..(783): transl_table=11
gtgtttaggttgtatagtgatttaaaaggaaaaacagcaattgtgaccggctcttcaaaaggtataggcaaggcggttgcagaacggtttggaaaagaaaagatgaatgtggttgtcaattatcacagcgatcccggaggcgcacgggaagccgtcgacaatattcaagcagcgggcggaaacgcccttgcgatagaagctgacgtgtcttccgaagaggacgtgaaaaagctgattaattcagcagttgaacactttggttcacttgatgttatggtcaataattcaggatttaacggcgcgggcgcctttccgcacgaacttgagcttgatgagtggcagaaagtgatcgacgttaatttaaccggtgcgtttctctgcgcacgcgaagccttaaaatatatggcggaccgccgcatgaaaggaagcatactcaatatatccagcgttcatcagcaaattccgagaccgaaaaatgttcactactccgcttcaaaaggcggaatgaagctgttaacagaaacgcttgccctagactatgcggacaaaggaatccgcgtcaatgcgattgcgccgggaacgattgcgaccgaaagcaatgaagacttggagggaagccgcaagtcggaacagctgaaaaagatacccatgaacgaatttggcgagcctgaacaagtggcttccgcagcggcatggcttgtgtcgcaagaagccgcctatgtaacgggcgcgactttattcgttgacggcggcatgacgctgtatccatcacagctggaatag

SEQ ID NO: 59593 - protein, 260 aa, Bacillus licheniformis
MFRLYSDLKGKTAIVTGSSKGIGKAVAERFGKEKMNVVVNYHSDPGGAREAVDNIQAAGGNALAIEADVSSEEDVKKLINSAVEHFGSLDVMVNNSGFNGAGAFPHELELDEWQKVIDVNLTGAFLCAREALKYMADRRMKGSILNISSVHQQIPRPKNVHYSASKGGMKLLTETLALDYADKGIRVNAIAPGTIATESNEDLEGSRKSEQLKKIPMNEFGEPEQVASAAAWLVSQEAAYVTGATLFVDGGMTLYPSQLE

SEQ ID NO: 59594 - DNA, 825 bp, Streptomyces steffisburgensis
  CDS (1)..(825): transl_table=11
gtggctctagcggcggtccctaccttcggccgcgtgaccgaattcgaggagaacccgaaggaagacgccggggagaacgccgactcccgcggcgtgatcgtcaccggcggcggcaccggcatcggccgggccaccgcgcgggcgttcgccgaccgccaggacagggtcctcgtggtcggccggtccgcctcgacgctgaccgagaccgcccggggctacccgaacatccataccctgcccgtcgacatcaccgagccgggagcggccgagacgatcgtgcgtgcggcgctccgggagttcggccggatcgacgtcctggtgaacaacgcctccaccgccgtgccggcaccgctggagaacatcgcgccggcggaggtcgaccggctgctggccgtcaatctgcgtgcgccgatcgctctcacccgggaagcgctggacgcgctgaccaggacccgcggcaccgtggtgaatctcagcagcgccggctccctcggccggcgtgcctggccgaacttctcgctctacggatccagcaaggtcgccttggacttcctcacccggacctgggccgtggaactggctccccgcggaatccgcgtggtctccgtcgccccgggggtgatcgagacgggcatgggcatccgcatgggctccagccccgaggaatacgcgcggtttctggagtggatggagaagatcaccccgctcggccgggtcggacagcccgaggagatcgcctggtgggtggtgcaggtcgcggcgccggaggcgggcttcgtcacgggcacggtgctcgcggtcgacggcggagcgagcatcgtctga

SEQ ID NO: 59595 - protein, 274 aa, Streptomyces steffisburgensis
MALAAVPTFGRVTEFEENPKEDAGENADSRGVIVTGGGTGIGRATARAFADRQDRVLVVGRSASTLTETARGYPNIHTLPVDITEPGAAETIVRAALREFGRIDVLVNNASTAVPAPLENIAPAEVDRLLAVNLRAPIALTREALDALTRTRGTVVNLSSAGSLGRRAWPNFSLYGSSKVALDFLTRTWAVELAPRGIRVVSVAPGVIETGMGIRMGSSPEEYARFLEWMEKITPLGRVGQPEEIAWWVVQVAAPEAGFVTGTVLAVDGGASIV

SEQ ID NO: 59596 - DNA, 810 bp, Aspergillus oryzae; identical to SEQ ID NO: 40513
  CDS (1)..(810)

SEQ ID NO: 59597 - protein, 269 aa, Aspergillus oryzae; identical to SEQ ID NO: 40514

SEQ ID NO: 59598 - DNA, 954 bp, Aspergillus oryzae
  CDS (1)..(954)
atgcgctctgccttatcccagatgctgttccaagcaagccgttcatggcaaccaagcacaaccctccgcccactcacacgactctcatattccacaactactactacccatggagcgcatcacattcaaacgcggatgcctccaaaggaatcaatcaagaacgggcatcgttttaaggagttcgacctcaatgaccgcgtctacgccatcaccggcggtggaagaggacttggtttagccatggccgaagccctaatggaagccggcgccaaagtctactgcctcgaccgcctcgaaaacccccacccagacttcatggccgcaaaagagcactcggaaaccaactacggcggcagcctggagtactaccgaatcgacgtccgcgatgatgcagaagtaaacaacgtgttcgccgaaattgccggccagaacaagcgtcttgatggtctgatcgccgccgccggaatcaaccatctccagagcgccctcgagcactcccaaaccgccatgaacgaagtcatgcagatcaactacaacggagtgttcaactccgccaccgctgccgcccgccagatgttcaactaccagcagaagggctccatcctgcttatcgcgagcatgagcggtctcatcgccaacaagggcatgacttcccctgtctacaactcctccaaagcggccgtcattcagctggctcgctcgctcgcaatggaatggggccgccacggtatccgtgtgaacagtctctgccctggtcacatcatcacccccatggtcgagcaggtgtttcagcagaacccggcctctcgggctgtctgggaggcagagaacatgcttgggcggttggcgtaccctgaggaattcagaggtgctgccctcttcgctctcagtgatgctagcagcttcatgacgggcagcacgatgctcattgatggtggccacaccgcgtggtaa

SEQ ID NO: 59599 - protein, 317 aa, Aspergillus oryzae
MRSALSQMLFQASRSWQPSTTLRPLTRLSYSTTTTTHGAHHIQTRMPPKESIKNGHRFKEFDLNDRVYAITGGGRGLGLAMAEALMEAGAKVYCLDRLENPHPDFMAAKEHSETNYGGSLEYYRIDVRDDAEVNNVFAEIAGQNKRLDGLIAAAGINHLQSALEHSQTAMNEVMQINYNGVFNSATAAARQMFNYQQKGSILLIASMSGLIANKGMTSPVYNSSKAAVIQLARSLAMEWGRHGIRVNSLCPGHIITPMVEQVFQQNPASRAVWEAENMLGRLAYPEEFRGAALFALSDASSFMTGSTMLIDGGHTAW

SEQ ID NO: 59600 - DNA, 786 bp, Aspergillus oryzae
  CDS (1)..(786)
atgacgggaaacgagcagaaattctcgctccagggcaaggttgccattgtgaccggtgctgggtccggaattggaagagaaacggcattgtgtctcgccaatgctggggcaaatgtagtcgtggctgaagctaatgaaacgacgggcaaggagactgcggccaaggtttccgcacaaacaggcagtcgaggcctgtttatcctgaccgatgtgtctcggagcgaaagcgtccaggccatggtcatcgccaccatcgaggcctttgggcgtctcgatattgcagtgaacaacgccgccctgcacccagacgcatcccctatcgcagaactccacgaggatcactggcagaagatcatcggggtgaaccttgtgggcgtcgcattctgtctcaagtgggaacttcagcagatgatccagcaagggggtggtggctccattatcaacatcagctctgccacaatcaaccggccccaagaaaaaatgtcagcgtacatcgccgcgaagcacggtatcactggtttgactcagacggctgctgtcgagaatggacgacacggaattcgggttaatgcgctcgccccagggggggtggccactgatctgacgatggcgaccatgcaggaattagggctcaccgaggaaaacgaggcggcccggagtagcctcttcaaacgattcgcgaagcccgaagaaatcgcgcaatcggtactttggctagcatcagatgctgcttcgtacgttactggggccactattgccgtggattcaggactgtcgttgatttga

SEQ ID NO: 59601 - protein, 261 aa, Aspergillus oryzae
MTGNEQKFSLQGKVAIVTGAGSGIGRETALCLANAGANVVVAEANETTGKETAAKVSAQTGSRGLFILTDVSRSESVQAMVIATIEAFGRLDIAVNNAALHPDASPIAELHEDHWQKIIGVNLVGVAFCLKWELQQMIQQGGGGSIINISSATINRPQEKMSAYIAAKHGITGLTQTAAVENGRHGIRVNALAPGGVATDLTMATMQELGLTEENEAARSSLFKRFAKPEEIAQSVLWLASDAASYVTGATIAVDSGLSLI

SEQ ID NO: 59602 - DNA, 771 bp, Aspergillus oryzae
  CDS (1)..(771)
atgagtctgtcaggcaagatagctatcgtgaccggtgcctctcgcggcattggtgcgagtattgcactggagcttgcaaaacagggagccaaggttatgctcacctacgtatcaaccagcagtgacaatgccgtcgaagaagtcatacaacaaatacgcagtctaaacaacggctccgaagccaccaaagtacaaatcgacctacaccagccctcagcccccgaaacaatcctctcagctaccttccgcgcctttccctcaagcgacaacaaagtggacatacttgtcaacaacgcaggacaaacacagtacaagcttctcgcgggcacagaaatagaggactacacctccatgttcgatgtgaacgtccgcagcaccattttcatggccaaggctgtgttgctgtatctccgtgccccggggcgtattatcaacattacgtctgttgcggctcgtcggggatcggtgggattttctatttactcagctacgaaggctgctgtggaggggtttactagggctttggcgtgcgaggtgggatcgtatggccatactgttaatgctgttgcccctggggctgtggagtcggatatgcttcggggatcggtgcctgatgaatttgtgaagtatatgttggataacacgccgcttgggaatagaatagggactccggaggagattgctgctgttgtggccttcttggctgatccgaaggcgggttggttgacgggtcagactatatgtccaagtgggggactgaacatgatttga

SEQ ID NO: 59603 - protein, 256 aa, Aspergillus oryzae
MSLSGKIAIVTGASRGIGASIALELAKQGAKVMLTYVSTSSDNAVEEVIQQIRSLNNGSEATKVQIDLHQPSAPETILSATFRAFPSSDNKVDILVNNAGQTQYKLLAGTEIEDYTSMFDVNVRSTIFMAKAVLLYLRAPGRIINITSVAARRGSVGFSIYSATKAAVEGFTRALACEVGSYGHTVNAVAPGAVESDMLRGSVPDEFVKYMLDNTPLGNRIGTPEEIAAVVAFLADPKAGWLTGQTICPSGGLNMI

SEQ ID NO: 59604 - DNA, 762 bp, Aspergillus oryzae
  CDS (1)..(762)
atgtcacttcagggcaaggtgtatgctgttacaggcggtgcgagtggcataggctttgcaacagccaaactcatctcggaacgcgggggaacagtgtgcattgccgacgttaatgcagattgcctcggcaatgttgagtcgtacttctctgccaaaagcccctctgttgaattcatgatcacccaagtcgatgtttcgaacaaacaacaggttgagaactggattgccgacattaagacgaaataccatcggctcgatggggcagccaacattgccggtgttatcggaaaggaccatgggatcaagacggtggcagaattggaagatgacgaatggaataaaatcatcagtgtgaatctgacaggaacgatgtattgcctccgggcagagctcaaccacattgtggacggtggctcaatcgtcaatatggcgtccatccatgccaccacgggcgtggcaaaccatggtgcgtatgcagcgagtaaacatggtgttttgggtcttactcgagttgctgcaaaggagaatggtcaccgggaagttagggttaatgcagttgctccgggaccaatctatactccaatgatgcaagggttttatgaccgaatcgaacgaccgtctgatgcgccgtttgatgaccctatcgcttttaaacggcagggcactcctgaggaagtggctaaggtggttgtatttttgctggggccggaaagctctttcgtgagcggaagttgttacccggttgatggagcctgggtttga

SEQ ID NO: 59605 - protein, 253 aa, Aspergillus oryzae
MSLQGKVYAVTGGASGIGFATAKLISERGGTVCIADVNADCLGNVESYFSAKSPSVEFMITQVDVSNKQQVENWIADIKTKYHRLDGAANIAGVIGKDHGIKTVAELEDDEWNKIISVNLTGTMYCLRAELNHIVDGGSIVNMASIHATTGVANHGAYAASKHGVLGLTRVAAKENGHREVRVNAVAPGPIYTPMMQGFYDRIERPSDAPFDDPIAFKRQGTPEEVAKVVVFLLGPESSFVSGSCYPVDGAWV

SEQ ID NO: 59606 - DNA, 840 bp, Aspergillus oryzae
  CDS (1)..(840)
atggctactccaacaggccgtcttcaagacaagaatgctataatcactggtgctgcaggagggatcggtctcgagactagtatcctcttcgcccgcgaaggtgccaatgtcctcatggccgacatctctgctcctgccctcgagaaagccctcgccaaagtgaaggaggttgtccccaatgccccacgggttgaaactttcaagtgcgatgtttccaaggagtccgaggtacaagcgatggtggaatctcaagacagctggggcggaactgacgtgatcttcaataacgctggtattatgcatgctgacgatgccgacgccgtggacacgccagagaagatttgggatttgacacagaacattaatgtgaagggggtgtggtttggatgcaagcacgccgtgctcagtctccgtcgtcataagaagaccaagggtagcattatcaacactgctagtgtagttgccttagtgggtagtgccactcctcagctggcttacactgccagcaagggcgcggtgctggccctgacccgtgaactagccattgtgcatgctcgggagggattccgcttcaatgcactgtgccccgccccgctaaacaccccgctcttgcaggactggctaggcgatgataagcctaagcggttccgtcgtgaggtgcatttcccgaccggacggttcggcgaggcaatcgagcaagcgcatgcagtcgttttccttgctagcgacgaaagcagcttcgtcaacggtcacgactttgttgttgacggtggaatgtcgaaggcatacgtcacccccgagggaccagccacccctgctcccaagaacttgggtcactaa

SEQ ID NO: 59607 - protein, 279 aa, Aspergillus oryzae
MATPTGRLQDKNAIITGAAGGIGLETSILFAREGANVLMADISAPALEKALAKVKEVVPNAPRVETFKCDVSKESEVQAMVESQDSWGGTDVIFNNAGIMHADDADAVDTPEKIWDLTQNINVKGVWFGCKHAVLSLRRHKKTKGSIINTASVVALVGSATPQLAYTASKGAVLALTRELAIVHAREGFRFNALCPAPLNTPLLQDWLGDDKPKRFRREVHFPTGRFGEAIEQAHAVVFLASDESSFVNGHDFVVDGGMSKAYVTPEGPATPAPKNLGH

SEQ ID NO: 59608 - DNA, 774 bp, Streptomyces natalensis
  CDS (1)..(774): transl_table=11
atgactcatcagcacggtctgctttccggcaaggtttccctgatcacaggagccagtagtgggattggcgcggcaaccgcgaggctttttgcgcgagaaggtgcggcggtggtgcttgcggcccgccgggtggaccgcctccgcgctcttgtgtcggagatacgtcggaccggagccgaggcggcgtacatcgcgacggatgtgtctcaggaggaggacgtgagacgtgccgtggaattcactgtggagaagtacgggcgcctggatctggcattcaacaacgcgggcgtcggctgtgatcacgagtccatgcacttgatgcaacaggatacgtacgacgacgtgatgggaaccaatgtccgtggtgtgtggcattgcctgcaacacgagatttccgcgatgctgcacaacggcgtgggcggttccatcgtcaacaacagcagtgtcgccggactgcaggcgatccctgccggggcgccttacatcgcctccaagcacgccgtcatcgggctgaccaaggcggctgcggccgaatacgcgccgcagggcatccgcgtcaactccgtggcgcccgggacgacccgtaccgagatcattgccggttggttcgatcggaaccccgggctggaggagcagttgcaccgtgcgacgccgcaggcccgtaccgccgaacccgaggagatagcccaggccgtcgcctggttgtgcagcgaccggtcttccttcgtcacgggtgcggtgctgcccgtggacggcgggtacaccctggtgtga

SEQ ID NO: 59609 - protein, 257 aa, Streptomyces natalensis
MTHQHGLLSGKVSLITGASSGIGAATARLFAREGAAVVLAARRVDRLRALVSEIRRTGAEAAYIATDVSQEEDVRRAVEFTVEKYGRLDLAFNNAGVGCDHESMHLMQQDTYDDVMGTNVRGVWHCLQHEISAMLHNGVGGSIVNNSSVAGLQAIPAGAPYIASKHAVIGLTKAAAAEYAPQGIRVNSVAPGTTRTEIIAGWFDRNPGLEEQLHRATPQARTAEPEEIAQAVAWLCSDRSSFVTGAVLPVDGGYTLV

SEQ ID NO: 59610 - DNA, 747 bp, Streptomyces sp
  CDS (1)..(747): transl_table=11
atggaattcgaaggtcaggtcgcgctcgtgacgggggccgccaagggcatcggccgtgcgacggtcgtccggctggcggaagccggatgcgacattgcgctcaactaccacagctcgaagtcacaggctgaagaagccgccgagcgcatcgccgcactgggccgcaaggtcgaactgttcccgggtgacatctcccgccccgagaccgcacggcagctggtggccgcggtgcaccagaagttcgaccggatcgacattctggtgaacaacgcgggcatggcgcgggacaagctcctgttgaccatggaggcggacgacatccaccaggtcatcgccaccaacctcgtcggcccgatgttcctcacccaggccgtcgcactcaccatgctgcgtcagcgttccggacgcatcgtcaacatcacctccgcggccgcgagcaagcccggaaaaggccagtccaactacgtcgcgtccaagggcggcctggaggcgttcaccaaggcgatggcggtggaactcggatcccgtggaatcctcgtcaacgcggtcgctcccggcatcgtcaagaccgatctgaccgaggctctccgcgacggggcgcagccggaactcctggcccggcaggtgatcgggtccttcgccgagcctgaggcggtggcagaggcagtggcctacctggcgagccctcgcaacacgcacacgacgggcacggtcctcaccgtcgacggcggcctcaagatggtgtga

SEQ ID NO: 59611 - protein, 248 aa, Streptomyces sp
MEFEGQVALVTGAAKGIGRATVVRLAEAGCDIALNYHSSKSQAEEAAERIAALGRKVELFPGDISRPETARQLVAAVHQKFDRIDILVNNAGMARDKLLLTMEADDIHQVIATNLVGPMFLTQAVALTMLRQRSGRIVNITSAAASKPGKGQSNYVASKGGLEAFTKAMAVELGSRGILVNAVAPGIVKTDLTEALRDGAQPELLARQVIGSFAEPEAVAEAVAYLASPRNTHTTGTVLTVDGGLKMV

SEQ ID NO: 59612 - DNA, 795 bp, Pantoea ananas
  CDS (1)..(795): transl_table=11
atgagcggtgaatatgacgttaacctgcgctatggcgtagacaccacaacgaatctgagcggcaaagtggccgtggtgacgggcgggctgggcggtattgccatggccagtaatcagatgctgctggagaaaggggcgagcctggcgctgctttatccgccctttgaagcggataaggtcgacagtgcgcgcgcagccctggccggacaggtgcagtttatttgctgcgatgtaaccgatcctgccgacgttgagcaggcgttcgacgccattgttgatcactacggtcatatcgacattctggtgaactgtgccggctacgtgatgcttcagcccgtgctggaaaccgattttgccgagtggcaaaagcagatcgccgtgaacctgaccgggccttttctgtgctcacaggctgcgggcaagcagatggtcaaggcgggcaacggcggcaagatcatcaatatcgcctctcaggcggcgtccatcgccatcgacaaccacgttgcttatacctccgccaaagccgggttactgggcatgaccaaagtgatggcgaaagagtttgctccgcaccgcattaacgtgaataccctgtcgcccactgtggtgctgaccccgatgggggaaaaagcctggcgcggtgagaagggcaccgaaatgaaaaaactgatcccgttaggccgctttgcctacaccgacgagatcgccgccgccgtgctgttttttgccagcaacggcagcgacatgattaccggggccgacctgatgatcgacggtggctttaccatctggtaa

SEQ ID NO: 59613 - protein, 264 aa, Pantoea ananas
MSGEYDVNLRYGVDTTTNLSGKVAVVTGGLGGIAMASNQMLLEKGASLALLYPPFEADKVDSARAALAGQVQFICCDVTDPADVEQAFDAIVDHYGHIDILVNCAGYVMLQPVLETDFAEWQKQIAVNLTGPFLCSQAAGKQMVKAGNGGKIINIASQAASIAIDNHVAYTSAKAGLLGMTKVMAKEFAPHRINVNTLSPTVVLTPMGEKAWRGEKGTEMKKLIPLGRFAYTDEIAAAVLFFASNGSDMITGADLMIDGGFTIW

SEQ ID NO: 59614 - DNA, 765 bp, Serratia marcescens
  CDS (1)..(765): transl_table=11
atgggcgatcttgcgggcaaaaaggtctttatcaccggggcggaacagggcatcggccgcgccaccgcggagcggctgatcaaggccggttgcgacatctattttcactatcacagcgacgaaagcggccccaaagcgctggtggcgctggcccattcattggggcaaaaggccgcttacggctacgccgatctcatcgataccgacgaaacgctgcgctgcgtctcggccggcgccgagtttctcggcggcatcgatattctgatcaataacgtcggcggcatcgtcgggcgcaaatggctgggcgagatcgatcgcgccttctggcaaaccgtgatcgacgtaaacatgaccaccatgctgaacgtgacccagagcgcgctgccgcacctgaaggcggcgccgaacggcgccagcatcatcaacctggcctcgctggccggccgcgctggcgggcacgccggctcgctggtctattccgccaccaaaggcgcggtgctcacctggacgcgctcgctggcggcggagctgggcgagcacggcatccgggtgaacgcggtggcgcccggcctgatcctcggcacccgctttcataatcgccacaccacccaggcatcggcggaggaaaccgttcgcgccatcccgctgggccgcgcaggcacgccggacgacgtggcgcgcgccatcgccttcctggcggcggaatacgacggcttcatctccggcgcgactctcgacatcaacggcggcatctaccgcatgtaa

SEQ ID NO: 59615 - protein, 254 aa, Serratia marcescens
MGDLAGKKVFITGAEQGIGRATAERLIKAGCDIYFHYHSDESGPKALVALAHSLGQKAAYGYADLIDTDETLRCVSAGAEFLGGIDILINNVGGIVGRKWLGEIDRAFWQTVIDVNMTTMLNVTQSALPHLKAAPNGASIINLASLAGRAGGHAGSLVYSATKGAVLTWTRSLAAELGEHGIRVNAVAPGLILGTRFHNRHTTQASAEETVRAIPLGRAGTPDDVARAIAFLAAEYDGFISGATLDINGGIYRM

SEQ ID NO: 59616 - DNA, 756 bp, Streptomyces peucetius; identical to SEQ ID NO: 40535
  CDS (1)..(756): transl_table=11

SEQ ID NO: 59617 - protein, 251 aa, Streptomyces peucetius; identical to SEQ ID NO: 40536

SEQ ID NO: 59618 - DNA, 786 bp, Streptomyces peucetius
  CDS (1)..(786): transl_table=11
atgtccgaggcagccgaccgggtcgcactcgtcaccgggggaaccagcggcatcggtctcgcggtggtgcgcaagctcgcccaggacgggacccgggtgttcctgtgcgctcgtgacgagagcgccatcaccggcaccgtgaaggaacttcaggcatcgggactggaggtggacggcgcgccctgcgacgtgcggagcaccgccgacgtcgaccggctggtccaaacggcccggaaccgcttcgggccgatcgacatcgtcgtcaacaacgccggccgcggcggtggaggcgtgaccgccgagatcacggacgacctgtggctcgacgtcgtcgacaccaacctcagcggggccttccgggtcacccgcgccgtcctcaccggcggcgccatgcaggagcacggctggggccggatcatcagcatcgcctccaccggcggcaagcagggagtggccctcggcgccccctactccgcctccaagagcggcctgatcggcttcacgaaggccgtcgcgctggagctggccaagacgggcatcaccgtcaacgccgtctgccccgggtacgtcgagacgcccatggcacagggcgtgcggcagcgctacgccgccttctgggggatcaccgaggacgacgtcctggagaagttccaggcgaagatccccctcggacgctactcgatgcccgaggaggtggccgggatggtgcactacctggcctccgacagcgccgactcgatcacggcccaggccatcaacgtctgtggtggcctcggcagctactga

SEQ ID NO: 59619 - protein, 261 aa, Streptomyces peucetius
MSEAADRVALVTGGTSGIGLAVVRKLAQDGTRVFLCARDESAITGTVKELQASGLEVDGAPCDVRSTADVDRLVQTARNRFGPIDIVVNNAGRGGGGVTAEITDDLWLDVVDTNLSGAFRVTRAVLTGGAMQEHGWGRIISIASTGGKQGVALGAPYSASKSGLIGFTKAVALELAKTGITVNAVCPGYVETPMAQGVRQRYAAFWGITEDDVLEKFQAKIPLGRYSMPEEVAGMVHYLASDSADSITAQAINVCGGLGSY

SEQ ID NO: 59620 - DNA, 747 bp, Serratia marcescens
  CDS (1)..(747): transl_table=11
atgacgaaagtggcattggtaaccggcgcaagccgggggattggccgcgcgaccgcctttctgctggcccggcagggctatgcggtgggtgtgaattacctgcgtgacgaaaatgcggcgcgccaggtggtggcggagatcgaggcacagggcggcaaggcgctggcgctgcaggccgatgtggccgatgaagcgcaggtgatggcgatgttcagggcgctggatgccgggctgggcacgctcagcgcgctggtcaacaacgccggcattctgttccggcaggcgaacattgaacagttgaccgccgagcgcatcaatcaggtgctcggtaccaacgtcaccggttacttcctgtgttgccgcgaggcggtgaaacgcatggcgcagcgtcatggcgggcagggcggcgctatcgtcaatgtgtcttccgccgcttctcgtttaggcgcgccgggggagtacgtggattatgccgcctcgaaaggcgccgtcgattcgttgaccatcgggctatcgctggaggtggcggcgcagggcatccgcgtcaacggcgtgcggcctggacttatctataccgagatacatgccagcggcggcgaacccggccgggtggatcgcgtgaagggcagtttgccgatgcagcgcggcggccagccgcaagaagtggcggaggcgatcgcttggctgctgtctgacgctgcgtcttacgtgaccggtacttttatcgaggcagcaggcgggcgttga

SEQ ID NO: 59621 - protein, 248 aa, Serratia marcescens
MTKVALVTGASRGIGRATAFLLARQGYAVGVNYLRDENAARQVVAEIEAQGGKALALQADVADEAQVMAMFRALDAGLGTLSALVNNAGILFRQANIEQLTAERINQVLGTNVTGYFLCCREAVKRMAQRHGGQGGAIVNVSSAASRLGAPGEYVDYAASKGAVDSLTIGLSLEVAAQGIRVNGVRPGLIYTEIHASGGEPGRVDRVKGSLPMQRGGQPQEVAEAIAWLLSDAASYVTGTFIEAAGGR

SEQ ID NO: 59622 - DNA, 786 bp, Bacillus subtilis
  CDS (1)..(786): transl_table=11
atgcatacattgcttattgaaaaaacagccgttgtaacaggtgcagccggaggaatcgggcttgaaatcgcaaaagaattcgcccgtgaaggagcagccgtcatcatctctgatataaacgaacaagcggggaaagaagcggcggcaagactgaaagatgaaggctgtgaagcagtcagcatcacatgcgatgtaacaaatgaaaagcaagtggccgacatgctgcagacggtcgagaaacaattcggacgtctcgatatccttgtgaataatgccggcattcagcatgtcgcgcccatcgaggaatttcccaccgaacagtttgaacggctcattcgtctcatgctgactgcgccatttatcgcaatgaagcatgcatttcccattatgaaaaaacagcaattcggtcgaatcattaatatggcgtctgttaacggactgatcggttttcacgggaaagcggcatataacagcgccaagcacggcgtcatcggtttaacgaaagtcggcgcacttgaaggcgcggctgacggcatcaccgtcaatgcgctttgtccgggatatgtggacactcagcttgtccgcaatcagttaaaggacatttccgcaacaaggaatgtaccgtacgaacgggtgcttgaggacgtcatctttccgctcgtcccccaaaaacggctgctgtcagtgaaggaaatcgctgattacgccgtatttttggccagcgacaaagcaaaaggggtcacaggtcaggccgtagttatggatggcgggtataccgctcaatag

SEQ ID NO: 59623 - protein, 261 aa, Bacillus subtilis
MHTLLIEKTAVVTGAAGGIGLEIAKEFAREGAAVIISDINEQAGKEAAARLKDEGCEAVSITCDVTNEKQVADMLQTVEKQFGRLDILVNNAGIQHVAPIEEFPTEQFERLIRLMLTAPFIAMKHAFPIMKKQQFGRIINMASVNGLIGFHGKAAYNSAKHGVIGLTKVGALEGAADGITVNALCPGYVDTQLVRNQLKDISATRNVPYERVLEDVIFPLVPQKRLLSVKEIADYAVFLASDKAKGVTGQAVVMDGGYTAQ

SEQ ID NO: 59624 - DNA, 747 bp, Streptomyces bikiniensis
  CDS (1)..(747): transl_table=11
atggaattcgaaggtcaggtcgcgctcgtcaccggggccggcagggggatcggccgtgcgacggtcgtccgcctcgcggaggccggatgtgacatcgccctccactacaaccaagcgaaagcgcaggccgaggaagtcgccgagcgcatcgccgcactgggccgcacggtcgaactgttcccgggcgacctctcccgccccgagaccgggcgacagctcgtggccgcggtgcagcagaagttcgaccggatcgacatcctggtgaacagcgcgggcatcacacgggacaaactcctgctgtccatggaggcggacgacatccaccaggtcatcgccaccaacctcgtcggcccgatgttcctcacccaggcggtcgcgctcaccatgctgcgtcaacgctccgggcgcatcgtcaacatctcctccgccgccgcgagcaggcccggaaagggccagtccaactacgccgcgtccaaggccggtctggaggccttcaccagggccatggcggtggaactcggatcccgcggaattctcgtcaacgcggtcgctcccggcatcgtcaagaccggcctgaccgaggctctccgcgagggggcggagcccgaactcctggcccggcaggtgatcggttccttcgccgaacccgaggcggtggcggaggcggtggcctacttggcgagcccgcgcaacacgcacacgacgggcacggtcctcaccgtcgacggcgggctcaagatggtgtga

SEQ ID NO: 59625 - protein, 248 aa, Streptomyces bikiniensis
MEFEGQVALVTGAGRGIGRATVVRLAEAGCDIALHYNQAKAQAEEVAERIAALGRTVELFPGDLSRPETGRQLVAAVQQKFDRIDILVNSAGITRDKLLLSMEADDIHQVIATNLVGPMFLTQAVALTMLRQRSGRIVNISSAAASRPGKGQSNYAASKAGLEAFTRAMAVELGSRGILVNAVAPGIVKTGLTEALREGAEPELLARQVIGSFAEPEAVAEAVAYLASPRNTHTTGTVLTVDGGLKMV

SEQ ID NO: 59626 - DNA, 741 bp, Lyngbya majuscula
  CDS (1)..(741): transl_table=11
atgggaaaactacaaggtaaggttgctattattacgggtggttcgcgaggcattggacgagcaatagcagagcgacttgctcaggatggagcgacaataatgctaacctacttacggaacaaagcgcttgctgaagcggtagttgctcagattgaaacacaggggggacaggctagagcaatggcggttgacctagctcaacctgctgatattgaacgactcttcgagatgaccgaggcgacatggcaacgacttgatattcttgttaacagtgcggctgaactacagactggcagcattgaatcgttttcaattcatgattggcagcgggtatttgcagtcaattctacagctccctttctcacaatccagcaagcggctcgtcgtttaagtgcccatggccgtattgttaatgtctctacaatcaatacagtcttggcagaacctggcattgcggcctatgctgcaagtaaaggctctctagaacaattgactcgtgtcgctgcatgggaattggctgatcgaggaattacggtcaattctgtatcaccgggacccacagatacagacttgcttcggacaggtaatccacctgaagttttggagcaagccattgcgatgactcctttagggcgtcttgggcaacctaaagatattgccgacgtagtggcctttcttgttgggaatgacgggcgttggataacaggacaaaatttgagagttacaggagggttgatctaa

SEQ ID NO: 59627 - protein, 246 aa, Lyngbya majuscula
MGKLQGKVAIITGGSRGIGRAIAERLAQDGATIMLTYLRNKALAEAVVAQIETQGGQARAMAVDLAQPADIERLFEMTEATWQRLDILVNSAAELQTGSIESFSIHDWQRVFAVNSTAPFLTIQQAARRLSAHGRIVNVSTINTVLAEPGIAAYAASKGSLEQLTRVAAWELADRGITVNSVSPGPTDTDLLRTGNPPEVLEQAIAMTPLGRLGQPKDIADVVAFLVGNDGRWITGQNLRVTGGLI

SEQ ID NO: 59628 - DNA, 786 bp, Bacillus amyloliquefaciens
  CDS (1)..(786): transl_table=11
atgcattcattgcttattgaaaaaacagccgttgtaacaggtgcagcaggaggaatcgggctcgaaatcgcaaaagaattcgcccgtgaaggagcagccgtcatcatctctgatgtaaacgaacaagcggggaaagaagcggcggcaaaactgacagatgaaggctgtgaagcagtcagcatcacatgcgatgtaacaaatgaaaagcaagtggccgacatgctccagacggtcgagaaacaattcggacgtctcgatgtccttgtgaataatgcgggcattcagcatgtcgcgcccatcgaggaatttcccaccgaacagtttgaacggctcattcgtctcatgctgactgcgccatttatcgcaatgaagcatgcatttcccattatgaaaaaacagcaattcggtcgaatcattaatatggcgtctgtcaacggactgatcggttttcacgggaaagcggcatataacagcgccaagcacggcgtcatcggtttaacgaaagtcggcgcacttgaaggcgcggctgacggcattaccgtcaatgcgctttgtccgggatatgtggacactcagcttgtccgcaatcagttaaaggacatttccgcaacaaggaatgtaccgtacgaacgggtgcttgaggacgtcatctttccgctcgttccccaaaaacggctgctgtcagtgaaggaaatcgctgattacgccgtatttttggccagcgacaaagcaaaaggggtcacaggtcaggccgtagtcatggatggcgggtataccgctcaatag

SEQ ID NO: 59629 - protein, 261 aa, Bacillus amyloliquefaciens
MHSLLIEKTAVVTGAAGGIGLEIAKEFAREGAAVIISDVNEQAGKEAAAKLTDEGCEAVSITCDVTNEKQVADMLQTVEKQFGRLDVLVNNAGIQHVAPIEEFPTEQFERLIRLMLTAPFIAMKHAFPIMKKQQFGRIINMASVNGLIGFHGKAAYNSAKHGVIGLTKVGALEGAADGITVNALCPGYVDTQLVRNQLKDISATRNVPYERVLEDVIFPLVPQKRLLSVKEIADYAVFLASDKAKGVTGQAVVMDGGYTAQ

SEQ ID NO: 59630 - DNA, 930 bp, Oryza sativa subsp
  CDS (1)..(930)
atggagataagaagcagaagagacagatcaaagatcaagatgttcagagcattgcagatcgtcctcaggggtaagagccgaggatttgtcagtcacttctcctccacggcttcaaattctgaaaggttggctgggaaggtggcggtgatcaccggcgcggcgagcggcatcggcaaggcgaccgcggcggagttcgtcaggaatggcgccaaggtcatcctcgccgacgtccaggacgacgtcggccgcgccgtcgcctcggagctcggcgcggacgcggcgtcgtacacccgctgcgacgtcaccgacgaggcgcaggtcgcggcggccgtggacctcgccgtggcgcggcacgggcagctcgacgtcatggtcaacaacgccggcatcgtgggctccctgtcgcgccccccgctcggcgccctcgacctcgccgacttcgacgccgtcatggcggtgaacacgcgcggcgtcctcgcgggcgtcaagcacgccgcgcgcgtcatggcgccgcgccgccgcggcagcatcatctgcgtggcgagcgtcgccggggtgctcggcagcgtgacgccgcacccgtacagcgtgtccaaggccgccgtgctcggcgcggtccgcgccgccgccggcgagatggcgcgctccggcgtgcgcgtgaacgccatctcccccaactacatccccacgccgctggtgatgcgcatcatggcggagtggtaccccggggcgagcgccgacgagcaccgccgcgtcgtggagcgggagatcaacgagatggagggcgcgacgctggagcccgaggacatcgcgagggcggcggtgtacctggcctccgacgaggccaagtacgtgaacggccacaacctcgtcgtcgacggcgggtacaccgtcggcaaggcgcccaacctgccggcgccgccgcaataa

SEQ ID NO: 59631 - protein, 309 aa, Oryza sativa subsp
MEIRSRRDRSKIKMFRALQIVLRGKSRGFVSHFSSTASNSERLAGKVAVITGAASGIGKATAAEFVRNGAKVILADVQDDVGRAVASELGADAASYTRCDVTDEAQVAAAVDLAVARHGQLDVMVNNAGIVGSLSRPPLGALDLADFDAVMAVNTRGVLAGVKHAARVMAPRRRGSIICVASVAGVLGSVTPHPYSVSKAAVLGAVRAAAGEMARSGVRVNAISPNYIPTPLVMRIMAEWYPGASADEHRRVVEREINEMEGATLEPEDIARAAVYLASDEAKYVNGHNLVVDGGYTVGKAPNLPAPPQ

SEQ ID NO: 59632 - DNA, 765 bp, Aedes aegypti
  CDS (1)..(765)
atggatttcaccggcaaagtagtactcattactggcgcgagcagcgggattggagccgccacggcaaagcatttgacgcatttgggggccacagttgtcatgaccggtaggaatgccgaaagtttgaagaaatgtggagccgaatgtgttggaaaacagaagcctctgattttggtggccgacgtgacaaaacaggaagacaacgtccgtgtaattgaagagaccatcaaaaaatttggcaaactagacgtgctggtaaacaacgctggtaggggagtttttggcagtatcgaaaccactagtctggatcaactggatgacatgctgaacaccaatttgagaggtgcttatcatctgacgatactagccgtaccccatctaatcaaaagcaaaggaaacatagttaacgtatcgagcatcactggactcaaaccgtttcccaactcattggcttactgcatttcaaaagccgcgttggatcaattcacaagagtgattgctcttgaacttgcaccgaagcaggtccgggtgaattcagtcaatccagcggtcattgcaaccgacttccaaaatcgagagggtatgagtcccgcacaatatgctgcttttgtgaagcacagcgaaaaaacccatgtccttggacggatcggacaacccagggaagtggcagaagccatagcattcctggcgacggattcggccagtttcatcacaggaacgtgtcttagcgttgatggcggaaggaccatcatgggtccaatttga

SEQ ID NO: 59633 - protein, 254 aa, Aedes aegypti
MDFTGKVVLITGASSGIGAATAKHLTHLGATVVMTGRNAESLKKCGAECVGKQKPLILVADVTKQEDNVRVIEETIKKFGKLDVLVNNAGRGVFGSIETTSLDQLDDMLNTNLRGAYHLTILAVPHLIKSKGNIVNVSSITGLKPFPNSLAYCISKAALDQFTRVIALELAPKQVRVNSVNPAVIATDFQNREGMSPAQYAAFVKHSEKTHVLGRIGQPREVAEAIAFLATDSASFITGTCLSVDGGRTIMGPI

SEQ ID NO: 59634 - DNA, 771 bp, Brevibacterium sp
  CDS (1)..(771): transl_table=11
atgaatcgactcggcggaaaagtagcagtcattactgggggcgccgcaggcatggggcgcatacagtctgaactgtatgcgagtgagggtgcacaagtagcggtagtagatgtcaatgaacaagaaggccgtgccactgccgatgcgataagggccagcggcggggttgcaaactattggaaattggacgtttctgacgagtctgaagttgaaatagtcgtctccgacattgccaagagattcggtgcgattaacgtactagtgaacaacgcaggcgtcaccggtgccgataaaccaactcacgagatcgacgaacgggacctggacctcgtactgagcgtcgatgtgaaaggagtattcttcatgacaaaacactgcatcccctactttaaacaggctggcggcggagccatcgtcaacttcgcgtctatctatggtctggtggggtcgcaggagcttaccccgtaccacgcagccaaaggtgcggtcgttgcccttaccaaacaggacgcggtgacttacggaccgtcaaatatccgagtgaatgcggtagcacccggaaccattttgactccactagtcaaggagctcggttcaaggggccccgatggcttagatggatatactaaacttatgggtgccaagcatccgcttggtcgggtaggaacccccgaagaagtcgcggcagcaacattgtttctggcatccgaagaagcttcgttcattactggcgccgtccttcccgttgacggtggatatactgcgcagtga

SEQ ID NO: 59635 - protein, 256 aa, Brevibacterium sp
MNRLGGKVAVITGGAAGMGRIQSELYASEGAQVAVVDVNEQEGRATADAIRASGGVANYWKLDVSDESEVEIVVSDIAKRFGAINVLVNNAGVTGADKPTHEIDERDLDLVLSVDVKGVFFMTKHCIPYFKQAGGGAIVNFASIYGLVGSQELTPYHAAKGAVVALTKQDAVTYGPSNIRVNAVAPGTILTPLVKELGSRGPDGLDGYTKLMGAKHPLGRVGTPEEVAAATLFLASEEASFITGAVLPVDGGYTAQ

SEQ ID NO: 59636 - DNA, 765 bp, Aedes aegypti; identical to SEQ ID NO: 40565
  CDS (1)..(765)

SEQ ID NO: 59637 - protein, 254 aa, Aedes aegypti; identical to SEQ ID NO: 40566

SEQ ID NO: 59638 - DNA, 765 bp, Aedes aegypti; identical to SEQ ID NO: 40567
  CDS (1)..(765)

SEQ ID NO: 59639 - protein, 254 aa, Aedes aegypti; identical to SEQ ID NO: 40568

SEQ ID NO: 59640 - DNA, 822 bp, Streptomyces antibioticus
  CDS (1)..(822): transl_table=11
gtgaatcagccctggcccgcgacccgggcagaccgaccgaacatttgcagggaaggagcacgaatgagcctcggggccgacaccgtcgcgatcgtcaccggagccggacggggcatcggcgccgccacggcgcagcggctcgccgcggagggcgcgaccgtggcagtcgtcgaccggaccgaggcggacacggccgacaccgtggcgtcgatccgggcggccggtggccgcgccctcggcatcgggtgcgacgtgacagtcaccgacctggtcgaggcggcggtcgaccgcacggtcgcggagttcggtcgtctggacgtcctcgtcaacaacgccggggtaacccgggacagcctcgtcttcatgatgggcgacgaggactgggatacggtcatcgacgtgcacctgaacggcgccgcccggaccgtccgcgcggcacggcgccagatggtgcgtcaaggttccgggcggatagtgaacttgagctcgatcgcggctctgggcaaccaggggcaggccaactacgccactgccaaggccgcgatccagggctacacccgcaccctggccgtggaacttggcccgcacggtattacggtcaatgcgatcgcgcctgggttcatcgccacgaccatgacggacgacacggctcgccggatgggctccgatccggtggcgctgcggaaggcggtggcgtcgcgggtgccgatgcgcagggttggcaggccggaggacatcgccggcctggtggccttcctggccgggcctgatgcgagctatctcacagggcagacgatctacgtcgacggcggaccgcagtga

SEQ ID NO: 59641 - protein, 273 aa, Streptomyces antibioticus
MNQPWPATRADRPNICREGARMSLGADTVAIVTGAGRGIGAATAQRLAAEGATVAVVDRTEADTADTVASIRAAGGRALGIGCDVTVTDLVEAAVDRTVAEFGRLDVLVNNAGVTRDSLVFMMGDEDWDTVIDVHLNGAARTVRAARRQMVRQGSGRIVNLSSIAALGNQGQANYATAKAAIQGYTRTLAVELGPHGITVNAIAPGFIATTMTDDTARRMGSDPVALRKAVASRVPMRRVGRPEDIAGLVAFLAGPDASYLTGQTIYVDGGPQ

SEQ ID NO: 59642 - DNA, 777 bp, Streptomyces rishiriensis
  CDS (1)..(777): transl_table=11
atgactgggcccgccgcatcagcggtggcttgcgagccggtcgcgatggtcaccggagccggccggggcatcggcgctgccacggccgagcgccttgccgcggagggcatggcggtgatcgtcgtggaccgcgtggaacaggacaccacagccaccgtctcggccatccgtgcggccggcggacgggccagcgggctcggctgtgacgtctccgtagctcaggcggtgacggccaccgtcgcctcggccgtcgaggagttcggtcacctcgacgtgctggtgaactgcgccgggatcacccaggatcggctgctgctcaccatgagcgaccaggagtgggacagggtcctggacgtcaacctcggcggcagcatgcgatgttcgttcgcggtcgggaggcacatgcgccggcaggggcacggccggatcatcaacttcagttctgttgccgcgcgcggcaatgccggtcagaccaactatgcgaccgcgaagggcgcgattgccgggttcacccgcacgctcgcggccgaattcggtccgcacggcgtgacggtcaactcgatcgcaccgggcttcgtggccacgccgatggtggcagagctgaccgaacggctcggcgtggatcgggacaccgtcctgctggaggcggcgatgtcctcggccgtgggccggatcgggacgcccgaggaaatcgccgcggtggtggcattcgtcacccggccggaatcgggctacctcaccggggagaccatccacgtcgaaggtggtcggcgatga

SEQ ID NO: 59643 - protein, 258 aa, Streptomyces rishiriensis
MTGPAASAVACEPVAMVTGAGRGIGAATAERLAAEGMAVIVVDRVEQDTTATVSAIRAAGGRASGLGCDVSVAQAVTATVASAVEEFGHLDVLVNCAGITQDRLLLTMSDQEWDRVLDVNLGGSMRCSFAVGRHMRRQGHGRIINFSSVAARGNAGQTNYATAKGAIAGFTRTLAAEFGPHGVTVNSIAPGFVATPMVAELTERLGVDRDTVLLEAAMSSAVGRIGTPEEIAAVVAFVTRPESGYLTGETIHVEGGRR

SEQ ID NO: 59644 - DNA, 789 bp, Streptomyces sphaeroides
  CDS (1)..(789): transl_table=11
atgacgagcccggccgatgcgaccaccgaagtcgctgtgtctcaggagtcggtcgccatggtcaccggagccggccggggcatcggcgcggccacggccgagcgcctcgccgccgagggcatggcggtgatcgtcgtggaccgcaccgaacaggacacccgggccacggtcgcggccattcgcacggccggcggacgggcccgcgggatcggctgtgacgtcgccgtggcccaggccgtgacggccgcggtcgccacggccgtcgaggagttcggccgcatcgacgtactggtgaactgcgccgggatcaaccgggaccggctgctgctcaccatgggcgatcaggagtgggacacggtcctggacgtcaacctcggcggcaccatgcgatgttcgttcgccgtcggccggcacatgcgccggcaggggcacggccggatcatcaacttcagctccgtggccgcgcgcggcaatgccggccagaccaactacgcgaccgccaaaggcgcgatcgccgggttcacccgtacgctcgcggccgaactgggcccgcacggcgtgacggtcaacgccatcgcaccgggcttcgtggccacgccgatggtggacgagctggccgaacggctcggcggggaccgggactcggtcatgtcggaggcggcgaagtcctcggcagtgggccggatcgggacgcccgaggaaatcgccgcgaccgtggtcttcgtcgcccggccggaatcgggctacctcaccggcgagaccgttcacgtcgacggcggtcggccatga

SEQ ID NO: 59645 - protein, 262 aa, Streptomyces sphaeroides
MTSPADATTEVAVSQESVAMVTGAGRGIGAATAERLAAEGMAVIVVDRTEQDTRATVAAIRTAGGRARGIGCDVAVAQAVTAAVATAVEEFGRIDVLVNCAGINRDRLLLTMGDQEWDTVLDVNLGGTMRCSFAVGRHMRRQGHGRIINFSSVAARGNAGQTNYATAKGAIAGFTRTLAAELGPHGVTVNAIAPGFVATPMVDELAERLGGDRDSVMSEAAKSSAVGRIGTPEEIAATVVFVARPESGYLTGETVHVDGGRP

SEQ ID NO: 59646 - DNA, 750 bp, Spodoptera littoralis; identical to SEQ ID NO: 40585
  CDS (1)..(750)

SEQ ID NO: 59647 - protein, 249 aa, Spodoptera littoralis; identical to SEQ ID NO: 40586

SEQ ID NO: 59648 - DNA, 777 bp, Pseudomonas putida
  CDS (1)..(777): transl_table=11
atgaacaaacgtttccaggacaagactgccgttatcaccggcgctgcccagggcatcggtcgccgcgtggccgaacggatggcggccgaaggaggtcggctgctgctggtcgaccgttccgagctaatacatgagctggccgacgaactggtcggagtcgctgaggtgctgaccctgaccgccgaccttgagcagttcgccgattgccaacgggtgatggcggcggcgctcgagcgcttcggtcgtctggacattctgatcaacaacgttggcggcaccatttgggctaagccattcgagcattaccaggaacacgagatcgaggccgaagtgcgtcgttcgctgttccccaccctgtggtgctgccacgccgccgtgccgccaatgctcgagcagggcagtggagccatcgtcaacgtttcctccgtcgccacgcgcggggtcaatcgcgtgccctacggcgcggcaaagggtggcgttaacgccctgaccgcctgcctagcctttgaaaccgccgagcgcggtatccgggtcaacgccaccgcgccgggtggcaccgaggcgcctccacggcggattccgcgcaacagcgccgagccgagcgagcaggagaaggtctggtaccagcagatcgtcgaccagaccctcgacagcagcctgatgaaacgctacggcaacatcgacgaacaggccggggcgattctgttcctggcctccgacgacgctgcctacatcaccggtgtaactcttccggtggcagggggagacctcggttga

SEQ ID NO: 59649 - protein, 258 aa, Pseudomonas putida
MNKRFQDKTAVITGAAQGIGRRVAERMAAEGGRLLLVDRSELIHELADELVGVAEVLTLTADLEQFADCQRVMAAALERFGRLDILINNVGGTIWAKPFEHYQEHEIEAEVRRSLFPTLWCCHAAVPPMLEQGSGAIVNVSSVATRGVNRVPYGAAKGGVNALTACLAFETAERGIRVNATAPGGTEAPPRRIPRNSAEPSEQEKVWYQQIVDQTLDSSLMKRYGNIDEQAGAILFLASDDAAYITGVTLPVAGGDLG

SEQ ID NO: 59650 - DNA, 807 bp, Arabidopsis thaliana
  CDS (1)..(807)
atggctaaagcagaagaaaacttgagagacaaatgtagatggagccttggaggcatgaccgctctcgttaccggtggctccaaaggcctcggggaagctgtggtggaggaactagccatgttaggagcaagagtccacacatgtgctagaaacgaaactcagcttcaagaatgcgtacgtgaatggcaagctaaagggtttgaggtcaccacttctgtatgcgacgtttcttctcgtgaccaacgagagaaactcatggaaaacgttgcctctatcttccaaggaaaactcaacatccttgtaaacaatgcgggaacgggtataacaaagccgaccacagagtatacagcacaagattactcatttctgatggctacaaatctcgactcagcttttcatctctcacagctcgcgcatcctttgttgaaagcatctggttcagggagcatcgtgctcatgtcctctactgcaggggttgtacatatcaatgttggttccatctatggagcaactaaaggagctatgaatcagctagcaaaaaacttagcatgcgagtgggcaagggataacataagggttaattctgtctgtccatggttcatagcaactcctttatatctcaatgatgaagagttaaagaaagaagtggagcgtaagacaccaatgggacgtgttggaaacgcaaatgaagtatcatcgcttgtcgcatttctctgctttccggctgcttcgtatataacaggtcagacaatctgcgtcgacggaggtttcacggtcaactgcttttctttcaagccagtgctttaa

SEQ ID NO: 59651 - protein, 268 aa, Arabidopsis thaliana
MAKAEENLRDKCRWSLGGMTALVTGGSKGLGEAVVEELAMLGARVHTCARNETQLQECVREWQAKGFEVTTSVCDVSSRDQREKLMENVASIFQGKLNILVNNAGTGITKPTTEYTAQDYSFLMATNLDSAFHLSQLAHPLLKASGSGSIVLMSSTAGVVHINVGSIYGATKGAMNQLAKNLACEWARDNIRVNSVCPWFIATPLYLNDEELKKEVERKTPMGRVGNANEVSSLVAFLCFPAASYITGQTICVDGGFTVNCFSFKPVL

SEQ ID NO: 59652 - DNA, 858 bp, Arabidopsis thaliana
  CDS (1)..(858)
atgtcaacgaacactgaatcttcttcttattcttctcttcctagtcaaaggcttttgggtaaagtggcattgatcactggaggagccacagggataggtgagagcattgttcgtctgttccacaagcacggtgccaaagtctgcattgttgatctgcaagatgatctcggaggtgaggtgtgtaaaagtctgcttcgtggtgagtccaaggagacggcttttttcatccatggcgatgttagagtggaagatgacattagcaatgcggttgactttgcagtcaaaaattttgggacgcttgatatacttatcaacaatgcaggattatgtggagcaccgtgccctgatattcgtaattatagtttgagtgagttcgagatgacctttgatgtgaatgtgaaaggagcttttctaagcatgaaacatgcagctcgtgtaatgataccggagaagaaagggtcgatagtttccttatgtagtgtgggaggtgttgtgggaggcgttggtccacattcttatgttggttccaagcatgctgttctaggcttgactaggagtgttgcagcggagcttggacagcacgggatacgtgtgaactgtgtttcgccttacgcggttgcaactaaactcgctttggctcatttgccggaggaagaaagaacggaggatgcatttgttggtttcaggaattttgctgctgcaaacgcgaatctaaaaggggtggaactgacggttgatgatgtagcgaacgctgttctgtttttggctagcgatgactcgcggtacataagcggagataatttgatgattgatggaggattcacttgcactaaccactcctttaaagtcttcagatga

SEQ ID NO: 59653 - protein, 285 aa, Arabidopsis thaliana
MSTNTESSSYSSLPSQRLLGKVALITGGATGIGESIVRLFHKHGAKVCIVDLQDDLGGEVCKSLLRGESKETAFFIHGDVRVEDDISNAVDFAVKNFGTLDILINNAGLCGAPCPDIRNYSLSEFEMTFDVNVKGAFLSMKHAARVMIPEKKGSIVSLCSVGGVVGGVGPHSYVGSKHAVLGLTRSVAAELGQHGIRVNCVSPYAVATKLALAHLPEEERTEDAFVGFRNFAAANANLKGVELTVDDVANAVLFLASDDSRYISGDNLMIDGGFTCTNHSFKVFR

SEQ ID NO: 59654 - DNA, 762 bp, Bacillus subtilis
  CDS (1)..(762): transl_table=11
atgaacctgacggataaaaccgtcctcatcacagggggcgcatcaggcatcggttatgccgcggttcaggcgtttctgaatcagcaggcgaatgtggtcgtcgcggatattgatgaggcgcagggagaagcgatgatccggaaagaaaacaatgacaggctgcattttgtgcatacggatattacagatgaaccggcatgtcaaaacgccatccggtcagcggtagacaagttcggcggattggatgtgttaatcaataacgccggcatcgaaattgtcgcgccgattcatgagatggagctgagcaattggaacaaggtgctcaacgtcaatctgacgggcatgtttcttatgagcaagcacgcgctcaagtatatgctcaaaagcggcaagggcaatatcattaacacgtgctccgtcggaggagtcgttgcatggcccgacattcccgcatataacgcctctaaaggcggcgtattgcagctgacgcgttcgatggccgtcgattacgccaaacacaacatccgcgtcaattgcgtgtgcccgggaatcattgacacacctttgaatgaaaagtcgttccttgaaaacaacgaaggcacgcttgaagaaatcaaaaaagaaaaagcgaaagtcaatccgctgctgagactcggcaagcctgaagaaatagcgaacgtcatgctgtttctcgcgtcggatttatcaagctatatgaccggaagcgcgatcaccgcagacggtggatacaccgcacaatag

SEQ ID NO: 59655 - protein, 253 aa, Bacillus subtilis
MNLTDKTVLITGGASGIGYAAVQAFLNQQANVVVADIDEAQGEAMIRKENNDRLHFVHTDITDEPACQNAIRSAVDKFGGLDVLINNAGIEIVAPIHEMELSNWNKVLNVNLTGMFLMSKHALKYMLKSGKGNIINTCSVGGVVAWPDIPAYNASKGGVLQLTRSMAVDYAKHNIRVNCVCPGIIDTPLNEKSFLENNEGTLEEIKKEKAKVNPLLRLGKPEEIANVMLFLASDLSSYMTGSAITADGGYTAQ

SEQ ID NO: 59656 - DNA, 765 bp, Bacillus amyloliquefaciens
  CDS (1)..(765): transl_table=11
atgaacctgacagataaaaccgtcctcatcacagggggcgcatcaggcatcggttatgctgcggttcaggcgtttctgaatcagcaggcaaatgtggtcgtcgcggatattgatgaggcgcagggagaagcgatgatccggaaagaaaataatgacaggctgcattttgtccagacggatattacaaatgaaccggcatgtcaaaacgccatcctgtcagcggttgacaagttcggcggattggacgtgttaatcaataacgccggcatcgaaattgtcgccccgattcatgagatggagctgagtgattggaacaaggtgcttaatgtcaatctcacgggcatgtttctcatgagcaagcacgcgctgaagtatatgctcaaaagcggcaagggcaatatcattaacacgtgctccgtcggtggagtcgtcgcatggcccgacattcccgcatataacgcatctaaaggcggcgttttgcagactgacgcgttctataggccgtcgattatagcgaaacacaacatccgcgtcaattgcgtgtgcccgggaatcatcgacacacctttgaatgaaaagtcgttccttgaaaataacgaaggcacgcttgaagaaatcaaaaaagaaaaagcgaaagtcaatccgctgctgaggctcggcaagcctgaggaaatagcgaacgtcatgctgtttctcgcctcggatttatcaagctatatgaccggaagcgccatcaccgcagacggtggatacaccgcacaatag

SEQ ID NO: 59657 - protein, 254 aa, Bacillus amyloliquefaciens
MNLTDKTVLITGGASGIGYAAVQAFLNQQANVVVADIDEAQGEAMIRKENNDRLHFVQTDITNEPACQNAILSAVDKFGGLDVLINNAGIEIVAPIHEMELSDWNKVLNVNLTGMFLMSKHALKYMLKSGKGNIINTCSVGGVVAWPDIPAYNASKGGVLQTDAFYRPSIIAKHNIRVNCVCPGIIDTPLNEKSFLENNEGTLEEIKKEKAKVNPLLRLGKPEEIANVMLFLASDLSSYMTGSAITADGGYTAQ

SEQ ID NO: 59658 - DNA, 768 bp, Bacillus subtilis
  CDS (7)..(768): transl_table=11
atgatcatgaacctcaccgataaaaccgtcctcatcacaggaggcgcatcaggcattggttatgctgcggttcaggcttttttgggccagcaggccaatgtggttgtggcggatattgatgaagcgcaaggagaagcaatggtacgaaaagaaaataatgacaggctgcactttgtgcaaacggacatcacagacgaagctgcctgccagcacgcagttgaatcggcggttcatacatttggcgggctcgatgtcttgattaataatgcaggcatcgaaatcgtggcgcctattcacgagatggagctcagcgattggaacaaggtgctgcaagtcaatttgaccggcatgtttttaatgagcaaacatgcactcaagcatatgctggccgccggcaagggcaacatcattaatacgtgctctgtcggcggactcgtggcatggcctgatattcctgcttataacgccagcaaaggcggggttttgcagctgactaaatcaatggccgttgattatgcgaaacatcaaattcgggtgaactgcgtatgcccggggatcatcgacacaccgctgaatgaaaaatcattccttgaaaataatgaaggcacacttgaagagattaaaaaagaaaaagcgaaggtaaatccgctgctgaggcttgggaaacctgaagaaatcgcaaatgtgatgctgtttttagcctcggatttatcaagctatatgaccggaagcgccatcaccgcagacggaggatacaccgcacaatag

SEQ ID NO: 59659 - protein, 253 aa, Bacillus subtilis
MNLTDKTVLITGGASGIGYAAVQAFLGQQANVVVADIDEAQGEAMVRKENNDRLHFVQTDITDEAACQHAVESAVHTFGGLDVLINNAGIEIVAPIHEMELSDWNKVLQVNLTGMFLMSKHALKHMLAAGKGNIINTCSVGGLVAWPDIPAYNASKGGVLQLTKSMAVDYAKHQIRVNCVCPGIIDTPLNEKSFLENNEGTLEEIKKEKAKVNPLLRLGKPEEIANVMLFLASDLSSYMTGSAITADGGYTAQ

SEQ ID NO: 59660 - DNA, 786 bp, Bacillus subtilis
  CDS (1)..(786): transl_table=11
atgtatccggatttaaaaggaaaagtcgtcgctattacaggagctgcttcagggctcggaaaggcgatggccattcgcttcggcaaggagcaggcaaaagtggttatcaactattatagtaataaacaagatccgaacgaggtaaaagaagaggtcatcaaggcgggcggtgaagctgttgtcgtccaaggagatgtcacgaaagaggaagatgtaaaaaatatcgtgcaaacggcaattaaggagttcggcacactcgatattatgattaataatgccggtcttgaaaatcctgtgccatctcacgaaatgccgctcaaggattgggataaagtcatcggcacgaacttaacgggtgcctttttaggaagccgtgaagcgattaaatatttcgtagaaaacgatatcaagggaaatgtcattaacatgtccagtgtgcacgaagtgattccttggccgttatttgtccactatgcggcaagtaaaggcgggataaagctgatgacagaaacattagcgttggaatacgcgccgaagggcattcgcgtcaataatattgggccaggtgcgatcaacacgccaatcaatgctgaaaaattcgctgaccctaaacagaaagctgatgtagaaagcatgattccaatgggatatatcggcgaaccggaggagatcgccgcagtagcagcctggcttgcttcgaaggaagccagctacgtcacaggcatcacgttattcgcggacggcggtatgacacaatatccttcattccaggcaggccgcggttaa

SEQ ID NO: 59661 - protein, 261 aa, Bacillus subtilis
MYPDLKGKVVAITGAASGLGKAMAIRFGKEQAKVVINYYSNKQDPNEVKEEVIKAGGEAVVVQGDVTKEEDVKNIVQTAIKEFGTLDIMINNAGLENPVPSHEMPLKDWDKVIGTNLTGAFLGSREAIKYFVENDIKGNVINMSSVHEVIPWPLFVHYAASKGGIKLMTETLALEYAPKGIRVNNIGPGAINTPINAEKFADPKQKADVESMIPMGYIGEPEEIAAVAAWLASKEASYVTGITLFADGGMTQYPSFQAGRG

SEQ ID NO: 59662 - DNA, 747 bp, Escherichia coli
  CDS (1)..(747): transl_table=11
atggatttcagcggtaaaaatgtctgggtaaccggcgcaggtaaaggtatcggctacgccacggcgctggcgtttgttgaggcgggagcgaaagttacaggttttgatcaagcgttcactcaggagcaatatccctttgcgaccgaagtgatggatgttgccgacgctgcgcaggtcgcgcaagtgtgtcagcgactgttagctgaaacggagcgactggacgcgctggtcaatgcggcgggaattttacgcatgggcgcgaccgatcagctcagtaaagaggactggcagcagacttttgcggttaacgtcggcggtgcgtttaacctgttccagcaaaccatgaaccagtttcgccgtcagcggggcggggcgattgtcactgtggcgtccgacgccgcgcacacgccgcgtattggcatgagtgcttatggcgcatcgaaagcggcgctgaaaagcctggcgttgagcgtcgggctggaactggcgggtagcggcgtgcgctgtaatgtggtttcgcctggctccaccgacaccgatatgcaacgcacgctgtgggtgagcgatgacgccgaagaacagcgtattcgcggctttggcgagcagtttaaactcggcattccgctggggaaaatcgcccgtccacaagagatcgccaacacgattttgttcctcgcctctgacctcgccagccatattaccctacaggatattgtggtcgatggcggctcaacgctgggggcataa

SEQ ID NO: 59663 - protein, 248 aa, Escherichia coli
MDFSGKNVWVTGAGKGIGYATALAFVEAGAKVTGFDQAFTQEQYPFATEVMDVADAAQVAQVCQRLLAETERLDALVNAAGILRMGATDQLSKEDWQQTFAVNVGGAFNLFQQTMNQFRRQRGGAIVTVASDAAHTPRIGMSAYGASKAALKSLALSVGLELAGSGVRCNVVSPGSTDTDMQRTLWVSDDAEEQRIRGFGEQFKLGIPLGKIARPQEIANTILFLASDLASHITLQDIVVDGGSTLGA

SEQ ID NO: 59664 - DNA, 741 bp, Thermotoga maritima
  CDS (1)..(741): transl_table=11
atgaggcttgaagggaaagtgtgtctgatcacaggggctgcaagcgggatagggaaagccaccacgcttcttttcgcacaggaaggagctacggtgatcgctggcgatatctcgaaagaaaatctcgactctcttgtgaaagaggcagaaggacttccggggaaggttgatccctacgttttgaacgtgaccgacagggatcagataaaggaagttgtggaaaaagtcgttcaaaagtacggtcgaatcgatgttctggtgaacaacgcgggaataacaagggatgcgcttcttgtgaggatgaaagaagaagactgggatgcggtaataaacgtgaatctgaagggtgttttcaacgtgactcagatggtggtgccctacatgatcaaacagaggaacggttcgatcgtgaacgtctcctctgtcgttggaatatacgggaatcctggtcagacgaattacgcggcgtcgaaggcgggagtcataggaatgaccaagacgtgggcgaaggaactcgctggaagaaacatcagggtgaacgctgtggcacccggattcatagaaacccccatgaccgaaaaacttccagaaaaagcccgtgaaacggccctttccagaataccgctgggaaggtttgggaagccagaagaggtggcgcaggttatactcttcctcgcatcggacgagtcgagttacgtcaccggacaggtgataggaatagatgggggcctcgtgatctga

SEQ ID NO: 59665 - protein, 246 aa, Thermotoga maritima
MRLEGKVCLITGAASGIGKATTLLFAQEGATVIAGDISKENLDSLVKEAEGLPGKVDPYVLNVTDRDQIKEVVEKVVQKYGRIDVLVNNAGITRDALLVRMKEEDWDAVINVNLKGVFNVTQMVVPYMIKQRNGSIVNVSSVVGIYGNPGQTNYAASKAGVIGMTKTWAKELAGRNIRVNAVAPGFIETPMTEKLPEKARETALSRIPLGRFGKPEEVAQVILFLASDESSYVTGQVIGIDGGLVI

SEQ ID NO: 59666 - DNA, 861 bp, Bacillus subtilis
  CDS (1)..(861): transl_table=11
atggcaaattatccaaaagaactgccggcacaaactcaaagtcgccagccgggaattgaaagcgaaatgaatccaagtccggtgtatgagtacgaggattataaaggagcagacaaattaaaaggaaaagtagctcttattacaggcggcgacagcgggatcggacgcgcggtttccgtcgcttacgcaaaggaaggcgcagacatcgccattgtgtataaggatgagcatgaagacgctgaggagacgaagaaacgtgttgaacaagaaggcgtaaaatgcctgctgattgctggtgacgtaggtgaagaggaattctgcaatgaagcggttgaaaaaacggtcaaggaactaggcggccttgacatccttgtcaacaatgcaggtgaacagcacccgaaggaaagcatcaaagatattacgagcgaacagcttcaccgcacattcaaaacaaatttttattctcaattttatttgactaaaaaagcaattgattacctgaaaccgggcagcgccatcatcaatacgacatccatcaacccgtacgtagggaacccgacactgattgattatacagcgacaaaaggggcgatcaatgcctttacaagaacaatggcgcaggcgcttgtcaaagacggcatccgtgtaaatgcagtcgcgccgggtccaatttggacgccactaatcccagctacgttccctgaagaaacagttgctcaatttgggcaagatacgccgatgggccgtcctggacagcctgttgagcacgtcggctgttatgtgcttctggcatcagatgagtcctcttacatgacaggtcagaccctgcatgtcaacggcggaaactttgtgacgacataa

SEQ ID NO: 59667 - protein, 286 aa, Bacillus subtilis
MANYPKELPAQTQSRQPGIESEMNPSPVYEYEDYKGADKLKGKVALITGGDSGIGRAVSVAYAKEGADIAIVYKDEHEDAEETKKRVEQEGVKCLLIAGDVGEEEFCNEAVEKTVKELGGLDILVNNAGEQHPKESIKDITSEQLHRTFKTNFYSQFYLTKKAIDYLKPGSAIINTTSINPYVGNPTLIDYTATKGAINAFTRTMAQALVKDGIRVNAVAPGPIWTPLIPATFPEETVAQFGQDTPMGRPGQPVEHVGCYVLLASDESSYMTGQTLHVNGGNFVTT

SEQ ID NO: 59668 - DNA, 762 bp, Escherichia coli
  CDS (1)..(762): transl_table=11
atgattttaagtgcattttctctcgaaggtaaagttgcggtcgtcactggttgtgatactggactgggtcaggggatggcgttggggctggcgcaagcgggctgtgacattgttggcattaacatcgttgaaccgactgaaaccatcgagcaggtcacagcgctggggcgtcgttttttaagcctgaccgccgatctgcgaaagattgatggtattccagcactgctggatcgcgcggtagcggagtttggtcatattgatatcctggtgaataacgccggattgattcgccgcgaagatgctctcgagttcagcgaaaaggactgggacgatgtcatgaacctgaatatcaagagcgtattcttcatgtctcaggcagcggcgaaacactttatcgcgcaaggcaatggcggcaagattatcaatatcgcgtcaatgctctccttccagggcgggatccgtgtgccttcttataccgcatcaaaaagcggcgtgatgggtgtgacgcgattgatggcgaacgaatgggctaaacacaacattaatgttaatgcgatagccccgggttacatggcgaccaacaatactcaacaactacgggcagatgaacaacgtagcgcggaaattctcgaccgcattccagctggtcgttggggactgccgagtgacctgatggggccgatagtgttccttgcctccagcgcttcagattatgtgaatggttataccattgccgtggatggcggttggctggcgcgttaa

SEQ ID NO: 59669 - protein, 253 aa, Escherichia coli
MILSAFSLEGKVAVVTGCDTGLGQGMALGLAQAGCDIVGINIVEPTETIEQVTALGRRFLSLTADLRKIDGIPALLDRAVAEFGHIDILVNNAGLIRREDALEFSEKDWDDVMNLNIKSVFFMSQAAAKHFIAQGNGGKIINIASMLSFQGGIRVPSYTASKSGVMGVTRLMANEWAKHNINVNAIAPGYMATNNTQQLRADEQRSAEILDRIPAGRWGLPSDLMGPIVFLASSASDYVNGYTIAVDGGWLAR

SEQ ID NO: 59670 - DNA, 834 bp, Rhodococcus erythropolis
  CDS (1)..(834): transl_table=11
atggcaagagtagaaggacaagttgcgctaatcaccggcgccgcgcgcggacaaggtcgctcgcacgcgatcaaattggcagaagaaggcgcagacgtcatcctcgtcgacgttccgaacgacgtcgtcgatattggatacccgttgggaactgctgacgaactcgatcagacagccaaggacgtcgagaacctcggacgcaaggcgattgtcatacatgccgatgtgcgcgacctcgaatcgcttactgcagaagtagatcgagcagtttcgacactgggccgcttggatatcgtgtccgctaatgctggtatcgccagcgtgccgttcctgtcacacgacattcccgataacacctggcgccaaatgatcgacatcaatctcaccggcgtctggcacactgcgaaagttgctgtcccacacatacttgcaggagaacgtggcggctcgatagtgttaaccagttcagccgcgggcctcaaggggtacgctcagatctcgcactacagcgccgcgaaacacggcgtggtggggctgatgcgcagtcttgcgctcgaattggcgcctcatcgtgtgcgagtgaactccctgcacccgacgcaggtgaacactccgatgatccagaacgagggcacgtaccggattttcagccccgacctcgagaacccgacacgcgaggacttcgagatcgcatcgacaacgaccaacgccctgcccatcccctgggtggaatctgtcgatgtaagcaatgctctgctgttcctcgtatccgaggacgctcgctacatcaccggcgcagcgattcccgtcgatgcaggaacaacgttgaagtag

SEQ ID NO: 59671 - protein, 277 aa, Rhodococcus erythropolis
MARVEGQVALITGAARGQGRSHAIKLAEEGADVILVDVPNDVVDIGYPLGTADELDQTAKDVENLGRKAIVIHADVRDLESLTAEVDRAVSTLGRLDIVSANAGIASVPFLSHDIPDNTWRQMIDINLTGVWHTAKVAVPHILAGERGGSIVLTSSAAGLKGYAQISHYSAAKHGVVGLMRSLALELAPHRVRVNSLHPTQVNTPMIQNEGTYRIFSPDLENPTREDFEIASTTTNALPIPWVESVDVSNALLFLVSEDARYITGAAIPVDAGTTLK

SEQ ID NO: 59672 - DNA, 792 bp, Escherichia coli
  CDS (1)..(792): transl_table=11
atgggtaaactcacgggcaagacagcactgattacgggcgcattgcagggaattggcgaaggaattgccagaacttttgcacgtcatggcgcgaacctaatcttgctggatatctcccctgagatcgaaaagctggcggacgaactgtgtggtcgtggtcatcgctgtacggcggttgtcgccgatgtgcgtgacccggcgtcggtagccgcagctatcaaacgcgcgaaggaaaaagaagggcgcattgatatcctggtgaataacgcaggcgtttgtcgtctgggcagtttcctcgatatgagcgatgacgatcgcgatttccatattgacatcaatattaaaggcgtatggaacgtcacgaaggcggtgctgccggagatgattgcccgcaaagatggtcgcattgtgatgatgtcttcagtcactggtgatatggtggccgatcctggcgaaacggcgtacgccttaacgaaagcggcgattgttggcctgacaaaatcgctggcggtggagtacgcgcagtctggtattcgcgttaacgccatttgcccgggatacgtgcgcacaccaatggcggaaagcattgcccgccagtcgaacccggaagatccagagtcggtgctgactgaaatggcgaaagcaatcccgatgcgtcgcctcgccgatccgctggaagtcggcgaactggcggccttcctcgcatcggatgaatccagctatttaaccggtacacagaatgtgattgatggcggcagcacactgccggagacggttagcgtcggtatctga

SEQ ID NO: 59673 - protein, 263 aa, Escherichia coli
MGKLTGKTALITGALQGIGEGIARTFARHGANLILLDISPEIEKLADELCGRGHRCTAVVADVRDPASVAAAIKRAKEKEGRIDILVNNAGVCRLGSFLDMSDDDRDFHIDINIKGVWNVTKAVLPEMIARKDGRIVMMSSVTGDMVADPGETAYALTKAAIVGLTKSLAVEYAQSGIRVNAICPGYVRTPMAESIARQSNPEDPESVLTEMAKAIPMRRLADPLEVGELAAFLASDESSYLTGTQNVIDGGSTLPETVSVGI

SEQ ID NO: 59674 - DNA, 810 bp, Pseudomonas putida
  CDS (1)..(810): transl_table=11
atgaacaaacgtttccagggcaaggttgccgttatcaccggcgccgcccagggcatcggtcgccgcgtggccgaacggatggcggccgaaggcggtcggctgctgctggtcgaccgttccgagctaatacatgagctggccgacgaactggtcggagtcgctgaggtgctgaccctgaccgccgaccttgagcagttcgccgagtgccaacgggtgatggcggcggcgctcgagcgcttcggtcgtctggatattctgatcaacaacgttggcggcaccatttgggctaagccattcgagcattaccaggaacgcgagatcgaggccgaagtgcggcgttcactgtttcctaccctatggtgctgccacgccgcgctggcgcccatgatcgagcagggcagtggcgccatcgtaaatgtttcctccgttgccacgcgcgggatccatcgcgtgccttacggcgcggcgaagggtggcgttaacgcccttaccgcctgtctggcctttgaaaccgccgagcgcggcatccgcgtcaacgccaccgcaccgggtggcaccgaggcgcgccacggcggattccgcaatagcgccgagccgagtgagcaggagaaggtctggtaccagcagatcgtcgaccagtccctcgacagcagccttatgaaacgctacggaagcattgacgagcaggtcgaggcaattctgttccttgcttctgacgccgcctcctacatcaccggtataactcttccggtggcagggggagacctcggctgccagagctgttccgtcatgtttagtgtatctgggtga

SEQ ID NO: 59675 - protein, 269 aa, Pseudomonas putida
MNKRFQGKVAVITGAAQGIGRRVAERMAAEGGRLLLVDRSELIHELADELVGVAEVLTLTADLEQFAECQRVMAAALERFGRLDILINNVGGTIWAKPFEHYQEREIEAEVRRSLFPTLWCCHAALAPMIEQGSGAIVNVSSVATRGIHRVPYGAAKGGVNALTACLAFETAERGIRVNATAPGGTEARHGGFRNSAEPSEQEKVWYQQIVDQSLDSSLMKRYGSIDEQVEAILFLASDAASYITGITLPVAGGDLGCQSCSVMFSVSG

SEQ ID NO: 59676 - DNA, 846 bp, Bradyrhizobium japonicum
  CDS (1)..(846): transl_table=11
atgggacggtttgaaggcaaagtggccgtggtgaccggcgccggcgccggcatcggcaaggcatgcgccctcgccatcgcgcgcgagggcggcagagtggtggtggccgacattgatggctcggcggctatcgcctgcaccgcgcagatcgcggccgaagcgggccacgcgctcgccctggcgatcgacatcgccgatgcgcaggcggtggcagcgctgttcgagacggcggagcggcacttcggcggggtcgacctgctggtgaacaacgcgagcgcgatgcatctgaccccgcgcgaccgcgcgatcctcgagctggagctagcggtctgggatcagaccatggcgaccaatctgcgtggcacgctgctctgctgccggcaggccatcccccggatgatcgcccgcggcggtggcgcgatcgtcaacatgtcgtcgtgccaggggctcagtggtgacaccgcactgacatcctacgccgcgtcgaaggcggcgatgaacatgctgtcgtcctcacttgccacccagtacggtcatgcgcagatccgctgcaatgcggttgcgccgggtctcatcatgaccgagcgactcctcgccaagctggacgcgtgcatgcaaacccatctgcgccgtcaccagctcctgccgcgcgtcggccgccccgaggacgtggccgcgctggtggcgttcctgctctccgacgatgctgcgttcatcactggccaggtcgtgtgcatcgacggcggcatgctggcgcatgtgccgacatacgccgacggtggcaacagccgcgccgcgcggcctgccggcgagaccgcagaagcggacgcggcgccgcgctgctga

SEQ ID NO: 59677 - protein, 281 aa, Bradyrhizobium japonicum
MGRFEGKVAVVTGAGAGIGKACALAIAREGGRVVVADIDGSAAIACTAQIAAEAGHALALAIDIADAQAVAALFETAERHFGGVDLLVNNASAMHLTPRDRAILELELAVWDQTMATNLRGTLLCCRQAIPRMIARGGGAIVNMSSCQGLSGDTALTSYAASKAAMNMLSSSLATQYGHAQIRCNAVAPGLIMTERLLAKLDACMQTHLRRHQLLPRVGRPEDVAALVAFLLSDDAAFITGQVVCIDGGMLAHVPTYADGGNSRAARPAGETAEADAAPRC

SEQ ID NO: 59678 - DNA, 744 bp, Escherichia coli
  CDS (1)..(744): transl_table=11
atggctatagcacttgtgactggtggcagtcgcggcatcgggcgggcaactgcattactgttggcgcaagaagggtatacggtggcggttaattatcagcaaaacctccacgcggcgcaggaagtgatgaacttaataacgcaagccggtggcaaagcattcgtgctccaggcggatatcagcgacgaaaaccaggtcgttgcgatgtttacagcaatcgatcagcacgatgaaccgctagcagcgctggtcaataacgccgggatcttgtttacccagtgcaccgttgaaaaccttaccgcagagcgaatcaaccgagtactttccaccaacgtgacgggatattttctctgctgccgcgaggcggtaaaacgcatggcgcttaaaaatggtggcagtggcggcgctatcgtcaatgtctcttcggtggcctcacggttgggttcgccaggggaatatgttgattacgcggcatcgaaaggggcgattgatacgttaaccaccggactatcgctggaagtcgccgcgcaggggatccgcgttaactgcgtgcggccagggtttatttataccgaaatgcacgccagcggcggcgagcctggacgcgtcgatcgcgttaagtcgaacatccccatgcagcgtggtggacaggcagaagaggtcgcgcaggccattgtctggctactaagtgataaagcctcttacgtcacgggaagttttatcgatttggcgggcgggaaataa

SEQ ID NO: 59679 - protein, 247 aa, Escherichia coli
MAIALVTGGSRGIGRATALLLAQEGYTVAVNYQQNLHAAQEVMNLITQAGGKAFVLQADISDENQVVAMFTAIDQHDEPLAALVNNAGILFTQCTVENLTAERINRVLSTNVTGYFLCCREAVKRMALKNGGSGGAIVNVSSVASRLGSPGEYVDYAASKGAIDTLTTGLSLEVAAQGIRVNCVRPGFIYTEMHASGGEPGRVDRVKSNIPMQRGGQAEEVAQAIVWLLSDKASYVTGSFIDLAGGK

SEQ ID NO: 59680 - DNA, 765 bp, Bacillus subtilis
  CDS (1)..(765): transl_table=11
atggaaaaaaaggcggtaattattaccggcgggtcaagcggcatgggaaaagcgatggcaaaaaaacaggctgaattagggtggcacgttatggtgacagggaggaaccatgaggcacttgaggaaacaaaaaaagaaattcagacctttgagggacaggtcgcttgttttcaaatggatgtccgttccgattccgccgcttcagacatgattaaagaagcggtaaaagcctttggccggcttgacgcgctgattaacaacgcggccggaaactttatttgtccggcagaaaagctgacgcccaatggatggaaagccgttattgagattgttttaaacggcacatttttttgcagccaagcagcggcaaggcattggattgaccagaagcagcagggtgtcattttaaatatggcagccacgtacgcttggggagcgggagcgggggtcgttcattccgctgcagccaaagcgggggtattgtcattgacaagaacgctggccgttgaatgggggagcaaatacggcattcgtacaaacgcgatagcccccggaccgattgaacgaacaggcggtgcggagaagctatttgaatcggaaaaagcgatggcccgcacgatgaacagtgtgccgctcggccgattgggcacaccggaggaaatcgccgctttggcagcgtttttgctttctgatgaagcatcctatataaacggggattgtatcacaatggacggggggcaatggctgaatccttatccgttttaa

SEQ ID NO: 59681 - protein, 254 aa, Bacillus subtilis
MEKKAVIITGGSSGMGKAMAKKQAELGWHVMVTGRNHEALEETKKEIQTFEGQVACFQMDVRSDSAASDMIKEAVKAFGRLDALINNAAGNFICPAEKLTPNGWKAVIEIVLNGTFFCSQAAARHWIDQKQQGVILNMAATYAWGAGAGVVHSAAAKAGVLSLTRTLAVEWGSKYGIRTNAIAPGPIERTGGAEKLFESEKAMARTMNSVPLGRLGTPEEIAALAAFLLSDEASYINGDCITMDGGQWLNPYPF

SEQ ID NO: 59682 - DNA, 762 bp, Escherichia coli
  CDS (1)..(762): transl_table=11
atggcacaggttgcgattattaccgcctccgattcggggatcggcaaagagtgcgcgttattactggcgcagcaggggtttgatattggtattacctggcactcagatgaagaaggggcaaaagataccgcgcgtgaggtagttagccacggcgtacgtgcggagatcgtgcagctggatctcggcaatctaccagaaggggcactggcgctggagaaactcattcaacggctggggcgcattgatgtgctggtgaataatgcgggtgcaatgaccaaagcgccgtttcttgatatggcttttgatgagtggcgcaagatttttaccgttgatgtcgatggtgcattcttatgctcgcaaattgcggctcgtcagatggtgaaacaagggcagggcggtcgcatcatcaacattacgtcggtacatgaacatacgccgctgccggatgccagcgcctacacagccgctaaacatgcgctcggtgggttaaccaaagcgatggcgctggagctggtcaggcataagattttggtgaacgcagtcgcgcctggggcgatcgccacgccaatgaatggcatggatgacagcgacgtgaagcccgacgcggagccttcgattcccttgcggcgttttggcgcaacgcatgagattgccagcctggtggtgtggctttgttcggagggcgcaaattacaccaccgggcagtcgttgatagtggatggcggctttatgttggcgaatccacagttcaacccagaatag

SEQ ID NO: 59683 - protein, 253 aa, Escherichia coli
MAQVAIITASDSGIGKECALLLAQQGFDIGITWHSDEEGAKDTAREVVSHGVRAEIVQLDLGNLPEGALALEKLIQRLGRIDVLVNNAGAMTKAPFLDMAFDEWRKIFTVDVDGAFLCSQIAARQMVKQGQGGRIINITSVHEHTPLPDASAYTAAKHALGGLTKAMALELVRHKILVNAVAPGAIATPMNGMDDSDVKPDAEPSIPLRRFGATHEIASLVVWLCSEGANYTTGQSLIVDGGFMLANPQFNPE

SEQ ID NO: 59684 - DNA, 822 bp, Bacillus subtilis
  CDS (1)..(822): transl_table=11
atgggaagacttgaaaacaaaacagcagttatcacaggcgccgcgacaggcattggtcaagcgacggcggaggtttttgccaatgaaggcgcgcgtgtgatcatcggagatatcaataaagatcaaatggaagaaacagttgacgcaatcagaaaaaacggaggacaggccgaatcctttcacctcgatgtgtcagatgaaaacagtgtgaaagcatttgctgatcaaatcaaggatgcatgcggaacgattgatattctgtttaataatgccggcgttgatcaggaaggcggaaaggtgcacgaatatccggttgacctgtttgaccgcattatcgccgtcgacctgcgcggcacattcctttgcagcaaatatttgattccgctcatgctcgaaaatggaggctccatcatcaacacctcctccatgtcaggccgtgccgcggaccttgaccgctccggctacaacgccgcaaaaggcggtatcaccaacctgacaaaggcaatggcaatcgactacgcacgaaacggcatccgcgtcaattccatttcaccgggcacgatcgaaacaccgctgattgacaaattagcaggcacaaaagaacaggaaatgggcgaacaattccgcgaagccaacaaatggatcacgccgctcggacgtcttggccagcccaaagaaatggcaacagtggcactgttcctcgcatcagacgacagctcatacgtcacaggagaagacatcaccgcagacggcggcatcatggcgtacacatggcctgggaagatgctgattgaggagaaatggaaggaagaaacgaaataa

SEQ ID NO: 59685 - protein, 273 aa, Bacillus subtilis
MGRLENKTAVITGAATGIGQATAEVFANEGARVIIGDINKDQMEETVDAIRKNGGQAESFHLDVSDENSVKAFADQIKDACGTIDILFNNAGVDQEGGKVHEYPVDLFDRIIAVDLRGTFLCSKYLIPLMLENGGSIINTSSMSGRAADLDRSGYNAAKGGITNLTKAMAIDYARNGIRVNSISPGTIETPLIDKLAGTKEQEMGEQFREANKWITPLGRLGQPKEMATVALFLASDDSSYVTGEDITADGGIMAYTWPGKMLIEEKWKEETK

SEQ ID NO: 59686 - DNA, 774 bp, Bacillus subtilis
  CDS (1)..(774): transl_table=11
atgagaaaacaagtcgctttggtgacaggggctgccggcggaatcagattcgaaatcgcaagagaattcgcccgggaaggtgccagcgtcatcgtttcagacctccgtccggaagcatgtgaaaaagcagcctccaagcttgcagaagaaggctttgacgcggcggccattccgtatgatgtgacaaaggaagcgcaagttgctgatacggtgaacgtcatccaaaaacaatacggccgcttggatattctggtgaacaatgccggtattcagcacgtcgctccgattgaagagtttccgacagacacctttgaacagctgatcaaggtcatgctgacggctccctttattgcaatgaagcatgtttttccgatcatgaaaaaacagcagtttggcagaatcattaatattgcgtctgttaatggattagtgggctttgcagggaaatccgcttataatagcgccaagcacggcgtcattggactcacaaaagtaggggcgctggaaggcgcgccccacggcataacagtcaatgcgctctgtccgggttatgtcgatacccagcttgtacgcaatcagcttagcgatctatcgaaaactagaaatgtcccttacgactctgtacttgaacaagtcatttttccgcttgtgccgcaaaagcgactgctttccgtcaaggaaattgcggattatgccgtgtttttggcaagcgagaaggcgaagggcgtcactgggcaggctgtcgtccttgatgggggctacaccgcacaatga

SEQ ID NO: 59687 - protein, 257 aa, Bacillus subtilis
MRKQVALVTGAAGGIRFEIAREFAREGASVIVSDLRPEACEKAASKLAEEGFDAAAIPYDVTKEAQVADTVNVIQKQYGRLDILVNNAGIQHVAPIEEFPTDTFEQLIKVMLTAPFIAMKHVFPIMKKQQFGRIINIASVNGLVGFAGKSAYNSAKHGVIGLTKVGALEGAPHGITVNALCPGYVDTQLVRNQLSDLSKTRNVPYDSVLEQVIFPLVPQKRLLSVKEIADYAVFLASEKAKGVTGQAVVLDGGYTAQ

SEQ ID NO: 59688 - DNA, 831 bp, Oryza sativa
  CDS (1)..(831)
atggaggcgtcgtcgaacaccaacgccatggccggcgtgatggcgccgctgatgctgcacggccgcgtggcaattgtcaccggcggcgccggcggcatcgggtcggccgtgtcgaggcacctggcgtccctcggcgcgcgcgtcgcggtcgcctacatcggggaccccgcgccggcgaacgagctggtgagcggcatcaacgacggctacttgcgcgcggaggaggaagagaagcgcgggccgcgggccatcgcggtggaggcggacgtgtcggacgcggcgcgggtgagggcgctgttcgacgcggcggcggcggcgttcggcggcgagatccacatcctggtgacgacggcggccgtgctggacttcgcgtacccggcgctggcggagacgagcgaggcagcgtacgacgccatgttcggcgtgaacgcgcgcggcaccttcctgtgctgccgcgaggccgcgaaccggctggcgcgcggcggccgggggcgcatcgtgacgttctcgtcgtcgggcgtcgggtcgctccggccggggtacgcggcgtacgcggcgagcaaggcggcggtggaggtgatgaccaagatcctggcgcgcgagctgcgcggcacggggatcacggcgaacgcagtggcgcccgggtccacgggcacgccgatgatgtacaccggcaagacagaggaggacatggcgcggtacatcgccgaggcgccgctgggccgcctcggcatgcccgacgacatcgcgccgctcgtcggcttcctcgccagcgacgccggcggctggatcaacgcccaggtcatccgctgcaacggcggcactatctag

SEQ ID NO: 59689 - protein, 276 aa, Oryza sativa
MEASSNTNAMAGVMAPLMLHGRVAIVTGGAGGIGSAVSRHLASLGARVAVAYIGDPAPANELVSGINDGYLRAEEEEKRGPRAIAVEADVSDAARVRALFDAAAAAFGGEIHILVTTAAVLDFAYPALAETSEAAYDAMFGVNARGTFLCCREAANRLARGGRGRIVTFSSSGVGSLRPGYAAYAASKAAVEVMTKILARELRGTGITANAVAPGSTGTPMMYTGKTEEDMARYIAEAPLGRLGMPDDIAPLVGFLASDAGGWINAQVIRCNGGTI

SEQ ID NO: 59690 - DNA, 846 bp, Oryza sativa
  CDS (1)..(846)
atgtccgccgccgccgccgccgccgcatcctcccccgctccccggttggaaagcaaggttgcgctggttaccggtggtgcttcaggtattggtgaagcaattgttcgcctctttagagagcatggtgcaaaggtatgtattgcagatatccaagatgaagcaggtcagaagctccgggactcccttggaggtgaccaagatgtcttatttgtccactgcgatgtttcggtggaagaggatgtagcccgagcggtcgatgcaacagctgaaaagtttggtactcttgacatcatggtcaacaatgctggctttacaggccagaaaatcacagatatccgaaacatcgacttttctgaagtcaggaaggtaatcgacatcaatttagttggtgtattccacgggatgaaacacgcagcgcgcatcatgatccccaataagaaggggtccatcatctcattgggaagtgtttctagtgtcattggagggttgggacctcattcatacacagcaaccaagcatgctgtggtgggtctaaccaagaatgtagctggggaattggggaagcatgggatacgcgtgaactgcgtatctccctatgcagtgcccacggctctctccatgccgtatctgccccagggcgagcgcaaggatgatgccctgaaagactttttcgcctttgttggtggtgaagcaaacctgaaaggtgtggatctgctacctaaggatgttgctcaagcagtgctctacttggcaagcgatgaagcgaggtacatcagcgcgctcaacctcatggtggatggtggctttacctctgtgaatcacaatttgagagcatttgaagattaa

SEQ ID NO: 59691 - protein, 281 aa, Oryza sativa
MSAAAAAAASSPAPRLESKVALVTGGASGIGEAIVRLFREHGAKVCIADIQDEAGQKLRDSLGGDQDVLFVHCDVSVEEDVARAVDATAEKFGTLDIMVNNAGFTGQKITDIRNIDFSEVRKVIDINLVGVFHGMKHAARIMIPNKKGSIISLGSVSSVIGGLGPHSYTATKHAVVGLTKNVAGELGKHGIRVNCVSPYAVPTALSMPYLPQGERKDDALKDFFAFVGGEANLKGVDLLPKDVAQAVLYLASDEARYISALNLMVDGGFTSVNHNLRAFED

SEQ ID NO: 59692 - DNA, 837 bp, Oryza sativa
  CDS (1)..(837)
atgcagaaggcagacacgaaacagcttttgcattgcatcatgtcgaagacaaggatggacggcaaggtggccatcgtgaccggcggcgcgagcggcatcggcgaggcggcggcgcggctgttcgcgtcgtgcggcgcgacggtggtcatcgccgacgtccaggacgagctgggcgaggcggtggcggcgtcggtggcggggggcgggtgccggtacgtgcggtgcgacgtgacggacgaggcgcaggtggaggcggcggtggccgccgcggtggcggagcacgggcggctcgacgtgatggtgagcaacgccggcgtgctgctcccgacggggcccgtcgtggacatggacctcgcggctctggaccgggtgatgtcggtgaacttccgcggcgcggcggcgtgcgtgaagcacgcggcgcgcgccatggtgtcgcgcggcacccgcggcgccatcgtgtgcacggcgagcgtggcgtcgtgccagggcgggttcgggccggcggcgtacacggcgtcgaagcacgcggtgctggggctggtgcgcgcggcggccggcgagctcgggcggcacggcgtgcgcgtgaactgcgtgtcccccggcggcgtggcgacgccgctgagctgcgggctgacggggatgagccccgaggagatggaggcggcggcggagccccacaacgtgctccgcgggaaggtgctcaaggcggcggacgtcgcggaggccatgctcttcctcgcctccgaccaggccgccttcgtcagcggccacaacctcgtcgtcgacggcgccaccaccgccgtcaactacgccgtgctccagtccgtcggcctgtga

SEQ ID NO: 59693 - protein, 278 aa, Oryza sativa
MQKADTKQLLHCIMSKTRMDGKVAIVTGGASGIGEAAARLFASCGATVVIADVQDELGEAVAASVAGGGCRYVRCDVTDEAQVEAAVAAAVAEHGRLDVMVSNAGVLLPTGPVVDMDLAALDRVMSVNFRGAAACVKHAARAMVSRGTRGAIVCTASVASCQGGFGPAAYTASKHAVLGLVRAAAGELGRHGVRVNCVSPGGVATPLSCGLTGMSPEEMEAAAEPHNVLRGKVLKAADVAEAMLFLASDQAAFVSGHNLVVDGATTAVNYAVLQSVGL

SEQ ID NO: 59694 - DNA, 825 bp, Oryza sativa; identical to SEQ ID NO: 40601
  CDS (1)..(825)

SEQ ID NO: 59695 - protein, 274 aa, Oryza sativa; identical to SEQ ID NO: 40602

SEQ ID NO: 59696 - DNA, 825 bp, Oryza sativa; identical to SEQ ID NO: 40387
  CDS (1)..(825)

SEQ ID NO: 59697 - protein, 274 aa, Oryza sativa; identical to SEQ ID NO: 40388

SEQ ID NO: 59698 - DNA, 786 bp, Oryza sativa
  CDS (1)..(786)
atggccacgaactccgctccggcgcaggcgcaggcggcggcgctgccactctccggccgcgtggccatcgtcaccggcgcgtcgcgcggcatcggccgcgccatcgccatccacctggcctcgctcggcgccagcgtcgtcgtcggctacgcctccagctccgggccagccgaggcgctcgccgccgagctcccgagcgcggtggccgtgaaggccgacgtctccgacgaggccggcgcgaggtcccttttcgacgccgccgaggccgcgttcggcggcggcgccgcgcacatcctcgtggcctgcgcgggcctcgccgtcagcacgtacccgaggctggccgacacgtccgccgccgacttcgacgccgcgttcgccgtgaacgcccgcggcgcgttcctgtgcctccgggaggccgccaaccggctgcgccgcggcggcggcggccggatcgtggccgtgtcgtcgacgctggcggctacgctgctgcccgggtacgcggcgtacgcggcgtcgaaggccgccgttgaggcgatggtgcgggtgatggcgaaggaggtcggggcgtcgcgggtgaccgtgaactgcgtcgcgccgggccccgtggcgacggagctgttcttcgccggcaagagcgaggaggcggtggagaggttcaaggccgggaacccgatggggcggctcggcgaggtcggcgacatcgctccggtggtcggcttcctctgcaccgacgccgccgagtgggtcaacggccaggtgattcgagtcaatggcggcattgcttag

SEQ ID NO: 59699 - protein, 261 aa, Oryza sativa
MATNSAPAQAQAAALPLSGRVAIVTGASRGIGRAIAIHLASLGASVVVGYASSSGPAEALAAELPSAVAVKADVSDEAGARSLFDAAEAAFGGGAAHILVACAGLAVSTYPRLADTSAADFDAAFAVNARGAFLCLREAANRLRRGGGGRIVAVSSTLAATLLPGYAAYAASKAAVEAMVRVMAKEVGASRVTVNCVAPGPVATELFFAGKSEEAVERFKAGNPMGRLGEVGDIAPVVGFLCTDAAEWVNGQVIRVNGGIA

SEQ ID NO: 59700 - DNA, 798 bp, Oryza sativa
  CDS (1)..(798)
atggccgccgccgccgccgccgccgcagtcgccgccgccgcttcgtcgcaaccggcgtcccagcccctcgccggccgcgtggccatcgtgacgggcgcgtcgcgcggcatcgggcgcggcatcgcggcgcacctgtccgcgctcggcgcgagcctcgtcctcgggtacgcgtccagctccgccgaggccgacgcgctcgccgcggagctcccccgcgccgtggccgtcaaggccgacgtgtccgacgagacgggcgtccgcgccctcttcgacgccgccgagtcggccttcggcgccggggcgcacatcctcgtggcgaacgccggcttgctcgacgacaggtacccgcacctgtcgaacacccccaccgccgacttcgaccgcaccatcgccgtcaacctgcgcggcgcgttcctctgcctccgcgaggcggcgaaccgcctcccccgcggcggccgcatcgtggccatcacctcgtcggtggtcgcgtcgctgccgcctggctactcggcgtacacggcgtccaaggcggcggtggaggcgatggtgcggaccatggcgaaggagctcaagggcaccggcatcacggcgaactgcgtcgcgccgggccccgtggcgacggacatgttcttcgccggcaaggacgaggcgtgggtgaagcgcaccgtggatgccaacccgacggggcggctcggcgatcccggcgacatcgccgccatggtcggcttcctctgcaccgacgccgccgagtggaccaacggccaggtcatacgtgtcaacggcggctacgtctcttga

SEQ ID NO: 59701 - protein, 265 aa, Oryza sativa
MAAAAAAAAVAAAASSQPASQPLAGRVAIVTGASRGIGRGIAAHLSALGASLVLGYASSSAEADALAAELPRAVAVKADVSDETGVRALFDAAESAFGAGAHILVANAGLLDDRYPHLSNTPTADFDRTIAVNLRGAFLCLREAANRLPRGGRIVAITSSVVASLPPGYSAYTASKAAVEAMVRTMAKELKGTGITANCVAPGPVATDMFFAGKDEAWVKRTVDANPTGRLGDPGDIAAMVGFLCTDAAEWTNGQVIRVNGGYVS

SEQ ID NO: 59702 - DNA, 798 bp, Oryza sativa
  CDS (1)..(798)
atggacgccgccgccgtcgcagctgccgcgtcgtcgcagcagccggcggccgccccgccccttgccgggcgtgtggccatcgtgaccggcgcgtcgcgcggcatcgggcgcgccatcgcggcccacctctccgcgctcggcgccagcgtcgtggtcgggtacgcgtccagcgccgcgaaggccgacgcgctcgccgcggggcttccccgcgccgtggcggtgagggccgacgtggccgacgaggccggcgtgcggtcgctcttcgacgccgccgagtccgccttcggcgccggtgcgccgcacatcgtggtggcgaacgcggcggtgctcgacgacaagtatcccaccctggtggacaccgcgacggcggacttcgaccgcaccttcgccgtcaacacgcgcggcgcgttcctgtgcctccgcgaggcggcccaccggctgccccgcggcggcggcggccgcatcgtggcgatcacctcgtcggtggtcgggtcgcatccgacggggtactccgcgtacacggcgtcgaaggcggccgtggaggcgatggtgcggacgatggcgaaggagctcaagggcacccgcatcacggccaactgcgtcgcgccgggggccacggcgacggacatgttcttcgccgggaagagcgaggagcgcgtcgacgagatcaaggccacgaacccgatggggcggctcggcgaggccggcgacatcgcgccagtggtcgggttcctctgcaccgacgccgccgagtgggtcaacggccaggtcatccgggtcaacggcgggtacgtgtga

SEQ ID NO: 59703 - protein, 265 aa, Oryza sativa
MDAAAVAAAASSQQPAAAPPLAGRVAIVTGASRGIGRAIAAHLSALGASVVVGYASSAAKADALAAGLPRAVAVRADVADEAGVRSLFDAAESAFGAGAPHIVVANAAVLDDKYPTLVDTATADFDRTFAVNTRGAFLCLREAAHRLPRGGGGRIVAITSSVVGSHPTGYSAYTASKAAVEAMVRTMAKELKGTRITANCVAPGATATDMFFAGKSEERVDEIKATNPMGRLGEAGDIAPVVGFLCTDAAEWVNGQVIRVNGGYV

SEQ ID NO: 59704 - DNA, 891 bp, Oryza sativa
  CDS (1)..(891)
atgttcagagcattgcagatcgtcctcaggggtaagagccgaggatttgtcagtcacttctcctccacggcttcaaattctgaaaggttggctgggaaggtggcggtgatcaccggcgcggcgagcggcatcggcaaggcgaccgcggcggagttcgtcaggaatggcgccaaggtcatcctcgccgacgtccaggacgacgtcggccgcgccgtcgcctcggagctcggcgcggacgcggcgtcgtacacccgctgcgacgtcaccgacgaggcgcaggtcgcggcggccgtggacctcgccgtggcgcggcacgggcagctcgacgtcatggtcaacaacgccggcatcgtgggctccctgtcgcgccccccgctcggcgccctcgacctcgccgacttcgacgccgtcatggcggtgaacacgcgcggcgtcctcgcgggcgtcaagcacgccgcgcgcgtcatggcgccgcgccgccgcggcagcatcatctgcgtggcgagcgtcgccggggtgctcggcagcgtgacgccgcacccgtacagcgtgtccaaggccgccgtgctcggcgcggtccgcgccgccgccggcgagatggcgcgctccggcgtgcgcgtgaacgccatctcccccaactacatccccacgccgctggtgatgcgcatcatggcggagtggtaccccggggcgagcgccgacgagcaccgccgcgtcgtggagcgggagatcaacgagatggagggcgcgacgctggagcccgaggacatcgcgagggcggcggtgtacctggcctccgacgaggccaagtacgtgaacggccacaacctcgtcgtcgacggcgggtacaccgtcggcaaggcgcccaacctgccggcgccgccgcaataa

SEQ ID NO: 59705 - protein, 296 aa, Oryza sativa
MFRALQIVLRGKSRGFVSHFSSTASNSERLAGKVAVITGAASGIGKATAAEFVRNGAKVILADVQDDVGRAVASELGADAASYTRCDVTDEAQVAAAVDLAVARHGQLDVMVNNAGIVGSLSRPPLGALDLADFDAVMAVNTRGVLAGVKHAARVMAPRRRGSIICVASVAGVLGSVTPHPYSVSKAAVLGAVRAAAGEMARSGVRVNAISPNYIPTPLVMRIMAEWYPGASADEHRRVVEREINEMEGATLEPEDIARAAVYLASDEAKYVNGHNLVVDGGYTVGKAPNLPAPPQ

SEQ ID NO: 59706 - DNA, 807 bp, Oryza sativa
  CDS (1)..(807)
atggatgtcgcttgcagtttggctggcaaggtggctatcattaccggtggagccagtggcatcggaaaggttacagcaaaggagttcatcaagaatggtgccaaggtcatcatcgccgatgtccaggacgagctcggccactctgcggcggccaagctcggcccggacgcctcgtacacgcactgcgatgtcaccgacgaggcgcaggtcgaggcggccgtggacctcgctgtgaggctccacggccacctcgacatcctctacaacaacgctggcatcatcggcgccatgccgcaggacgacatggcgtccgtcgacctcgccaacttcgaccgcatgatggcgatcaacgcccgggcggcgctcgtcggcatcaagcacgccgcgcgcgtcatggcgccgcgccgcagcggcgtcatcctctgcacggcgagcgacgcgggcgtcatgcccatcccgaacatcgccatgtactccgtctccaaggcgaccaccatcgccatcgtgcgcgccgcggcggagccgctgtcgcgccacggcctgcgggtgaacgccatctcgccgacgggcaccaggacgccgatgatgatgcatatcatctcccagatgacccccggcgtgggcgaggacgacctggagcggatggcggacgccgccatcagcgccggcgtggccatcgagccggagtacgtcgcgagggcggcggtgtacctcgcctccgacgaggccaagtacgtcaacgggcataacctcgtcgtcgacggcggcttcacaacgcataaaggagacgacaatcgcatgaattaa

SEQ ID NO: 59707 - protein, 268 aa, Oryza sativa
MDVACSLAGKVAIITGGASGIGKVTAKEFIKNGAKVIIADVQDELGHSAAAKLGPDASYTHCDVTDEAQVEAAVDLAVRLHGHLDILYNNAGIIGAMPQDDMASVDLANFDRMMAINARAALVGIKHAARVMAPRRSGVILCTASDAGVMPIPNIAMYSVSKATTIAIVRAAAEPLSRHGLRVNAISPTGTRTPMMMHIISQMTPGVGEDDLERMADAAISAGVAIEPEYVARAAVYLASDEAKYVNGHNLVVDGGFTTHKGDDNRMN

SEQ ID NO: 59708 - DNA, 864 bp, Oryza sativa
  CDS (1)..(864)
atgacgtcgacttcgcctgaaagtctaatcgccggtggattctccacggcggcgagctcccaccagaggttggccggcaaggtggccgtcatcaccggcgccgccagcggcatcggcaaggcgaccgccgcggagttcatcaggaacggcgccaaggtgatcatcaccgacgtcaacgacgacctcggccacgccgcggcggcggagctcggcccggacgccacgtacgcgcgctgcgacgtcgccgacgaggcgcaggtcgccgccgccgtcgacctcgccgtggcgcgccacggccgcctcgacgtcatgcacaacaacgccgccatcccggggaggttcccgcaggacgacatggcgtccgtcgacctcgccgacttcgacgccatgatggcggtgaacgcccgcgcgtcgctcgccggcatcaagcacgccgcgcgcgtcatggcgccccgccgcgccggcgtcatcctctgcacggccagcgccgtcggcgtcctcccgctcccggcggtcgccacgcactccatcaccaaggccaccatcatcgccatcgtgcgcgcagcggcggagcccctggcgcgccacggcctgcgggtgaacgccatctcgccgggcgccgtcaggacgccggtcctgcagggcaaggtgtcggtgatgtcggcgtcgtctcctaccatgagcgacgagctgaagcagatgatcgacgtcgacgcgaacgacatgatgatggggccggaggaggtggccatggcggcggtgtacctcgcctccgacgaggccaggtacgtgaccggccacaacctcgtcgtcgacggcgggtacaccgtgcacaaaggagctgacacaccggcggcgcgttga

SEQ ID NO: 59709 - protein, 287 aa, Oryza sativa
MTSTSPESLIAGGFSTAASSHQRLAGKVAVITGAASGIGKATAAEFIRNGAKVIITDVNDDLGHAAAAELGPDATYARCDVADEAQVAAAVDLAVARHGRLDVMHNNAAIPGRFPQDDMASVDLADFDAMMAVNARASLAGIKHAARVMAPRRAGVILCTASAVGVLPLPAVATHSITKATIIAIVRAAAEPLARHGLRVNAISPGAVRTPVLQGKVSVMSASSPTMSDELKQMIDVDANDMMMGPEEVAMAAVYLASDEARYVTGHNLVVDGGYTVHKGADTPAAR

SEQ ID NO: 59710 - DNA, 1200 bp, Oryza sativa
  CDS (1)..(1200)
atgcccatcgtccgcgccttcgattcgattagcgtctccgatgacccgaagcacgtcggcgtcgggaagccggatgtggacgtgccgaacgacccaatgtcggtgtcgggactgtcgtggctggcaaggtccgggaggcgcccgcaggtgctgaccaaggcgcgggaggccgtcttgtcgctcaccggcgagaaccgcgtctccggagggaaagggaaaggggagagggaaggtggtgaggaggatgagggagagggcagagccgatggcgagcgggtgaagccagcggcggtcgacagcaacagtggagggttggatcgggagacgaagagagtttttggaacaacgagtacttggacagctggtttagtcgtcaatggcttctccacggcgtccagctcgcaccagaggttggccggcaaggtggccgtcatcaccggcggcgccagcggcatcggcaaggcgacggccacggagttcatcaagaacggcgccaaggtcatcatcgccgacatccaggacgacctcggccactcggtggcggcggagctcggcccggacgccgcgtacacgcgctgcgacgtcgccgacgaggcgcaggtcgccgcggccgtgggcctcgccgtgaagcggcacggccgcctcgacgtgttccacaacaacgccggcatcgccggggcgctgccgcaggacgacatggcggccgtggacctcggcgacttcgaccgggtgatggcggtgaacgcccggtcgacgctcgccgccgtcaagcacgccgcgcgcgccatggcgccgcgatgcagcggctgcgtgctctgcacgtcgagcggcgcgggcgtcatccccgtcccggctgtcccggtgtactccgtgtccaaggccaccgtgatcgccatcgtgcgcgcggcggcggagccgatggcgcgccacggcctgcgtgtgaacgccatctcgccgggcgccacgaggacgccgctgctgctgcggcagatcccgctgctctccgagatgtcccctagcctgagcgacggcctgaagacgacggtggagaaggaggtcggcgagggtggcgccgtcgtgctgctcgcgccggaggacatcgcgagggcggcggtgtacctggcctccgacgaggccaggtacgtgaacgggcacaacctcgtcgtcgacgccgggtacaccgtgcacaaaggagcgtga

SEQ ID NO: 59711 - protein, 399 aa, Oryza sativa
MPIVRAFDSISVSDDPKHVGVGKPDVDVPNDPMSVSGLSWLARSGRRPQVLTKAREAVLSLTGENRVSGGKGKGEREGGEEDEGEGRADGERVKPAAVDSNSGGLDRETKRVFGTTSTWTAGLVVNGFSTASSSHQRLAGKVAVITGGASGIGKATATEFIKNGAKVIIADIQDDLGHSVAAELGPDAAYTRCDVADEAQVAAAVGLAVKRHGRLDVFHNNAGIAGALPQDDMAAVDLGDFDRVMAVNARSTLAAVKHAARAMAPRCSGCVLCTSSGAGVIPVPAVPVYSVSKATVIAIVRAAAEPMARHGLRVNAISPGATRTPLLLRQIPLLSEMSPSLSDGLKTTVEKEVGEGGAVVLLAPEDIARAAVYLASDEARYVNGHNLVVDAGYTVHKGA

SEQ ID NO: 59712 - DNA, 897 bp, Oryza sativa
  CDS (1)..(897)
atgtacagcgcccttcacctcgttcagaggggcaagagcagagcagggttgacgatgttgactggattcgtcaaccgcttctcttccgtgtcaagacccgaaaggttggctggaaaggtggccgtgatcaccggcggcgcaagcggcatcggcgaggcgacggccaaggagttcatccgcaatggcgccaaagtcatcatcgccgacgtacaagacgatctcggccacgccgtcgccgccgagctcggcccagatgcggcctacacccgctgcgatgtcaccgacgaggcgcagatcgcggcggccgtggacctcgccgtggcgtgccacggccgcctcgacgtcctgcacaacaacgccggggtcacgtgctcctacgtggggcccctcgcctccctagacctcgccgacttcgaccgcgtcatggcggtgaacgcccgggcggtgctcgccggcatcaagcacgcggcgcgcgtgatggcgccacggcgcgccggctccatcctctgcacggccagcgtggcgggcgtgatcggcagcgatgtcccccacgcgtacagcgtctccaaggcggcagccatcggcgtggtgaggtccgccgccggcgagctggcgcgccacggcgtgcggctgaacgccatctcgccgcacggcatcgcgacgccgctggcgatgcgcgggttcggcgacgtgctggcgtgggcggacgccgagagattgaagcgggtcatcgaggaggacatgaacgagctggagggcgcaaagctggaggcggaggacatcgcgagggcggcggtgtacctcgcctccgacgaggccaagtacatcactgggcataacctcgtcgtcgatggcgggttcaccgtcggcaagcgcctcaacttcgcgcatgcttga

SEQ ID NO: 59713 - protein, 298 aa, Oryza sativa
MYSALHLVQRGKSRAGLTMLTGFVNRFSSVSRPERLAGKVAVITGGASGIGEATAKEFIRNGAKVIIADVQDDLGHAVAAELGPDAAYTRCDVTDEAQIAAAVDLAVACHGRLDVLHNNAGVTCSYVGPLASLDLADFDRVMAVNARAVLAGIKHAARVMAPRRAGSILCTASVAGVIGSDVPHAYSVSKAAAIGVVRSAAGELARHGVRLNAISPHGIATPLAMRGFGDVLAWADAERLKRVIEEDMNELEGAKLEAEDIARAAVYLASDEAKYITGHNLVVDGGFTVGKRLNFAHA

SEQ ID NO: 59714 - DNA, 897 bp, Oryza sativa
  CDS (1)..(897)
atgtacagcgccattcacctcgttcagaggggcaagaacagagcagggttgacgatgttgactggattcgtcaacagtttctcctctgtgtcaagacccgaaaggttggctggaaaggtggccgtgatcaccggtggcgcaagcggcatcggcgaggcgacggccaaggagttcatccgcaatggcgccaaggtcatcatcgccgacgtacaagacgatctcggccacaccgtcgctgccgagctcggcccgggctcggcctacacccgctgcgacgtcaccgacgaggcgcagatcgcggcgaccgtggaccttgccgtggcgcgccacggccaccttgacatcctgtacaacaacgccgggatcacaagctcctctgtggggcaccttgcctccctcgacctcgccgacttcgaccgcgtcatggcggtgaacgcccgggcggtgctcgccggcatcaagcacgccgcgcgcgtgatggcaccacgacgcaccggctccatcctctgcacggccagcgtggcgggcatgatgggcggcgagatgccccacgcgtacaacgtctccaaggcggcggtcataggtgtggtgcggtccgccgccggcgagctggcacgccacggcgtgcggctgaacgcgatctcgccgctcggcatcgcgacgccactggcgatgcgcgggttcggcgacatgctggcgtgggcggacgccgagcgggtgaggcggctcatcgaggaggacatgaacgagctagagggcgcgacgctggaggcggaggacatcgcgagggcggcggtgtacctcgcctccgacgaggccaagtacgtcaccgggcataacctcgtcgtcgacggcgggttcaccgtcgggaagcggctcaacgtggcgcgtgcttga

SEQ ID NO: 59715 - protein, 298 aa, Oryza sativa
MYSAIHLVQRGKNRAGLTMLTGFVNSFSSVSRPERLAGKVAVITGGASGIGEATAKEFIRNGAKVIIADVQDDLGHTVAAELGPGSAYTRCDVTDEAQIAATVDLAVARHGHLDILYNNAGITSSSVGHLASLDLADFDRVMAVNARAVLAGIKHAARVMAPRRTGSILCTASVAGMMGGEMPHAYNVSKAAVIGVVRSAAGELARHGVRLNAISPLGIATPLAMRGFGDMLAWADAERVRRLIEEDMNELEGATLEAEDIARAAVYLASDEAKYVTGHNLVVDGGFTVGKRLNVARA

SEQ ID NO: 59716 - DNA, 783 bp, Oryza sativa
  CDS (1)..(783)
atggccactgccagctctataaacaagaggtttagcctcgccggtgccacggcgcttgtcaccggtggcagcaaaggcatcggccgcgccatcgtggaagagctggcgagcttcggcgcgacggtgcacacctgcgctcggaaccaggcggagctgagcagatgccaggaggagtggacggccaagggcctcgccgtcaccgtctccgtctgcgacgtggcggtgcgcgccgacagggaggcgctcgccggcagggtgtccgccatgttcgacggcaagctcagcatcctggtgaacaacgctgggacggcgtacctgaagccggcggcggacctgacgccggaggagacgtcgaggttgatgacgaccaacttcgagtcgtgcttccacctgagccagctgttctaccctctcctcaaggactccggaagaggcagtatcgttaatatctcgtccgtcgcttctgtcctcgcgttccattctcttcctatctactcggctgccaaaggagcaatgaaccaagtcacaaggaacctggcttgtgagtgggcgagcgatgggatcagagtcaattccgttgcaccgggctacatccagactccactcctaactgccttcgtggccggcaacgatttcgcacaggttgagttcaaccgtcttcctttgggccgtctcggtaaacctgaggacatctcgtcgttggtggcgttcctgtgcatgcctgcggcctcctacatcactggccagattatatgcgtcgatgggggccgtatgctttcttaa

SEQ ID NO: 59717 - protein, 260 aa, Oryza sativa
MATASSINKRFSLAGATALVTGGSKGIGRAIVEELASFGATVHTCARNQAELSRCQEEWTAKGLAVTVSVCDVAVRADREALAGRVSAMFDGKLSILVNNAGTAYLKPAADLTPEETSRLMTTNFESCFHLSQLFYPLLKDSGRGSIVNISSVASVLAFHSLPIYSAAKGAMNQVTRNLACEWASDGIRVNSVAPGYIQTPLLTAFVAGNDFAQVEFNRLPLGRLGKPEDISSLVAFLCMPAASYITGQIICVDGGRMLS

SEQ ID NO: 59718 - DNA, 1134 bp, Oryza sativa
  CDS (1)..(1134)
atggcggcgcggcggcgacttgcggcagtgcacgcggctgccacggcggcgggcggtggtgccgtgcagggcactgccggcggcggctcacagcagtgcacacgacggccgcgactgcaggcggcggcaccgtgcggagtgttgccggcggcgcggtgcgacgccatgccgtggcgtggccgtcggcgcgacgccgtgcggtggcgtggccgcaggatgttcagagtaacacaacttctcagagagactaccaagagagttattggaacaaaaacaacttcccgtgcagatttaacactaagttgcttctccacggtgtccaatttacagaggttggctggtaaggtggctgtcatcaccggcgcggcgagcggcatcggcaaggcgacggcagcggagttcatcaagaatggcgccaaggtcatcctcgccgacatccaggacgacctcgcccgctcggtggcctccgagctcggcccggacgccgcgtacacgcgctgcgacgtcgccgacgaggcgcaggtcgccgcggccgtggacctcgccgtgaggctgcacggccgcctcgacgtgttccacagcaacgccggcatcccggggaggataccgcaggacgacgcgctgtccgtcgacctcgccggcttcgaccgcgtgatggcggtgaacgcccgcccggcgctcgcggccatcaagcacgccgcgcgcgtaatggcgcctcgccgcaccggctgcgtcatctgcacggcgagcggcgcgggcgtcgtccccatgccggcgctcgccatgtactccgtctccaaggccaccgtcatcgctgtggtgcgcgccatggcggagccgctggcgcgccacggcctgcgggtgaacgccatctcgccgggggcgacgaggacgccgatgatgctgaacgagatcccgcgcctcgccgtggtgtccccgggcctgagcggggagctgaggaggatggtggaggagggcgccagcgacgccgtcaaggtgctcgagccggaggatatcgcgagggcggcggtgtacctggcctccgacgaggccaggtacgtgaacgggcacaacatcgtcgtcgacgccggctactcggtgcacaaaggagcggagaactcgccggcgcgttga

SEQ ID NO: 59719 - protein, 377 aa, Oryza sativa
MAARRRLAAVHAAATAAGGGAVQGTAGGGSQQCTRRPRLQAAAPCGVLPAARCDAMPWRGRRRDAVRWRGRRMFRVTQLLRETTKRVIGTKTTSRADLTLSCFSTVSNLQRLAGKVAVITGAASGIGKATAAEFIKNGAKVILADIQDDLARSVASELGPDAAYTRCDVADEAQVAAAVDLAVRLHGRLDVFHSNAGIPGRIPQDDALSVDLAGFDRVMAVNARPALAAIKHAARVMAPRRTGCVICTASGAGVVPMPALAMYSVSKATVIAVVRAMAEPLARHGLRVNAISPGATRTPMMLNEIPRLAVVSPGLSGELRRMVEEGASDAVKVLEPEDIARAAVYLASDEARYVNGHNIVVDAGYSVHKGAENSPAR

SEQ ID NO: 59720 - DNA, 897 bp, Oryza sativa
  CDS (1)..(897)
atgatgcttaacgcagcagccaaaaaacttgtcagggggaagagcatagctgctcacgtattcttctcctcgtcgtcaagatccagaaagttggatggcaaagtggccgtgataaccggcgcagcgagcggcatcggcgaggccacggcgaaggagttcgtcaggaatggcgccaaggttatcattgccgatatcaaggatgatctcggccgcgccgtggccggcgagctcggcgccgacgccgcgtcgtacacgcactgcgacgtcaccgtcgagaaggatgtcgcctcggccgtcgacctcgccgtggcgcgacacggccgcctcgacgtcgtgtacagcaacgccgccatcgcgggtggcgcgcctccggccacgctcgcggcgctcgacctcgacgagtacgaccgcgtcatggccgtcaacgccaggtccatgttggcgtgcgtcaagcacgcggcgcgcgtcatggcgccccgccgcgccggttgcatcctctgcacggccagcacggcggcggtgctcggcggcatggcggcgccggcgtactccatgtcgaaggcggccgtcgtcggcatggtgcggacggtggcgaggcagctggcgcgcgacggcgtgcgggtgaacgccatctcgccgcacgcagtcccgacgccgatggcgataggtctcttctccgagacgttcccggcggcgaccgcggaggaggtgaggaggatggtgacgagggagatgcaggagctggaaggggcgtcgctggaggtggaagacgtggcgagggcggccgtcttcttggcgtccgacgaggccaagttcatcaccggccacaacctcgtcgtcgacggcgggttcacggcaggcaaggtgctcgtccgggatcctccgggctctgcttga

SEQ ID NO: 59721 - protein, 298 aa, Oryza sativa
MMLNAAAKKLVRGKSIAAHVFFSSSSRSRKLDGKVAVITGAASGIGEATAKEFVRNGAKVIIADIKDDLGRAVAGELGADAASYTHCDVTVEKDVASAVDLAVARHGRLDVVYSNAAIAGGAPPATLAALDLDEYDRVMAVNARSMLACVKHAARVMAPRRAGCILCTASTAAVLGGMAAPAYSMSKAAVVGMVRTVARQLARDGVRVNAISPHAVPTPMAIGLFSETFPAATAEEVRRMVTREMQELEGASLEVEDVARAAVFLASDEAKFITGHNLVVDGGFTAGKVLVRDPPGSA

SEQ ID NO: 59722 - DNA, 855 bp, Brassica napus
  CDS (1)..(855)
atgtcaactgaaaacattcaacattcttccctcccttctcaaaggcttttgggcaaagtggcattgataaccggaggagccacagggataggcgaaagcatcgctcgtctcttccacaagcacggtgccaaagtctgcatcttcgacgtccaagacgatctcggagacaaagtactcaaaactctgttagccaactcggaggatgatgagtcagcttgtttcatccacggtgacgtcacacaagaagacgacatcagcaacgctgttgacttcgccgtcaaacgtttcgggaccctcgacatactcatcaacaacgcaggagtaagcggagcaccctgccccgacatccgcaacaacagtttaaccgagttcgaaaccgtcttcaacgtcaacgtgaaaggagctttcctagggatgaaacacgcggcgcgtgtgatgatccccgccaagaaaggctccatagtctctttatgcagcgttggtggtgttgtcggaggcgtcggtccgcacgcttacgtcggttccaagcacgcggttctaggtttgactaggagcgttgcggcggagctgggacagcatgggatacgcgtgaactgcgtttctccttacgcggttgcgactaacctcgcgttggctcatttgcctgaggacgagaggaatgaaggcgtggtcgctggtttcaggagtttcgcggctgcgaacgcgaatctgaaaggtgttgagttgacggttgatgacgtggccaacgcggttttgtttcttgcgagtgatgagtcgcggtacgtgagtggtgataatctgatggttgatggtgggtttacttgcactaaccactcctttaaagtttttaggtga

SEQ ID NO: 59723 - protein, 284 aa, Brassica napus
MSTENIQHSSLPSQRLLGKVALITGGATGIGESIARLFHKHGAKVCIFDVQDDLGDKVLKTLLANSEDDESACFIHGDVTQEDDISNAVDFAVKRFGTLDILINNAGVSGAPCPDIRNNSLTEFETVFNVNVKGAFLGMKHAARVMIPAKKGSIVSLCSVGGVVGGVGPHAYVGSKHAVLGLTRSVAAELGQHGIRVNCVSPYAVATNLALAHLPEDERNEGVVAGFRSFAAANANLKGVELTVDDVANAVLFLASDESRYVSGDNLMVDGGFTCTNHSFKVFR

SEQ ID NO: 59724 - DNA, 786 bp, Brassica napus
  CDS (1)..(786)
atgtcggaactaagactggatggcaagatcgtaattataacaggcggagccagcggtatcggagccgaggcggctaggctattcaccgaccacggagctaaagtggtcatagtcgatatacaagaggagctaggccaaaacgtcgccgtttccatcgggaaagagagagccagtttctaccgttgcgacgtaacagaggagacagaagtggagaacgccgtcaagttcaccgtcgagaagcacggaaagctcgacgttcttttcagcaacgccggcgtcttggacccgcggggaagcatcctcgacttggatcttgaccggttcgaccgcataatggcggttaacgtgcgcggcgcggctgcgtttatcaaacacgcggcacgtgcgatggtggagaaaggcacgcgtgggtctatcgtgtgtaccacgagcgtgtcgtcggagattggtggtgggagacgtcacgggtacacggcgtctaaacatggactgctcgggctgatcagaacggcgtgtggggagctggggaagtatgggattagagtcaacggtgtggcaccgtacgcgctcgcgacgccgttgactagccacgacgaggaaacggcgaggcaggtggaggaagaatttgcggccaagggggtgctcaagggtgtggtgcttaacgctcgccacgtggcgcaagtggctctgtttttggcttctgatgagtcggtttatgtcagtggtcagaatttggcggtggatggaggttatagtatgtgtcgttcaggcaatgttcaaatttag

SEQ ID NO: 59725 - protein, 261 aa, Brassica napus
MSELRLDGKIVIITGGASGIGAEAARLFTDHGAKVVIVDIQEELGQNVAVSIGKERASFYRCDVTEETEVENAVKFTVEKHGKLDVLFSNAGVLDPRGSILDLDLDRFDRIMAVNVRGAAAFIKHAARAMVEKGTRGSIVCTTSVSSEIGGGRRHGYTASKHGLLGLIRTACGELGKYGIRVNGVAPYALATPLTSHDEETARQVEEEFAAKGVLKGVVLNARHVAQVALFLASDESVYVSGQNLAVDGGYSMCRSGNVQI

SEQ ID NO: 59726 - DNA, 777 bp, Brassica napus
  CDS (1)..(777)
atgtcaggaagcagaagattggatggcaaagtcgtgattataacaggcggagccagcgggattggagcagaatctgctaggctattcactgaccacggagctaaagtggttattgttgacatacaagaggagttaggccagaacgttgccgtttcaataggtaaagacaaagcaagttattacaaatgcgatatcacaaacgaaacagaggtagagaatgctgttaagttcaccgtcgaaatgcatggaaaactcgacgttctgttcagcaacgccggcgtcttagatacgccgggaagcatcctcgacttgaatctcgaacattttgaccgtgtaatgggggttaacgttcgcggtgcagctgcgtttatcaaacatgcagcacgtgccatggtgggtagtggcacacgtggttccattgtttgtacgactagcgttacggcggagattggtggtcagggacctcatggatacacagcgtcgaagcatgccctcctggggctgattaagtcagcttgtggtgagttggggaaacatggcattagagtaaacggcgtggcgccgtttgcggtggcgacgagtatgactagccgtgatgaggagacggcgaagcaggtggagggatattgtgaagccgtgggaattctgaagggtgttgcgttgaaacccaatcacgtggcgaaggctgctttgtttctagcttctgatgattctatttatattagtgggcataatctagttttggacggtggatttagcgtcgttaagcctctttaa

SEQ ID NO: 59727 - protein, 258 aa, Brassica napus
MSGSRRLDGKVVIITGGASGIGAESARLFTDHGAKVVIVDIQEELGQNVAVSIGKDKASYYKCDITNETEVENAVKFTVEMHGKLDVLFSNAGVLDTPGSILDLNLEHFDRVMGVNVRGAAAFIKHAARAMVGSGTRGSIVCTTSVTAEIGGQGPHGYTASKHALLGLIKSACGELGKHGIRVNGVAPFAVATSMTSRDEETAKQVEGYCEAVGILKGVALKPNHVAKAALFLASDDSIYISGHNLVLDGGFSVVKPL

SEQ ID NO: 59728 - DNA, 816 bp, Glycine max
  CDS (1)..(816)
atggcaagtgcttctgcggtctcagctcatgttagaaggcttgaggggaaagtggcgattatcactggtggtgcaagcggcataggtgaggccactgcaagactcttctctaagcacggagcacaccttgtcatagctgacattcaagacgatttgggcctctctctttgcaaacacttggaatccgcttcctatgttcactgcgacgtgacaaaggaagaggacgttgaaaactgcgtgaacacagcggtttccaagtatggaaaactagacatcatgcttaataacgcaggtatatgtgatgagatcaaaacaagcatactagacaacaacaagtctgattttgagagtgtcataagcgtgaacttggttggtccttttctgggaacaaagcacgctgcaagagtcatgatccctgctaaaaggggaagcataattaacacagctagtgttgctggaaccttaggtggagtggctacacatgcctacacaagttcaaagcacgcgctaattggactgatgaaaaacactgcggtggagcttggacagtttggtattcgggtgaattgtgtgtccccttatgtggttcccacaccgttgaccaagaaacatgccaatattgacgaagaaggagttcgtgagatttattccaacctaaaaggtgttcatcttgtgccgaacgatgtggccgaagctgctctttacttggcaggtgatgagtctaagtatgttagtggtcacaatctcgtgttagatggtgggtacactgatgtaaatataggattttctgtgtttgatcaaaataaacttaactaa

SEQ ID NO: 59729 - protein, 271 aa, Glycine max
MASASAVSAHVRRLEGKVAIITGGASGIGEATARLFSKHGAHLVIADIQDDLGLSLCKHLESASYVHCDVTKEEDVENCVNTAVSKYGKLDIMLNNAGICDEIKTSILDNNKSDFESVISVNLVGPFLGTKHAARVMIPAKRGSIINTASVAGTLGGVATHAYTSSKHALIGLMKNTAVELGQFGIRVNCVSPYVVPTPLTKKHANIDEEGVREIYSNLKGVHLVPNDVAEAALYLAGDESKYVSGHNLVLDGGYTDVNIGFSVFDQNKLN

SEQ ID NO: 59730 - DNA, 795 bp, Glycine max
  CDS (1)..(795)
atggctgaaacaaagttgagctttaaggacaaaagatggtcactccatgggatgactgctctagtcacaggagccacccgcggcatagggcatgccattgttgaagaattggcagaatttggggcagctgttcatatttgtgcacggaaccaagatgatattgataaatgtttggaagagtggaaaagcaagggacttactgtgacgagttcagtatgtgatttacaatgttctgaccaacgtataagattaatggaaattctttcctccatcttccacggaaagctcaatattttagtgaacaatgctgcgacaactataacaaagaaaataatagattacactgcagaagatatatcaaccataatgggtactaattttgagtccgtttatcatttgactcaacttgcacacccgcttctaaaagaatctggacaaggaagcatagtatctatttcgtccattgcaggtttaaaagcccttcccgttttctctgtttatgcagcttccaaaggagccatgaatcaattcaccaaaaacttagcattggaatgggcaaaggataatattcgtgcaaatgctgtggcacctggacctgttatgacaaaacttttggactctatcatgaattcttctggaggggatgagtctgtggatggaatagtgtctcaaacacttgttggtcgcatgggagaagctaaagagatatcagcattagttgcctttctttgccttccagctgcatcatacatcactggacaggttatatgtgctgatgggggtttcacaacttag

SEQ ID NO: 59731 - protein, 264 aa, Glycine max
MAETKLSFKDKRWSLHGMTALVTGATRGIGHAIVEELAEFGAAVHICARNQDDIDKCLEEWKSKGLTVTSSVCDLQCSDQRIRLMEILSSIFHGKLNILVNNAATTITKKIIDYTAEDISTIMGTNFESVYHLTQLAHPLLKESGQGSIVSISSIAGLKALPVFSVYAASKGAMNQFTKNLALEWAKDNIRANAVAPGPVMTKLLDSIMNSSGGDESVDGIVSQTLVGRMGEAKEISALVAFLCLPAASYITGQVICADGGFTT

SEQ ID NO: 59732 - DNA, 852 bp, Glycine max
  CDS (1)..(852)
atgactatatttttggagcacttacctttccaagcatgcaggttagaaggcaaggtggcactaataaccggtggagccagtggcatcggcgaagccaccgcaaggcttttcctttgccacggtgccaaggtcatcatcgctgacatccaagacaacctcggacactccctctgccaaaacctcaactcctccgacaacaacatttcctacgttcactgcgacgtcaccaacgataacgacgtccaaaacgccgtcaacgccgccgtctcgcgtcacggcaagctcgacatcctgttcagtaacgccggcactgttggccgtgtgagcccttccatcacggcgtttgacaacgctgacttgaagagggttttcgaggtgaatgtcttcggtgctttctacgccgccaaacacgcggctaaggtaatgattcctgaaaagagagggagcattgtgctcacctcaagtgttgcttcggtgactcacgcggtttcgccgcatgcatacactgcgtcgaagcacgcggtggtgggtctgatgaagaacctgtgcgtggaactggggaatcatggaatcagagttaactgtgtttcaccgtacgcggtggccactcctctgatgacacgtggaaccaggatgaagaaggagatggtagagaaagtgtattctgaggcggggaacctgaagggagtggttttgaaggaagaggatttggcagaagcagctctgtttctggctagtgatgagtcaaagtacgtgagtggggttaacctagttgtggatggaggttacagtgtcaccaatgtttctgttaaagaagctgtgagaaagttttctggtaagcccaagttgtaa

SEQ ID NO: 59733 - protein, 283 aa, Glycine max
MTIFLEHLPFQACRLEGKVALITGGASGIGEATARLFLCHGAKVIIADIQDNLGHSLCQNLNSSDNNISYVHCDVTNDNDVQNAVNAAVSRHGKLDILFSNAGTVGRVSPSITAFDNADLKRVFEVNVFGAFYAAKHAAKVMIPEKRGSIVLTSSVASVTHAVSPHAYTASKHAVVGLMKNLCVELGNHGIRVNCVSPYAVATPLMTRGTRMKKEMVEKVYSEAGNLKGVVLKEEDLAEAALFLASDESKYVSGVNLVVDGGYSVTNVSVKEAVRKFSGKPKL

SEQ ID NO: 59734 - DNA, 810 bp, Glycine max
  CDS (1)..(810)
atggcaagtgtctcactggtctcagctactggaagaaggcttgaggggaaagtggctattatcactggtggtgcaagcggcataggtgaggccactgcaagactcttctctaagcacggagcacacgttgtcatagctgatattcaagacgatttgggtctctctatttgcaaacacttggaatccgcttcctatgttcactgcgacgtgacaaacgaaaccgacgttgaaaactgcgtgaacaccaccgtttccaaacacggcaaactagatatcatgttcaacaacgctggcataaccggtgtgaacaaaaccagcatcctcgacaacacaaagtcagagtttgaggaagtgatcaacgttaacctagttggtgtctttctgggaacaaagcacgccgcaagggtaatgatccctgctagaagaggaagcatagttaacactgcaagtgtttgtggaagcataggtggtgtagcatcacatgcatacacaagttccaaacacgccgtggtggggctcacaaagaacactgcggtggagcttggagcatttggtgttagggttaactgcgtgtcaccctacgtggttgccacgcccttggctaagaatttttttaagcttgatgatgacggagttcaggggatttattcaaaccttaagggtactgatcttgtgcctaatgatgtagccgaagctgctttgtacctggcaagtgatgagtccaagtatgttagtgggcacaatcttgtggttgatggaggcttcactgtggtcaatagtgggttttgtgtccttgggcaatcttcgtga

SEQ ID NO: 59735 - protein, 269 aa, Glycine max
MASVSLVSATGRRLEGKVAIITGGASGIGEATARLFSKHGAHVVIADIQDDLGLSICKHLESASYVHCDVTNETDVENCVNTTVSKHGKLDIMFNNAGITGVNKTSILDNTKSEFEEVINVNLVGVFLGTKHAARVMIPARRGSIVNTASVCGSIGGVASHAYTSSKHAVVGLTKNTAVELGAFGVRVNCVSPYVVATPLAKNFFKLDDDGVQGIYSNLKGTDLVPNDVAEAALYLASDESKYVSGHNLVVDGGFTVVNSGFCVLGQSS

SEQ ID NO: 59736 - DNA, 810 bp, Glycine max
  CDS (1)..(810)
atggcaagtatttctactgtctcggttcttgatagaaggcttgaagggaaagtggctcttatcagtggtggtgctagcggtataggtgaggccactgcaagactcttctctaagcatggagcacacgttgtgatagctgatattcaagacgatttgggtctctctctttgcaaacacttggaatccgcttcctatgtccattgcgatgtcacaaacgaaaacgacgttcaaaacgccgttaacacagcgatttccaagtatggcaatctagatatcatgtttaataatgctggcataattgatgagataaaaacaagcatacttgacaacagcaagtttgattttgagagagtgataagtgtgaacttggttggtccttttctgggaacaaagcacgctgctagggttatgattcctgctaaaaggggaagcataattaacactgctagtgttgctggaacctttagtggaggggcttcacatgcctacacaagttcaaagcacgcactaattggactgatgaaaaacactgcggtggagcttggacagtttggtattagggtaaattgcttgtccccttatgtggttgccacaccattgactaagaaatgtttcaatcttgatgaagaccgaaatggtgagatttattccaacctaaaaggtgttcatcttgtgccaaacgatgtggccgaagctgctctatatttggcaggtgatgagtcaaagtatgttagtggtcacaatcttgtgttagatggagggttcaccaatctaaatgtaggattttctgtgtttgggcagtctgagtaa

SEQ ID NO: 59737 - protein, 269 aa, Glycine max
MASISTVSVLDRRLEGKVALISGGASGIGEATARLFSKHGAHVVIADIQDDLGLSLCKHLESASYVHCDVTNENDVQNAVNTAISKYGNLDIMFNNAGIIDEIKTSILDNSKFDFERVISVNLVGPFLGTKHAARVMIPAKRGSIINTASVAGTFSGGASHAYTSSKHALIGLMKNTAVELGQFGIRVNCLSPYVVATPLTKKCFNLDEDRNGEIYSNLKGVHLVPNDVAEAALYLAGDESKYVSGHNLVLDGGFTNLNVGFSVFGQSE

SEQ ID NO: 59738 - DNA, 885 bp, Glycine max
  CDS (1)..(885)
atggcaagcaataaggagtctaagttcccagcacagagccagaaaactcagccaggaaaagaacatgtaatgaatccactcccacaagccacaaatcctgatcacaaggccgccaataaactccagggaaaggtggcgttggtgacaggaggtgactcaggaattggcagagcggtttgcctgtgtttcgcaaaagagggtgcaaccgtggcctttacatacgtaaagggccatgaggacagggataaagatgatactctgaagatgctgcttgaagctaagacaagtggtgcagacaatccattggcaatagcagcggatattggctttgatgagaactgcaaacaggtcattgaccttgttgtcaaagaatatggccgccttgatgttctggtcaacaatgcagctgagcagcatttgacaaactctgttgaggaaatcacacaacagcagcttgagagagtcttcggaaccaacatcttttctcagttctttttggtcaagcatgctctgaagcacatgaaagaagggagctgcatcataaactctacttcagttaatgcatacaatgggaatccagaagcgttggactacactgctaccaagggagcaattgtggccttcaccagaggtctttctcagcagctagcgagtaggggaattagggtgaatggtgtggcacctggcccagtttggacgccaatacaaccagcttcaaagcctgctgagatgattcagaacttggggtgtgaggtgccaatgaaccgcgtggctcagccttgtgagattgcaccatgttatttgttcttggcaacttgtcaggactcttcctactttactggccaagtcctccatccaaatggtgggatggtcgtcaacgcttaa

SEQ ID NO: 59739 - protein, 294 aa, Glycine max
MASNKESKFPAQSQKTQPGKEHVMNPLPQATNPDHKAANKLQGKVALVTGGDSGIGRAVCLCFAKEGATVAFTYVKGHEDRDKDDTLKMLLEAKTSGADNPLAIAADIGFDENCKQVIDLVVKEYGRLDVLVNNAAEQHLTNSVEEITQQQLERVFGTNIFSQFFLVKHALKHMKEGSCIINSTSVNAYNGNPEALDYTATKGAIVAFTRGLSQQLASRGIRVNGVAPGPVWTPIQPASKPAEMIQNLGCEVPMNRVAQPCEIAPCYLFLATCQDSSYFTGQVLHPNGGMVVNA

SEQ ID NO: 59740 - DNA, 915 bp, Triticum aestivum
  CDS (1)..(915)
atggcatcaaccatgccgttctccgctggcctcgtttctcttgggtctccgccgccgcagcgccacagctgcaggttccagcgatatcatcgaccgggcactctcatttcatcagctataaggcatggtcaggttaaagctatggctggagtgagcatggatggcttggcacagcctcaagccccagttgcagtggttaccggagcatcgagggggattgggcgagcgatagctgtggctcttggcaaagcagggtgcaaggtagttgtgaactatgccaagtcaggcatggaagctgaagaagtgtgcagagagatcatggagtccggtggcactgccatctccttttcagccgatgtctccattgaagccgaggttgaaaccatgatgagagcggtaattgatacttggggaacgctggacgtgatggtgaacaatgcagggatcacgcgagatgctctgctaatgcggatgaagaaggcgcagtggcaggaagtagtggacgtaaaccttaccggtgtttacctctgcgcccaggctgcggcggcagtgatgatgaagaggaagaagggaagaatcatcaacatcgcctcagttgccgggatgatcggcaacattggccaggccaactactgcgccgccaaggccggggtgattggattgaccaaggccatggcccgggaatacggtggcagaaacataaatgtgaatgcagtttccccgggctgggtcgcgtctgacatgaccgcaaaactaggcgacgacatcgaacgaaaggcgctcgagacaataccactaggacgattcggcaagccagaggagattgctggactggtggagttcttggctgttcatccggctgcaagctacatgaccgggcaggtgctcccagttgatggtggcctgtccatttga

SEQ ID NO: 59741 - protein, 304 aa, Triticum aestivum
MASTMPFSAGLVSLGSPPPQRHSCRFQRYHRPGTLISSAIRHGQVKAMAGVSMDGLAQPQAPVAVVTGASRGIGRAIAVALGKAGCKVVVNYAKSGMEAEEVCREIMESGGTAISFSADVSIEAEVETMMRAVIDTWGTLDVMVNNAGITRDALLMRMKKAQWQEVVDVNLTGVYLCAQAAAAVMMKRKKGRIINIASVAGMIGNIGQANYCAAKAGVIGLTKAMAREYGGRNINVNAVSPGWVASDMTAKLGDDIERKALETIPLGRFGKPEEIAGLVEFLAVHPAASYMTGQVLPVDGGLSI

SEQ ID NO: 59742 - DNA, 762 bp, Zea mays
  CDS (1)..(762)
atggatgtcaaatgccggcgtctggaggggaaggtggccgtcgtgacggcgtccacgcaggggatcggcctcgccatcgccgagcgcctcggcctggagggcgccgccgtcgtcgtctcctcccgcaagcagaagaacgtggacgaggccgtggaggggctcaaggccaaggggatcaccgtggtgggcgccgtctgccacgtatccgacgcacagcaacgcaagaacctcgtcgagacggccgtcaagaactttgggcacattgatattcttgtctccaacgctgctgcaaatcctactgtgaatgtcatacttgaaatgaaagaggttgttctcgataagttgtgggatattaacgtcaaggcttctattcttcttattcaggatgctgctccccacctacgagcaaggtcatctgtgatccttatttcttcaattgctggttacaatcctgagcacggattgacaatgtatggtgttacaaagaccgctctctttggtctcacaaaggctcttgctggtgagatgggacccgatattcgtgttaactgtatagcccctggttttgttccgacacggtttgctagtttcttcgtagacaacgagaccattaggaaaaagcttaacgagaggactatgcttaagagattgggttccgtggaagatatggcggcagctgccgcattcctggcatctgacgatgcatcattcatcacagctgaaaccattgttgttgctggaggggtgccgtcgagattgtaa

SEQ ID NO: 59743 - protein, 253 aa, Zea mays
MDVKCRRLEGKVAVVTASTQGIGLAIAERLGLEGAAVVVSSRKQKNVDEAVEGLKAKGITVVGAVCHVSDAQQRKNLVETAVKNFGHIDILVSNAAANPTVNVILEMKEVVLDKLWDINVKASILLIQDAAPHLRARSSVILISSIAGYNPEHGLTMYGVTKTALFGLTKALAGEMGPDIRVNCIAPGFVPTRFASFFVDNETIRKKLNERTMLKRLGSVEDMAAAAAFLASDDASFITAETIVVAGGVPSRL

SEQ ID NO: 59744 - DNA, 957 bp, Zea mays
  CDS (1)..(957)
atggccaccgccgccgccaccgcagcagcagcagcagtctcctccccggctgcgcgtggagcagccggggccgccgccgcctcccgccgggggttcgtcacgtttggtggaggcgccgcccgcttctctcccacgctgcggtccggccgtgggttctctggtgtgcaaacccatgttgctgctgttgaacaagcagttgtaaaagatgctaccaagctggaagctccagttgttgttgttacaggtgcatctagagggattggtaaggcaactgctctagcccttggaaaagcaggatgcaaggttctggtaaactatgcccggtcctcgaaagaggctgaagaggtctccaaagagattgaagcatctggtggtgaggctatcaccttcggaggagatgtttcaaaagaagctgatgtagagtctatgatgaaagcagctctagataaatggggaacaatagatgtgctggtaaataatgcagggattacacgagacacattgttgatgaggatgaagaaatctcagtggcaagacgtaattgatctgaatcttactggcgtcttcctttgtacacaggctgcaacaaaagtaatgatgaaaaagagaaagggaaaaattatcaacattgcatctgtagttggtcttactggcaatgttggccaagctaattatagcgcagccaaggctggagtgattggtttcacaaaaacagttgccagggagtatgcaagcagaaatatcaatgtgaatgctattgcaccagggttcattgcatctgatatgactgccgaacttggagaagagcttgagaagaaaatcttgtcaaccattccgttagggagatatggccaaccagaggaagttgcagggttggtcgagttcctggcccttaaccccgcagctagctatatgactggacaggtgcttacaattgacggagggatggtaatgtaa

SEQ ID NO: 59745 - protein, 318 aa, Zea mays
MATAAATAAAAAVSSPAARGAAGAAAASRRGFVTFGGGAARFSPTLRSGRGFSGVQTHVAAVEQAVVKDATKLEAPVVVVTGASRGIGKATALALGKAGCKVLVNYARSSKEAEEVSKEIEASGGEAITFGGDVSKEADVESMMKAALDKWGTIDVLVNNAGITRDTLLMRMKKSQWQDVIDLNLTGVFLCTQAATKVMMKKRKGKIINIASVVGLTGNVGQANYSAAKAGVIGFTKTVAREYASRNINVNAIAPGFIASDMTAELGEELEKKILSTIPLGRYGQPEEVAGLVEFLALNPAASYMTGQVLTIDGGMVM

SEQ ID NO: 59746 - DNA, 804 bp, Glycine max
  CDS (1)..(804)
atggctgaggcaagcattggcagcaaaagcagcagatggtctttacagggaatgacagctctcgtcaccggtggatccaaaggaatcggatatgctatcgtggaggagttggcacagcttggagccactgtgcacacttgcgctcggaacgaagctgaactcaatgaatccttaaatgaatggaacacaaaaggatacagagtaactggttccgtctgtgacgtggcgtctcgtgcagaaagacaagacctcattgctagactctccaatgagtttaatggcaaactcaatatccttgtaaacaacgtgggaacaaacgtaccgaaacatacccttgatgttacggaggaagacttctcatttctgataaatacgaatcttgaatctgcttaccacctaagccagcttgcacatcctctcctgaaagcttcagaggctgcaaacatcatttttatatcctccattgctggtgtgctatcaataggagtaggatccacttatggtgcaacaaaaggagcaatgaaccaactgactaaaaatttggcatgtgagtgggccaaagacaatataaggactaattgcgttgcaccagggccaatcaaaacccctctcggtgacaagcattttaaaaatgaaaaacttcttaatgctttcatttcgcaaaccccccttggacggattggagaagcagaggaagtgtcttcattggtggcattcctctgcttacctgcagcctcttacataacaggacagaccatttgtgttgatggtggattaacagtgaatggtctctatataaattag

SEQ ID NO: 59747 - protein, 267 aa, Glycine max
MAEASIGSKSSRWSLQGMTALVTGGSKGIGYAIVEELAQLGATVHTCARNEAELNESLNEWNTKGYRVTGSVCDVASRAERQDLIARLSNEFNGKLNILVNNVGTNVPKHTLDVTEEDFSFLINTNLESAYHLSQLAHPLLKASEAANIIFISSIAGVLSIGVGSTYGATKGAMNQLTKNLACEWAKDNIRTNCVAPGPIKTPLGDKHFKNEKLLNAFISQTPLGRIGEAEEVSSLVAFLCLPAASYITGQTICVDGGLTVNGLYIN

SEQ ID NO: 59748 - DNA, 951 bp, Zea mays
  CDS (1)..(951)
atggccaccgccgccgccaccgcagcagcagtagtctcctccccggctgccccacgcgccggggccgccgccgcctcccgccgggggttcgtcacgtttggtggaggcgccgcccgcttctctcccacgctgcggtccggccgtgggttctctggtgtgcaaacccatgttgccgctgttgaacaagcaattgtaaaagatgctaccaagctggaagctccagttgttgttgttacaggtgcatctagagggattggtaaggcaactgctctagcccttggaaaagcaggatgcaaggttctggtaaactatgcccggtcctcgaaagaggctgaagaggtctccaaagagattgaagcatctggtggtgaggctatcaccttcggaggagatgtttcaaaagaagctgatgtagagtctatgatgaaagcagctctagataaatggggaacaatagatgtgctggtaaataatgcagggattacacgagacacattgttgatgaggatgaagaaatctcagtggcaagacgtaattgatctgaatcttactggtgtcttcctttgtacacaggctgcaacaaaagtaatgatgaaaaagagaaagggaaaaattatcaacattgcatctgtagttggtcttactggcaatgttggccaagctaattatagcgcagccaaggctggagtgattggtttcacaaaaacagttgccagggagtatgcaagcagaaatatcaatgtgaatgctattgcaccagggttcattgcatctgatatgactgccgaacttggagaagagcttgagaagaaaatcttgtcaaccattccgttagggagatatggccaaccagaggaagttgcagggttggtcgagttcctggcccttaaccccgcagctagctatatgactggacaggtgcttacaattgacggagggatggtaatgtaa

SEQ ID NO: 59749 - protein, 316 aa, Zea mays
MATAAATAAAVVSSPAAPRAGAAAASRRGFVTFGGGAARFSPTLRSGRGFSGVQTHVAAVEQAIVKDATKLEAPVVVVTGASRGIGKATALALGKAGCKVLVNYARSSKEAEEVSKEIEASGGEAITFGGDVSKEADVESMMKAALDKWGTIDVLVNNAGITRDTLLMRMKKSQWQDVIDLNLTGVFLCTQAATKVMMKKRKGKIINIASVVGLTGNVGQANYSAAKAGVIGFTKTVAREYASRNINVNAIAPGFIASDMTAELGEELEKKILSTIPLGRYGQPEEVAGLVEFLALNPAASYMTGQVLTIDGGMVM

SEQ ID NO: 59750 - DNA, 969 bp, Linum usitatissimum
  CDS (1)..(969)
atggctgctagtaccggatccaccgccgtcgtattcaaatccgccggcttcgccacctcctccggcgaaaggagcattaaccagttccgccactggtctccggttcccgccagcctccactcctcccgcgctggcctccgctgtagatcgagaagctcggtatcctcttccggtgtgagagctcaggttgctgcagttgaaccagtcagcagtgagtcagttaagaaggtggaatctccagtagttattgtaactggagcttccagaggaatcgggaaagcgattgcattgtcgttggggaaagcaggttgcaaggttctggttaactatgcaaggtcatctaaggaggctgaggaagtctccaaagagattgaagcttccggtggtcaagctgtaacctttggtggtgatgtctctaaagaagaggatgtggaggccatgatgaaaactgctattgatgcttttggaacagttgacatactgataaacaatgcagggatcacaagggacactttgttgatgcggatgaagaaacagcagtggcaggatgttattgacctcaatcttactggtgtcttcctttgtacacaggctgcagccaagatcatgatgaagaaaagaaagggaaggattatcaatatcgcttcagttgttggtttggttggtaacgttgggcaagctaactacagtgctgcaaaggcaggagtcattggattcacaaagagtgtcgcaaaggaatattcaagcagaaatatcaacgtcaatgctgttgctcctggattcattgcatctgacatgactgccaagcttggggatgacattgaaaagaaaatcttggagacgattcctttagggcggtacggtcagccggaagaggtggccggattggtggaattcctcgctctgaacccagctgctggctacatgaccgggcaggtgcttaccatcgacggaggaatggtgatgtaa

SEQ ID NO: 59751 - protein, 322 aa, Linum usitatissimum
MAASTGSTAVVFKSAGFATSSGERSINQFRHWSPVPASLHSSRAGLRCRSRSSVSSSGVRAQVAAVEPVSSESVKKVESPVVIVTGASRGIGKAIALSLGKAGCKVLVNYARSSKEAEEVSKEIEASGGQAVTFGGDVSKEEDVEAMMKTAIDAFGTVDILINNAGITRDTLLMRMKKQQWQDVIDLNLTGVFLCTQAAAKIMMKKRKGRIINIASVVGLVGNVGQANYSAAKAGVIGFTKSVAKEYSSRNINVNAVAPGFIASDMTAKLGDDIEKKILETIPLGRYGQPEEVAGLVEFLALNPAAGYMTGQVLTIDGGMVM

SEQ ID NO: 59752 - DNA, 834 bp, Linum usitatissimum
  CDS (1)..(834)
atgagtgccactaacgccgctagttccgtcattagaaggctggaaggcaaagtggcgctgatcaccggcggagctagcgggataggagaagccacggccaagctgttcgtccaacacggcgccaaggtcgtcatcgccgatgtcaaagaccaactcggcgggtcactcactgagaagctggggggcccacacgcggccacctacgtccactgcgacgtcacacatcctgcccacgtcagcgatgcggttgacgcggcagtgtccacgtatggccagctggacatcatgcacaacaatgccggcatcgccggcaactttgatcctcgcatcctcaactccgacgacgataattttaagcgagtcatcgacattaacctcttcggcgccttcctaggtgccaagcatgccgccagggtgatggtaccggcggggagaggcggctgcatcctgttcacagccagtgcagtctcggtgactagcggcaacatttcgtacgcatacaaggtgtcgaagaacggggtagtggggctggccaacaatctgtgcgcggagctgggacagcatgggattcgagtcaacgcgatatcgcctttcgcgctggcgacgccgttactgagggcggcgctgggcgggatgggaaaggaggagggtgacgcgttcgtcgagaagatagggaacttgaaagggactgttctgaaagagggggatattgcagcggcggcattgtacctggctagcgacgatgctaagtacgtgagcgggatgaatttggtcgtggatggaggtcacaggcagaacaaccccatatttcctgcttcgacgttcactaagtag

SEQ ID NO: 59753 - protein, 277 aa, Linum usitatissimum
MSATNAASSVIRRLEGKVALITGGASGIGEATAKLFVQHGAKVVIADVKDQLGGSLTEKLGGPHAATYVHCDVTHPAHVSDAVDAAVSTYGQLDIMHNNAGIAGNFDPRILNSDDDNFKRVIDINLFGAFLGAKHAARVMVPAGRGGCILFTASAVSVTSGNISYAYKVSKNGVVGLANNLCAELGQHGIRVNAISPFALATPLLRAALGGMGKEEGDAFVEKIGNLKGTVLKEGDIAAAALYLASDDAKYVSGMNLVVDGGHRQNNPIFPASTFTK

SEQ ID NO: 59754 - DNA, 870 bp, Linum usitatissimum
  CDS (1)..(870)
atggctagcgaggtgtcagcccagctggagccacggtgcaacttaccagacaaagtagtccttgtaaccggtgcttcttcaggtataggccgagagttctgccttgacctagccaaagctgggtgcaagattgtggcggctgctaggcgtattgaccgcctacaatctttgtgcaaagagatcaatatgattcagtttccgaccagtgcttcttcatctgccggagagctaagtggcacacgtgctgtggccgtggagctggatgtgtccgcagacggggttgcaattgataaggctgtgcagagctcttgggaagcatttggaaggatagatgtgttgatcaacaatgctggcattagtggtaactcgaagaactcgttagatttgtctgaagaggaatggaatcatttgatcaagacaaatttgaaaggaacttggttggtttccaagtcagttgggatacggatgcgtgatgcaaagcttggaggttccataatcaatatctcatcgatctttggtcttaatcgtggctatgcacccggagttgtcggttatgcttcttcgaagaccggtgtaaattccatgacgaaggtgatggctttggagttgggggtttacaagatcagagttaactctatatcacctggactgttcaaatccgagatcacagaaagtctcatgaataaaccctggatgactaccgttgctgagaagacggtcccactacgaacatttggaactgtagatccagcattgacatcactcgttcgatacctcatccatgattcaacccagtatgtgacgggcaatattttcattgtagatgccggaacaaccttatcaggtgtccctattttctcatcactctga

SEQ ID NO: 59755 - protein, 289 aa, Linum usitatissimum
MASEVSAQLEPRCNLPDKVVLVTGASSGIGREFCLDLAKAGCKIVAAARRIDRLQSLCKEINMIQFPTSASSSAGELSGTRAVAVELDVSADGVAIDKAVQSSWEAFGRIDVLINNAGISGNSKNSLDLSEEEWNHLIKTNLKGTWLVSKSVGIRMRDAKLGGSIINISSIFGLNRGYAPGVVGYASSKTGVNSMTKVMALELGVYKIRVNSISPGLFKSEITESLMNKPWMTTVAEKTVPLRTFGTVDPALTSLVRYLIHDSTQYVTGNIFIVDAGTTLSGVPIFSSL

SEQ ID NO: 59756 - DNA, 843 bp, Linum usitatissimum
  CDS (1)..(843)
atggctagcgaggtgtcagcccagctggagccatggtataacttggaagacaaagtggtctttgtaactggtgcttcttcaggtttgggcagagatttctgcctcgacctggcgaaagctgggtgcaagattgtggctgctgctaggcgtattgaccgcctacaatctttgtgcgatgaaatcaatctgactgctggagagccaagtggtttacgtgctgccgctgtggagctggatgtgtcggcagacggtgcttcgatcgacaaggctgtacagaccgcttgggaagcctttggaaagatagatgcgttgatcaacaatgctggagttagaggtagtgtgaagaccccattggatttttctgaagaagagtggaatcacacgatcaagacgaatctgacaggagtttggttggtttccaagtcagttgggattcggatgcgtgatgcgaagctgggaggttccataatcaatatttcatcgatagctggtctgaatcgtggtctattacctggagctgttggctatgcttcttcgaagactggagtaaacgccatgacaaaggtgatggcactggagttgggggttcacaagatcagagttaactctatatcacctggacttttcaaatctgagatcacgcaaggtcttatgcagaaagactggctcagtaacgttgctgagaagacggttcctctactaacatatggaactgcagacccagcattgacatcaatcgcccgatacctcatccacgattcatcccagtatgtgacgggtaatatcttcattgtggacgctggagccaccttacctggtgtccctattttctcatcgctctga

SEQ ID NO: 59757 - protein, 280 aa, Linum usitatissimum
MASEVSAQLEPWYNLEDKVVFVTGASSGLGRDFCLDLAKAGCKIVAAARRIDRLQSLCDEINLTAGEPSGLRAAAVELDVSADGASIDKAVQTAWEAFGKIDALINNAGVRGSVKTPLDFSEEEWNHTIKTNLTGVWLVSKSVGIRMRDAKLGGSIINISSIAGLNRGLLPGAVGYASSKTGVNAMTKVMALELGVHKIRVNSISPGLFKSEITQGLMQKDWLSNVAEKTVPLLTYGTADPALTSIARYLIHDSSQYVTGNIFIVDAGATLPGVPIFSSL

SEQ ID NO: 59758 - DNA, 819 bp, Hordeum vulgare
  CDS (1)..(819)
atggctgcggcggagacgtcgggatcgagccagccgggcgctccaggacggtggtctcttcacggcaaaacggctctcgtcaccggaggcacccgcgggatcgggcgtgcggtggtggaggagcttgccgcgctgggggcggccgtgcacacctgctcccggaaggaggcggagcttggcgagcgcctcaaggagtgggaggccaggggcttccgcgtcacaacctccgtctgcgacctctccgtccgggagcagcgggagcgcctgattggcgaggtcgccgaacgcttcggaggcaagctcaacatcctcgtaaataatgtggggacaaacataaggaaaccaactactgaattttctgctgaagattactcttttttgatggccactaaccttgaatctgcatatcatctgtgccaacttgcacatcctcttctaaaagcatctggtttgggcagcattgtttttgtatcatctgtctgtggattagtagccgtatttagcggctctatatatgctatgaccaaaggtgccatcaaccaattaaccaagaacctagcatgtgaatgggcgaaagatggcataagaacaaactctgttgctccatggtacataacaacgtcacttacagaaggacttttggctaacaaggaatttgaggcctccgttgtgagtcgaacaccacttgggcgtgtcggagaaccaggagaagtatcatcgctggttgcttttctttgcatgcctggtgccacttacataacaggccagacgatctcagtggatggaggtatgactgtcaatgggatgtatccagcataa

SEQ ID NO: 59759 - protein, 272 aa, Hordeum vulgare
MAAAETSGSSQPGAPGRWSLHGKTALVTGGTRGIGRAVVEELAALGAAVHTCSRKEAELGERLKEWEARGFRVTTSVCDLSVREQRERLIGEVAERFGGKLNILVNNVGTNIRKPTTEFSAEDYSFLMATNLESAYHLCQLAHPLLKASGLGSIVFVSSVCGLVAVFSGSIYAMTKGAINQLTKNLACEWAKDGIRTNSVAPWYITTSLTEGLLANKEFEASVVSRTPLGRVGEPGEVSSLVAFLCMPGATYITGQTISVDGGMTVNGMYPA

SEQ ID NO: 59760 - DNA, 789 bp, Hordeum vulgare; identical to SEQ ID NO: 40605
  CDS (1)..(789)

SEQ ID NO: 59761 - protein, 262 aa, Hordeum vulgare; identical to SEQ ID NO: 40606

SEQ ID NO: 59762 - DNA, 762 bp, Zea mays
  CDS (1)..(762)
atggatgtcaagtgccggcgtctggaggggaaggtggccatcgtgacggcgtccacgatggggatcggcctcgccatcgccgagcgcctcggtctggagggcgccgccgtggtcatctcctcccgcaagcagaagaacgttaacgaggcggtggaggggctcagggccaagggtatcaccgcggttggtgccctctgccacgtctccgacgcacagcagcgcaagagcctcatcgagacggccgtcaagagctttgggcacatagatatccttgtctccaatgctgccgcaaatccttctgtagatagcatacttgaaatgaaagagtctgttctcgataagctgtgggatattaacgtcaaggcttctatccttcttattcaggatgctgctcctcacctacggaaggggtcatctgtgattattatttcttcaattgctggttacaatccagaacaaggattgacaatgtatggtgtcacaaagactgctctctttggtctcacgaaggctcttgctggtgagatgggacccgatactcgtgttaactgtgtagcccctggttttgttcctacacggtttgctagtttcctcacagaaaatgagaccattaggaaagagcttaacgagaggaccaagcttaagagattgggtactgtggaagacatggctgcggctgcggcttttctggcgtctgacgacgcatcatacattacggctgaaaccattgttgttgctggaggggtgcagtctaggctgtaa

SEQ ID NO: 59763 - protein, 253 aa, Zea mays
MDVKCRRLEGKVAIVTASTMGIGLAIAERLGLEGAAVVISSRKQKNVNEAVEGLRAKGITAVGALCHVSDAQQRKSLIETAVKSFGHIDILVSNAAANPSVDSILEMKESVLDKLWDINVKASILLIQDAAPHLRKGSSVIIISSIAGYNPEQGLTMYGVTKTALFGLTKALAGEMGPDTRVNCVAPGFVPTRFASFLTENETIRKELNERTKLKRLGTVEDMAAAAAFLASDDASYITAETIVVAGGVQSRL

SEQ ID NO: 59764 - DNA, 858 bp, Brassica napus
  CDS (1)..(858)
atgggaagcagcgaggagatgccagtggtgctcatcacaggatgctcacacggaggaatcggcaacgcgctggctcgtgagttctcgtcgaagggttgtcgtgttgtggcgacgagtcgatcgcagaacacgatggccgatttgacgaaagatcccaagtttttagtacaagagctcgatgttcagtcagaacataacgtgaataaagtcttttcggaagttatcgacaagttcggtcagatcgatgttctggtcaataacgccggagttcaatgcatcggtccactcgctgagattccaattcagaccatggagcacacctttaacaccaatgtgttcggttccatgaggatgactcaagctgttgtacctcacatggcgtcaaagaagaaaggaaagattgtgaacataggaagtatcagcacaatggcaccaggaccatgggcaggggtttacactgcatcaaaagctgctcttcatgctcttacagacacattaaggttggagcttaggccatttgggattgatgtgatcaacattgtcccaggaggtattcaatcaaacatatccgactcagggatatcgagcttcaacaagttacctgagctgaaactatataagcctttccaagaagctatccgtgaaagggcgtttttgtcgcaaaacataaaaccaacacctgcagagacatttgcgaaagagacggtatcagtggtcctgaagaaaaacccaccggcttggtactctacaggaaggttgtccaccgtcacggcgatcatgcaccatatgcccattttcgtcaaagattttctcctgacgaagagcttcatgaaaaaagggccaaaagaaactgtttga

SEQ ID NO: 59765 - protein, 285 aa, Brassica napus
MGSSEEMPVVLITGCSHGGIGNALAREFSSKGCRVVATSRSQNTMADLTKDPKFLVQELDVQSEHNVNKVFSEVIDKFGQIDVLVNNAGVQCIGPLAEIPIQTMEHTFNTNVFGSMRMTQAVVPHMASKKKGKIVNIGSISTMAPGPWAGVYTASKAALHALTDTLRLELRPFGIDVINIVPGGIQSNISDSGISSFNKLPELKLYKPFQEAIRERAFLSQNIKPTPAETFAKETVSVVLKKNPPAWYSTGRLSTVTAIMHHMPIFVKDFLLTKSFMKKGPKETV

SEQ ID NO: 59766 - DNA, 792 bp, Brassica napus
  CDS (1)..(792)
atggagaataatgacaagagatggtccctcgccggaaaaaccgctctggtaaccggtggtactcgcggaatcgggcgagcggtcgtggaggagctagcgagattcggggcaacggttcatacatgttcaaggagccaggaggagctcaaatcatgcttggatgattggaagtccaatggtttagtggtaaccggttcggtttgcgatgcttcggatagggatcagagggagaagttgattcaggaggtttcgtctgcctttagcggcaagattaacatccttgtaaacaatgttggaactaatttaaggaagccaacggtcgagtattcgagtgaggattatgctaaaatcatgtcgaccaatttggaatccgctttccatttttcccaaattgcacatcctcttttaaaagcatctggggttgggagcattgtgttcatctcctctgtagctggcctggtgcatcttagtagtggatctgtctatggtgcaactaaaggagcacttaatcagcttacaaggaatctagcttgcgagtgggcaggagacaacattagaaccaattgtgtggcgccatggtacatcaagacctcacttgtgaaaccgctactcgagaagaaaggttttgaggaggcgatagtttcgcgtaccccacttgggcgcgttggagaaccagaggaagtctcgtcgctagtggctttcctctgccttcccgcagcgtcttacatcaccggtcaggtcatttctgttgatggaggattcacagtcaacggcttcagttacaccatgtaa

SEQ ID NO: 59767 - protein, 263 aa, Brassica napus
MENNDKRWSLAGKTALVTGGTRGIGRAVVEELARFGATVHTCSRSQEELKSCLDDWKSNGLVVTGSVCDASDRDQREKLIQEVSSAFSGKINILVNNVGTNLRKPTVEYSSEDYAKIMSTNLESAFHFSQIAHPLLKASGVGSIVFISSVAGLVHLSSGSVYGATKGALNQLTRNLACEWAGDNIRTNCVAPWYIKTSLVKPLLEKKGFEEAIVSRTPLGRVGEPEEVSSLVAFLCLPAASYITGQVISVDGGFTVNGFSYTM

SEQ ID NO: 59768 - DNA, 849 bp, Brassica napus
  CDS (1)..(849)
atgtcaactgaaaacattcaacattcttccctccctactcaaaggcttttgggcaaagtggcattgataaccggaggagccacagggataggcgaaagcatcgctcgtctcttccacaagcacggtgccaaagtctgcatcgtcgacgtccaagacgatctcggagacaaagttctcaaaactctgttagccaactcggaggagtcagcttgtttcatccacggtgacgtcacacaagaagacgacatcagtaacgctgttgacttcgccgtcaagcgtttcgggacacttgacatactcatcaacaacgcaggagtaagcgaagcaccgtgtccggacatccgcaacaacagtttaaccgagttcgagatggtcttcaacgtcaacgtgaaaggagctttcctagggatgaaacatgcggcgcgtgtgatgatccccgccaagaaaggctcgatagtctctttatgcagcgttggcggcgttgtcggaggcgttggtccgcacgcttacgtcggctccaagcacgcggttctaggtttgactaggagcgttgcggcagagctaggacagcacgggatacgcgtgaactgcgtttcgccttacgcggttttgactaacctcgcgttggctcatttgcctgaggatgagaggaaggaaggcgtggtcgctggtttcaggagtttcgccgctgcgaacgcgaatctgaaaggtgttgagttgacggttgatgacgtggcgaacgcggttttgtttctggcgagtgatgagtcgcggtatgtgagtggagataatctgatggttgatggtgggttcacttgcactaaccactcctttaaagtttttagatga

SEQ ID NO: 59769 - protein, 282 aa, Brassica napus
MSTENIQHSSLPTQRLLGKVALITGGATGIGESIARLFHKHGAKVCIVDVQDDLGDKVLKTLLANSEESACFIHGDVTQEDDISNAVDFAVKRFGTLDILINNAGVSEAPCPDIRNNSLTEFEMVFNVNVKGAFLGMKHAARVMIPAKKGSIVSLCSVGGVVGGVGPHAYVGSKHAVLGLTRSVAAELGQHGIRVNCVSPYAVLTNLALAHLPEDERKEGVVAGFRSFAAANANLKGVELTVDDVANAVLFLASDESRYVSGDNLMVDGGFTCTNHSFKVFR

SEQ ID NO: 59770 - DNA, 849 bp, Brassica napus
  CDS (1)..(849)
atgagcaatcatcaaaccacggtgttgaaacaactagagccatggtgtgagctaaacggcaaagtggttcttctgaccggagcttcttctggtataggaagtgaggtctgtctcgatctgggcaaagctggctgtaagattatcgcagcagctcgtcgcgtccaccgtctcgaatctctctgctccgaaatcaacagcttaagctcaaccgggatccaattagccgcaccgctcgagctagacgtttcatcagacgcagccaccattcaaaaagctgtcaaacaagcttgggacatctacggaaagatagatgtgttgatcaacaacgctggaatcagaggcaatgtcaagacgagtttagatctgactgaagacgagtggaacacagtgttcagaaccaacttaaccggaccttggttagtatccaaatacgtctgcagtctaatgcgtgacgcaaaacgcggcggctcagtaataaacgtctcctccatcgccggtctccaccgaggtttgttacccggtggagtcgcctatgcttgttccaaaggtggtgttgacaccatgacgaggatgatggctattgagttaggtgtatacaacatcagagtgaactcgatcgcaccggggcttctcaagtcagagatcacgcaaggtcttatgcaaaaagagtggctcaagaacgtgaccgagaggactatcccgttaaaggtgcaacagaccgtggatccggggcttacctcgctcgttcgctatctcagtcatgactcttctcaatatgtctccggcaacacatacatacttgactccggagctacaatacctggcctgcctattttttcttctctttga

SEQ ID NO: 59771 - protein, 282 aa, Brassica napus
MSNHQTTVLKQLEPWCELNGKVVLLTGASSGIGSEVCLDLGKAGCKIIAAARRVHRLESLCSEINSLSSTGIQLAAPLELDVSSDAATIQKAVKQAWDIYGKIDVLINNAGIRGNVKTSLDLTEDEWNTVFRTNLTGPWLVSKYVCSLMRDAKRGGSVINVSSIAGLHRGLLPGGVAYACSKGGVDTMTRMMAIELGVYNIRVNSIAPGLLKSEITQGLMQKEWLKNVTERTIPLKVQQTVDPGLTSLVRYLSHDSSQYVSGNTYILDSGATIPGLPIFSSL

SEQ ID NO: 59772 - DNA, 960 bp, Brassica napus
  CDS (1)..(960)
atggccaccaccgtcgcagcaacgaaactcacctccttgaaagccaccgccgggaagctcggttaccgtgagatctgccaggtccggcaatgggctccgcttaagtctgcgatgcctcatttcggtatgctgcgatgtgcgacatccactgttgtgaaagctcaagctcaagctcaagccacggctactgagcaaacaacagaagaagctgttccaaaagtggaatctccagttgtggttgtgactggtgcctctagaggcattggtaaagctattgctctttccttgggcaaagctggctgtaaggtcttggtgaactatgctaggtcggcaaaggaagctgaagaagtttccaaacagattgaggcatatggtggccaggctattacttttgggggtgatgtctccaaagaggctgatgtggatgccatgatgaaaaccgctgttgatgcatggggaaccattgatgtcgtcgttaacaatgcaggaattactcgggataccttgttgatacgaatgaagaagtcccaatgggatgaagtgattgatttgaatctcactggagtctttctctgtacccaggcagcaacaaagatcatgatgaagaagagaaagggaagaatcatcaacattgcgtcagttgttggtctcattggtaatattggccaagcaaactacgctgctgctaaagctggtgttattgggttctccaagactgccgccagagagggtgcgagcaggaatataaatgtcaatgtggtttgccctgggttcattgcatctgacatgactgccaagcttggagaagacatggaaaagaaaatcttgggaacaatcccattaggacgatatggacaacctgaagatgtggctggcttggtagaattcttggctctcagtcctgcagccagttacatcacaggacaggcattcaccattgatggaggtattgccatctag

SEQ ID NO: 59773 - protein, 319 aa, Brassica napus
MATTVAATKLTSLKATAGKLGYREICQVRQWAPLKSAMPHFGMLRCATSTVVKAQAQAQATATEQTTEEAVPKVESPVVVVTGASRGIGKAIALSLGKAGCKVLVNYARSAKEAEEVSKQIEAYGGQAITFGGDVSKEADVDAMMKTAVDAWGTIDVVVNNAGITRDTLLIRMKKSQWDEVIDLNLTGVFLCTQAATKIMMKKRKGRIINIASVVGLIGNIGQANYAAAKAGVIGFSKTAAREGASRNINVNVVCPGFIASDMTAKLGEDMEKKILGTIPLGRYGQPEDVAGLVEFLALSPAASYITGQAFTIDGGIAI

SEQ ID NO: 59774 - DNA, 849 bp, Brassica napus
  CDS (1)..(849)
atgagcaatcatcaaaccacggtgttgaaacaactagagccatggtgtgagctaaacggcaaagtggttcttctgaccggagcttcttctggtataggaagtgaggtctgtctcgatctgggcaaagctggctgtaagattatcgcagcagctcgtcgcgtccaccgtctcgaatctctctgctccgaaatcaacagcttaagctcaaccgggatccaattagccgcaccgctcgagctagacgtttcatcagacgcagccaccattcaaaaagctgtcaaacaagcttgggacatctacggaaagatagatgtgttgatcaacaacgctggaatcagaggcaatgtcaagacgagtttagatctgactgaagacgagtggaacacagtgttcagaaccaacttaaccggaccttggttagtatccaaatacgtctgcagtctaatgcgtgacgcaaaacgcggcggctcagtaataaacgtctcctccatcgccggtctccaccgaggtttgttacccggtggagtcgcctatgcttgttccaaaggtggtgttgacaccatgacgaggatgatggctattgagttaggtgtatacaacatcagagtgaactcgatcgcaccagggcttctcaagtcagagatcacgcaaggtcttatgcaaaaagagtggcttaagaacgtgaccgagaggactatcccgttaaaggtgcaacagaccgtggatccgggacttacctcgctggttcgctatctcattcatgactcttcccaatatgtctcaggcaacacatacattctcgactccggagctacaatacctggcctgcctattttttcttctctttga

SEQ ID NO: 59775 - protein, 282 aa, Brassica napus
MSNHQTTVLKQLEPWCELNGKVVLLTGASSGIGSEVCLDLGKAGCKIIAAARRVHRLESLCSEINSLSSTGIQLAAPLELDVSSDAATIQKAVKQAWDIYGKIDVLINNAGIRGNVKTSLDLTEDEWNTVFRTNLTGPWLVSKYVCSLMRDAKRGGSVINVSSIAGLHRGLLPGGVAYACSKGGVDTMTRMMAIELGVYNIRVNSIAPGLLKSEITQGLMQKEWLKNVTERTIPLKVQQTVDPGLTSLVRYLIHDSSQYVSGNTYILDSGATIPGLPIFSSL

SEQ ID NO: 59776 - DNA, 903 bp, Brassica napus
  CDS (1)..(903)
atgccggctcaagtgatcactgagcagacctttcaatccctccacgacaccatcatggaggatacaaattcaactttatttcataagaggttggaaggaaaagtagccatcataaccggaggagcacatgggatcggcaaagctaccgtcaagatattcgcgagacacggtgccacggtggtgatcgctgacgtggacgccacagccggatcttccctggctaaatcgatctcatcatcccaagtcgccttcataagctgcgatgtctcggtcgaagctgacgtggaaaacctagtgaacgtgaccatcgcacgttacggtcgacttgacgtgctattcaacaacgcaggagttctcggagaccaaaagaaacacaaaagcatattagacttcaacgctgaagagttcgaccaagtgatgcgtgtgaacgtgcgaggcgcagggctaggcatgaaacacgcggcacgtgccatgatcaaaagaggctttaaaggttgcataatctcgacggcgagtgtggccggcgtgatgggtggaatgggcccacatgcttacacggcgtcgaagcatgcgatcgttggactgaccaagaacgcagcttgtgagcttgggaggtatgggattagggttaactgcatatcaccatttggagttgctacgtccatgctggtgaacgcgtggaggaagacgagtggatgtggtgacatggaagatggtgatgatgtagaggagatggaggagttcgtgaggagtttggctaatttgaaaggagagacattgagagcgacggatatagctgaagcggcgttgtatttggcgagtgatgagtcaaagtatgttaatggacataaccttgttgttgacgggggtgttacgactgcgaggaactgtgttggcctgtga

SEQ ID NO: 59777 - protein, 300 aa, Brassica napus
MPAQVITEQTFQSLHDTIMEDTNSTLFHKRLEGKVAIITGGAHGIGKATVKIFARHGATVVIADVDATAGSSLAKSISSSQVAFISCDVSVEADVENLVNVTIARYGRLDVLFNNAGVLGDQKKHKSILDFNAEEFDQVMRVNVRGAGLGMKHAARAMIKRGFKGCIISTASVAGVMGGMGPHAYTASKHAIVGLTKNAACELGRYGIRVNCISPFGVATSMLVNAWRKTSGCGDMEDGDDVEEMEEFVRSLANLKGETLRATDIAEAALYLASDESKYVNGHNLVVDGGVTTARNCVGL

SEQ ID NO: 59778 - DNA, 858 bp, Brassica napus
  CDS (1)..(858)
atgagcagcaatcatcagactgtgatgaagcaactagagccatggtgcgagctcaaagacaaagtggttctcctaacaggagcttcatccggcatcggaagagagatctgcctcgatctagccaaatccggctgcaagatcatcgccgcagctcgccgtctcgaccgtctccaatccctctgctccgagatcaacgccttattctccccaacaaaaaccaaacaagccgcacctctcgagctagacgtctcctcagactcatccaccatccgaaacgcagtcaaacaagcttgggacatcttcggaaacatcgacgtcttgatcaacaacgcaggcatcagaggcaacgtcaagtcgagtctggacctatccgaagaagaatgggaaagagtcttcagaacaaacctaaccggaccttggctagtatcaaaacacgtctgcgttctgatgcgcgacgccaaacgccgcggcggaggatcggtgataaacgtttcctccatcgcggggcttcagcgcgggaagctacccggcgcgttggcgtacgcgtgttcgaaaggaggtcttgatattatgacgaagatgatggcggttgagctgggtgagtatggtataagagtgaactcgatagccccggggctgtttaagtcggagatcacggaaggtctgatgaggaaagagtggatgaagaatgtgagggagaggattgttccgttgaaggtgcagcagagtgtggacccggggcttacctcgctggttaggtatctgattcatgactcttccaggtatgtctctgggaatgtttacattgttgacgctggtgctacgttgtctggtctgccgattttttcttctctttga

SEQ ID NO: 59779 - protein, 285 aa, Brassica napus
MSSNHQTVMKQLEPWCELKDKVVLLTGASSGIGREICLDLAKSGCKIIAAARRLDRLQSLCSEINALFSPTKTKQAAPLELDVSSDSSTIRNAVKQAWDIFGNIDVLINNAGIRGNVKSSLDLSEEEWERVFRTNLTGPWLVSKHVCVLMRDAKRRGGGSVINVSSIAGLQRGKLPGALAYACSKGGLDIMTKMMAVELGEYGIRVNSIAPGLFKSEITEGLMRKEWMKNVRERIVPLKVQQSVDPGLTSLVRYLIHDSSRYVSGNVYIVDAGATLSGLPIFSSL

SEQ ID NO: 59780 - DNA, 798 bp, Glycine max
  CDS (1)..(798)
atggcttctagttcagaatctcaatctcagtctaaaccgctccaagaccgagttgcaatcgtcaccggctcgtcccgcggaatcggccgagaaatcgcgcttcacctcgcctcactcggcgcgcgactcgtcgtcaactacacctccaactcggcccaagccgactcagtcgcggcgcagatcaacgccggttccgccaccacgacaccgcgcgccgtcgtggtccaagccgacgtgtccgatccggctcaggtgaagtcgctcttcgactcggccgagcgcgccttcgactcgccgatccacatccttgtcaactcggcgggcgtgatcgacggcacgtatccctccgtcgccgacaccaccgtggagtccttcgaccgcactttcgcggtgaacgcgcgtggcgccttcgcgtgcgccagggaggccgcgaaccgcctcaagcgcggcggcggagggcggatcattctactgacgacatcgcaggtggtggcgctgaggccggggtacggggcgtacgcggcgtcgaaggcggcggtggaggcaatggtgaagatcctggcgaaggaactgaaagggacgcagataacggcgaattgcgttgcgccgggaccgattgcgacggagatgttcttcgagggtaagacggaggaggtggtgaatcggatcgtgcaagagagtcccttggggaggctcggtgagaccaaagacgtggcacccgttgtgggattcttggccactgatgcttctgaatgggtcaacggtcaaattgttcgtgtcaacggtggctatatttag

SEQ ID NO: 59781 - protein, 265 aa, Glycine max
MASSSESQSQSKPLQDRVAIVTGSSRGIGREIALHLASLGARLVVNYTSNSAQADSVAAQINAGSATTTPRAVVVQADVSDPAQVKSLFDSAERAFDSPIHILVNSAGVIDGTYPSVADTTVESFDRTFAVNARGAFACAREAANRLKRGGGGRIILLTTSQVVALRPGYGAYAASKAAVEAMVKILAKELKGTQITANCVAPGPIATEMFFEGKTEEVVNRIVQESPLGRLGETKDVAPVVGFLATDASEWVNGQIVRVNGGYI

SEQ ID NO: 59782 - DNA, 882 bp, Glycine max; identical to SEQ ID NO: 40611
  CDS (1)..(882)

SEQ ID NO: 59783 - protein, 293 aa, Glycine max; identical to SEQ ID NO: 40612

SEQ ID NO: 59784 - DNA, 849 bp, Glycine max
  CDS (1)..(849)
atggctacgcaactttccgaccgcctcgagccatggcacaccctcgccggaaaagtcgtaatggtcaccggcgcctcctccggcctcggccgcgacttctgcctcgacctcggtcgggctggctgtcgggtcgtcgtggcggcccgcagagtcgaccgcctcgagtccctgtgcgacgaaattaacagcatggccgccggagacggtggccgaagccgccgcgccgtcgccgttgaactcgatgtcgctgccgatgaccccgccgtcgacaaatacgtgcagaaggcgtgggaggcgtttggtcacattgatgctcttatcaacaacgctggtgtcagagggaatgtcaaatcacctttggaattgtctgaggaggaatggaaccatgcgttcagaacaaacttaactgggacatggttggtctcaaaatatgtatgcaaacgcatgcgtgatgcacaaagaaaaggatcaatcattaatattgcttcaattgctggtttgaaccgtggtcaattgcctggaggtgctgcatattcatcctcaaaagcaggcgtcaatatgctaacaagggtcatggcattagaattgggggcacacaaaatcagagtgaattccatatcacctggacttttcaaatctgaaatcactgaaaaactaatggagaaaaattggttgaataatgtggccatgaaaacagtacccttgagaaaatttggcacttctgatccagcattaacatcgctggctcgttatttaattcacgattcttctgagtatgtgtcaggcaacaattttgttgtggatgctggagccaccttaccaggtgtgcctatttattcctccctataa

SEQ ID NO: 59785 - protein, 282 aa, Glycine max
MATQLSDRLEPWHTLAGKVVMVTGASSGLGRDFCLDLGRAGCRVVVAARRVDRLESLCDEINSMAAGDGGRSRRAVAVELDVAADDPAVDKYVQKAWEAFGHIDALINNAGVRGNVKSPLELSEEEWNHAFRTNLTGTWLVSKYVCKRMRDAQRKGSIINIASIAGLNRGQLPGGAAYSSSKAGVNMLTRVMALELGAHKIRVNSISPGLFKSEITEKLMEKNWLNNVAMKTVPLRKFGTSDPALTSLARYLIHDSSEYVSGNNFVVDAGATLPGVPIYSSL

SEQ ID NO: 59786 - DNA, 963 bp, Glycine max; identical to SEQ ID NO: 40613
  CDS (1)..(963)

SEQ ID NO: 59787 - protein, 320 aa, Glycine max; identical to SEQ ID NO: 40614

SEQ ID NO: 59788 - DNA, 759 bp, Glycine max
  CDS (1)..(759)
atggaaacgccgaagagatttgaaggtaaggtagccatcgtgactgcttccacacagggaatcggcttagcaatagccgagaggcttggcctcgagggtgcatctgtcgtcatctcttctcgcaaacagcaaaatgttgatgcggccgcggaacaactgagggccaaaggaattcaagtgttgggggttgtttgccatgtttcaagtgctcagcaaaggaagaatttgatcgacaaaactgtccagaagtatggaaagatagatgttgttgtgtccaatgctgctgcaaatccttctgttgatgccatcttgcaaacaaaagactcggtccttgacaagctatgggagataaatgtcaaagccactatacttcttctgaaggacgcagtgcctcacttgcagaagggttcttctgttgttatcatttcctcaattgcaggttttaacccgccaccttctctggctatgtatggagtgaccaaaacagcccttcttggacttactaaagccctggctgctgagatggccccaaacactcgtgtaaactgtgttgctcctggttttgtgccaaccaattttgcttcattcattacaagtaacgatgctgtgaagaaagaactggaagagaagacattacttggaaggcttggtacaacagaagacatgggtgctgcagcagcttttttggcatctgacgatgctgcttatataacaggagagaccattgtagttgctgggggaacgccttccaggttgtag

SEQ ID NO: 59789 - protein, 252 aa, Glycine max
METPKRFEGKVAIVTASTQGIGLAIAERLGLEGASVVISSRKQQNVDAAAEQLRAKGIQVLGVVCHVSSAQQRKNLIDKTVQKYGKIDVVVSNAAANPSVDAILQTKDSVLDKLWEINVKATILLLKDAVPHLQKGSSVVIISSIAGFNPPPSLAMYGVTKTALLGLTKALAAEMAPNTRVNCVAPGFVPTNFASFITSNDAVKKELEEKTLLGRLGTTEDMGAAAAFLASDDAAYITGETIVVAGGTPSRL

SEQ ID NO: 59790 - DNA, 810 bp, Glycine max
  CDS (1)..(810)
atggctagtgtttcttcggttttagctccatttagaaggcttgatgggaaggtggcgattatcactggtggtgcgagtggtctaggtgcagccactgcaagactcttctctaagcatggagcatatgtagtcatagctgatattcaagacgacttgggtctctctgttgccaaagagttagaatctgcttcctatgtccattgcgatgtgacaaaggaagaggacgttgaaaactgcgtgaacacaacggtttccaagtatggcaaattagatatcatgtttaacaatgcaggtgtatctgatgagatcaaaacaagcattcttgacaacaacaagtctgattttgagagagtgataagtgttaacttggttggtccttttctgggaacaaagcatgctgcaagggtcatgattcctgctaaaaagggatgcataatcaacacagctagtgttgctggatgcataggtggaggtgctacacatgcctacacaagttcaaagcacgcactaattggactgacaaaaaacactgcggtggagcttggacaacatggtattagggtaaattgtttgtcaccttatcttgttgtcacaccgttaagtaagaaatatttcaatattgatgaagacaaaattcgtgagatatattcaaacctaaaaggtgctcatcttgtgcctaacgatgtggccgaagctgctctttacttggcaggtgatgagtccaagtatgttagtggtcacaatcttgtgatagatggagggtacactgatgtaaatgcaggatttaccgtgtttgggcagtctcagtaa

SEQ ID NO: 59791 - protein, 269 aa, Glycine max
MASVSSVLAPFRRLDGKVAIITGGASGLGAATARLFSKHGAYVVIADIQDDLGLSVAKELESASYVHCDVTKEEDVENCVNTTVSKYGKLDIMFNNAGVSDEIKTSILDNNKSDFERVISVNLVGPFLGTKHAARVMIPAKKGCIINTASVAGCIGGGATHAYTSSKHALIGLTKNTAVELGQHGIRVNCLSPYLVVTPLSKKYFNIDEDKIREIYSNLKGAHLVPNDVAEAALYLAGDESKYVSGHNLVIDGGYTDVNAGFTVFGQSQ

SEQ ID NO: 59792 - DNA, 768 bp, Glycine max
  CDS (1)..(768)
atggagagaaccaaatatggcaagagatttcaaggtaaggtagccattgtgacagcttccacccttggaattggctttagcatagcagagaggcttggcttggagggtgcatctgttgtcatctcttctcgcaaacagcaaaatgttgatgaggctgctggtaaactgagagctaaaggaatcgaagtattggcggttgtttgccacgtttcaaatgctcaacaaaggaagaatttgatagacaaaactttacagaagtatggaaagatagatgttgttgtgtccaatgctgccgtacatccttctgtagatcccattttgcaaacacaagaatcgatccttgacaagttgtgggagataaatgtcaaatccactatacttcttctcaaggatgcagctcctcacttgaagaagggttcttctgttgttctcattgcctcacttgttgcttataatccaccacctactatggctatgtatggagtgaccaaaacagcagttcttggacttaccaaagctatggctagtgaaatgggccctaatactcgggtgaattgtgttgttcctgggattgtgccaactcattttgttgcactttatacctcaaatgatgctacaagagaggaacttgaaagaaaggcattgcttggaaggcttggtacaactgaagacatggctgctgcgacagcgtttttggcgtctgatgatgcttcttacataacaggagaaaatctagtggtttctgggggaatgccttctaggttgtag

SEQ ID NO: 59793 - protein, 255 aa, Glycine max
MERTKYGKRFQGKVAIVTASTLGIGFSIAERLGLEGASVVISSRKQQNVDEAAGKLRAKGIEVLAVVCHVSNAQQRKNLIDKTLQKYGKIDVVVSNAAVHPSVDPILQTQESILDKLWEINVKSTILLLKDAAPHLKKGSSVVLIASLVAYNPPPTMAMYGVTKTAVLGLTKAMASEMGPNTRVNCVVPGIVPTHFVALYTSNDATREELERKALLGRLGTTEDMAAATAFLASDDASYITGENLVVSGGMPSRL

SEQ ID NO: 59794 - DNA, 804 bp, Glycine max; identical to SEQ ID NO: 40615
  CDS (1)..(804)

SEQ ID NO: 59795 - protein, 267 aa, Glycine max; identical to SEQ ID NO: 40616

SEQ ID NO: 59796 - DNA, 804 bp, Glycine max
  CDS (1)..(804)
atggctgaggcaagcattggcagcaaaagcagcagatggtctttacagggaatgacagctctcgtcaccggtggatccaaaggaatcggatatgctatcgtggaggagttggcacagcttggagccactgtgcacacttgcgctcggaacgaagctgaactcaatgaatccttaaatgaatggaacacaaaaggatacagagtaactggttccgtctgtgacgtggcgtctcgtgcagaaagacaagacctcatagctagagtctccaatgagtttaatggcaaactcaatatccttgtaaacaacgtgggaacaaacgtaccgaaacatacccttgatgttacggaggaagacttctcatttctgataaatacaaatcttgaatctgcttaccacctaagccagcttgcacatcctctcctgaaagcttcagaggctgcaaacatcatttttatatcctccattgctggtgtgctatcaataggtataggatccacttatggtgcaacaaaaggagcaatgaaccaactgactaaaaatttggcatgtgagtgggccaaagacaatataaggactaattgcgttgcaccagggccaatcaaaacccctctcggtgacaagcattttaaaaatgaaaaacttcttaatgctttcatttcgcaaaccccccttggacggattggagaagcagaggaagtgtcttcattggtggcattcctctgcttacctgcagcctcttacataacaggacagaccatttgtgttgatggtggattaacagtgaatggtctctatataaattag

SEQ ID NO: 59797 - protein, 267 aa, Glycine max
MAEASIGSKSSRWSLQGMTALVTGGSKGIGYAIVEELAQLGATVHTCARNEAELNESLNEWNTKGYRVTGSVCDVASRAERQDLIARVSNEFNGKLNILVNNVGTNVPKHTLDVTEEDFSFLINTNLESAYHLSQLAHPLLKASEAANIIFISSIAGVLSIGIGSTYGATKGAMNQLTKNLACEWAKDNIRTNCVAPGPIKTPLGDKHFKNEKLLNAFISQTPLGRIGEAEEVSSLVAFLCLPAASYITGQTICVDGGLTVNGLYIN

SEQ ID NO: 59798 - DNA, 843 bp, Glycine max
  CDS (1)..(843)
atgtccactactggtactgttctggcttccactccaacacaaaggctattaggcaaagtggcattggttactggtggagcgtctggaattggagaaagcattgtgcgcctcttccatatccatggtgctaaaatatgtatagctgatgtgcaagacaaccttggaaagcaggtctgtcagtctcttggtgatgaagcaaatgttgtttttgtccattgtgatgttacagtagaggatgatgtttcccatgcagtggacttcactgtgggtaaatttggcacccttcacatcatagtcaacaatgccggaatttctggatcaccttgttccgatatccgcaatgcagacttatcagaattcgataaggtgtttagtgtaaatacgaagggagtgttccacgggatgaaacacgctgctcgaattatgatcccgaagaagaagggctcaatcatttctttatgcagtgtagcaagtgccataggtggcttaggaccgcatgcatacacagggtccaagtatgctgtattggggctcacaaagaatgttgcagctgaattggggaaacatgctataagagtgaactgtgtgtcaccttatggtgttgcaacaggtttggccttggctcatttgcctgaggatgagagaactgatgatgccttggtcagttttcgtgattttactgggagaatggccaacttgcagggggtagaattaactactcacgatgtggctaatgctgtgctcttccttgcaagtgatgatgctaaatatataagtggagagaatctcatggttgatggaggcttcacaagtgcaaatcactcactccaagtttttagatga

SEQ ID NO: 59799 - protein, 280 aa, Glycine max
MSTTGTVLASTPTQRLLGKVALVTGGASGIGESIVRLFHIHGAKICIADVQDNLGKQVCQSLGDEANVVFVHCDVTVEDDVSHAVDFTVGKFGTLHIIVNNAGISGSPCSDIRNADLSEFDKVFSVNTKGVFHGMKHAARIMIPKKKGSIISLCSVASAIGGLGPHAYTGSKYAVLGLTKNVAAELGKHAIRVNCVSPYGVATGLALAHLPEDERTDDALVSFRDFTGRMANLQGVELTTHDVANAVLFLASDDAKYISGENLMVDGGFTSANHSLQVFR

SEQ ID NO: 59800 - DNA, 882 bp, Glycine max; identical to SEQ ID NO: 40617
  CDS (1)..(882)

SEQ ID NO: 59801 - protein, 293 aa, Glycine max; identical to SEQ ID NO: 40618

SEQ ID NO: 59802 - DNA, 795 bp, Glycine max
  CDS (1)..(795)
atggctgaaacaaagtgggtcatgaaggacaaaagatggtctctccatggaatgacagctctagtcacaggaggcacccgaggcatagggcatgccattgttgaagagttagctgagtttggagcaactgttcatatatgtgcacgtaatcaagatgatatagataaatgtttagaagagtggaaaagcaagggacttaatgtgactggttcagtatgtgatttactatgttctgaccaacgtaaaagattaatggaaattgttggctccatctttcatggaaagctcaatattctagtgaacaatgctgctacaaatataacaaagaagataacagattacacagcagaggatatatcagccataatgggcaccaattttgagtccgtttaccatttgtgtcaagttgcacacccacttctaaaagattctgggaatgggagcatagtatttatttcttccgtagcaggtttaaaagctcttcctgtgttctctgtttatgcagcctctaaaggagccatgaatcaattcaccaaaaacttggcattggaatgggcaaaggataatattcgtgcaaatgctgttgcccctggacctgttaagactaaacttttggagtgtatcgtgaattcttcggaagggaatgagtctataaatggagtagtgtctcaaacatttgttggtcgcatgggagaaactaaagagatatcagcattagttgcttttctttgccttccggctgcatcatacatcactggacaggttatatgtgtagatgggggtttcacaacttag

SEQ ID NO: 59803 - protein, 264 aa, Glycine max
MAETKWVMKDKRWSLHGMTALVTGGTRGIGHAIVEELAEFGATVHICARNQDDIDKCLEEWKSKGLNVTGSVCDLLCSDQRKRLMEIVGSIFHGKLNILVNNAATNITKKITDYTAEDISAIMGTNFESVYHLCQVAHPLLKDSGNGSIVFISSVAGLKALPVFSVYAASKGAMNQFTKNLALEWAKDNIRANAVAPGPVKTKLLECIVNSSEGNESINGVVSQTFVGRMGETKEISALVAFLCLPAASYITGQVICVDGGFTT

SEQ ID NO: 59804 - DNA, 822 bp, Glycine max
  CDS (1)..(822)
atgggaagtgttccattggcctccgctgctgctcttgccagaaggctagaagggaaggtggcactgataactggtggagcaagtggtataggtgagtgcacagcaagacttttctccaagcatggagccaaagtggtgattgctgatatccaagacgagttaggccactcaatttgcaaagacttggattcatcttcagctacttacattcattgtgatgtcacaaaagaagaaaacatcgaacacgccgtgaacacgaccgtttccaagtacggtaaactagacatcatgcacagcagcgcaggtatagttggcgcatggaaccccagcatattgcacaacaagaagtctcactttgagcaagttatcagtgtcaacctggtgggcacattcctgggaatcaagcacgccgcgagggtgatgatcccttctgggcgtggcagcatagttgcaatggctagcatttgtggaagaattggtggcgtggcttcgcatgcctatacgagctcgaagcacggcatcgtgggactggtgcgaaacactgccgtggagcttggaaccttagggatcagagtgaatagtgtgtctccttatgcggtccctacgcccatgagtaaaactttcctcaacactgatgatgaggggattgctgcactgtattccaatcttaaagggactgttcttaagccccaggatgtggctgaagctgttctttacttgggaagtgacgagtccaagtatgttagtggccatgaccttgttgtagatgggggtttcactgtcgtaaaccctggtttgtgtgtgtttgggcaatccgtgtag

SEQ ID NO: 59805 - protein, 273 aa, Glycine max
MGSVPLASAAALARRLEGKVALITGGASGIGECTARLFSKHGAKVVIADIQDELGHSICKDLDSSSATYIHCDVTKEENIEHAVNTTVSKYGKLDIMHSSAGIVGAWNPSILHNKKSHFEQVISVNLVGTFLGIKHAARVMIPSGRGSIVAMASICGRIGGVASHAYTSSKHGIVGLVRNTAVELGTLGIRVNSVSPYAVPTPMSKTFLNTDDEGIAALYSNLKGTVLKPQDVAEAVLYLGSDESKYVSGHDLVVDGGFTVVNPGLCVFGQSV

SEQ ID NO: 59806 - DNA, 963 bp, Glycine max; identical to SEQ ID NO: 40619
  CDS (1)..(963)

SEQ ID NO: 59807 - protein, 320 aa, Glycine max; identical to SEQ ID NO: 40620

SEQ ID NO: 59808 - DNA, 828 bp, Glycine max
  CDS (1)..(828)
atggcaacttcaacctctgcactcaataaaaggctggaaggaaaagttgcactgatcacaggaggagctagtggcatcggcaaacgcactgcagaagtgttcgctcagcaaggagccaaagtagtgatcgctgacatccaagacgaactgggacattccgttgctcagtccatagggccatcaacatgttgttatgtccattgcgatgtcaccgatgagaaccaaataaaaaatgccgtccaaaaagccgtagatgcttatgggaagctagacatcatgttcaacaacgccggcattgttgatcccaacaagaaccgaatcattgacaacgataaggcagatttcgaacgtgtcctaagcgtcaatgtcacgggtgttttccttgggatgaagcatgcggcgcaggcgatgatcccagcacgcagtggtagcatcatctctacggccagcataagctcctacgttggtggtgcagcctcgcatgcttactgttgtgctaagcatgctgtggttggtctaactaaaaatgcagcagttgagcttggacagttcggaataagggtgaattgtttgtcaccttacgctcttgctacacctttggccaccaagtttgttggagctaatgatgaggagcttgagactatcatgaactcactggctaatctcaagggtgtcactcttaaagctgaggatgtggctaatgccgcactttattttgctagtgatgattccaggtacgtcagtgggcaaaatttgctcatagatggaggcttcagcattgttaatccttcctttcacatgtttcagtacccggactcggagtcttga

SEQ ID NO: 59809 - protein, 275 aa, Glycine max
MATSTSALNKRLEGKVALITGGASGIGKRTAEVFAQQGAKVVIADIQDELGHSVAQSIGPSTCCYVHCDVTDENQIKNAVQKAVDAYGKLDIMFNNAGIVDPNKNRIIDNDKADFERVLSVNVTGVFLGMKHAAQAMIPARSGSIISTASISSYVGGAASHAYCCAKHAVVGLTKNAAVELGQFGIRVNCLSPYALATPLATKFVGANDEELETIMNSLANLKGVTLKAEDVANAALYFASDDSRYVSGQNLLIDGGFSIVNPSFHMFQYPDSES

SEQ ID NO: 59810 - DNA, 963 bp, Glycine max; identical to SEQ ID NO: 40621
  CDS (1)..(963)

SEQ ID NO: 59811 - protein, 320 aa, Glycine max; identical to SEQ ID NO: 40622

SEQ ID NO: 59812 - DNA, 819 bp, Glycine max
  CDS (1)..(819)
atggcagaagcaggaagcagcattaacagaggagcaagatggtctctcaatggaacgacggctctcgtcaccggcggcacccgtgggatcgggcacgccatagtgagtgacttggccgcgtttggcgctgctgtgcacacttgctccaggacccaaacagagctcaacaaatgcttacaagagtggcagagtctgggctttcaggtaactgggtcggtgtgtgacgtgtcctcaccatcccagagagagaagctcattgaggaagtcacttccatcttgaatggcaagcttaacatctatgtgaacaatgttggaacaaactttagaaagccaaccattgagtacactgctgaagaatattcacagcttatgacagttaatttagactcctcattccatctgtgccaacttgcatatcctcttctgaaagcatctgaaaatggaagcattgtgtttatttcatctgttgctggtgtggtgagcttgggtactggagctgtttatgcagcaagtaaagctgcaattaatcagcttacaaaaaacctggcttgtgaatgggccaaagacaacataaggagcaactgtgttgtaccatgggcaaccagaaccccacttgtagaacatttgttgagagaccaaaagtttgtggatgatattatgtctcgaactccgattaaacgtatagcagaacccgaagaagtgtcatcgttggtgactgtcctttgcttgcctgctgcttcttacatcactggacaggttatttgtgttgatggaggattaacggtgaatggatgtcaacccagcatgagaattacctga

SEQ ID NO: 59813 - protein, 272 aa, Glycine max
MAEAGSSINRGARWSLNGTTALVTGGTRGIGHAIVSDLAAFGAAVHTCSRTQTELNKCLQEWQSLGFQVTGSVCDVSSPSQREKLIEEVTSILNGKLNIYVNNVGTNFRKPTIEYTAEEYSQLMTVNLDSSFHLCQLAYPLLKASENGSIVFISSVAGVVSLGTGAVYAASKAAINQLTKNLACEWAKDNIRSNCVVPWATRTPLVEHLLRDQKFVDDIMSRTPIKRIAEPEEVSSLVTVLCLPAASYITGQVICVDGGLTVNGCQPSMRIT

SEQ ID NO: 59814 - DNA, 816 bp, Glycine max
  CDS (1)..(816)
atggcgaaccctgaaggcagtagcagaggctctagatggtcccttaagggaaccactgctctcgttactggaggaacgcgtggaattgggcacgctgtggtggaggaactagcggagtttggtgccacagtgtacacttgttcgaggaatgaagaagagctgaatgcatgcttgaaggagtggaaagagaagggattttcggtttctgggttggtttgtgatgcgtcttctccaccccatagagagaacctcattcaacaagtggcctctgctttcaacggcaagctcaacatacttgtaaacaatgttggaacaaatgtgaggaagccgacaattgagtatacagccgaagaatattcaaaattgatggcaactaacttggactccacataccatttgtgccaacttgcatatcctcttcttaaagcatctggaaatggaagtattgtgtccatttcctctgttgcaagtcagacaagcgtaggttctggagccatttacgcagcaactaaagctgctattgatcagcttaccaaatattttgcttgtgaatgggcaaaagacaatataaggagcaacggtgttgcaccctggtataccataacttcacttgtggaacctttgcttgcgaacaaacagcttgttagtgagataatatctcgaacgccgataaagcggatggcagaaacacatgaagtttcatccttggtgactttcctttgcctgccagcagcatcctacatcactggacagattgtttcagttgatggaggattcactgctaatggatttcaacccagcatgagaatttcttaa

SEQ ID NO: 59815 - protein, 271 aa, Glycine max
MANPEGSSRGSRWSLKGTTALVTGGTRGIGHAVVEELAEFGATVYTCSRNEEELNACLKEWKEKGFSVSGLVCDASSPPHRENLIQQVASAFNGKLNILVNNVGTNVRKPTIEYTAEEYSKLMATNLDSTYHLCQLAYPLLKASGNGSIVSISSVASQTSVGSGAIYAATKAAIDQLTKYFACEWAKDNIRSNGVAPWYTITSLVEPLLANKQLVSEIISRTPIKRMAETHEVSSLVTFLCLPAASYITGQIVSVDGGFTANGFQPSMRIS

SEQ ID NO: 59816 - DNA, 864 bp, Glycine max
  CDS (1)..(864)
atgcaagcatgttcctcctcagacgctccactctccaagaggttagatggcaaagtagcactcataatcggcggagccagtggcatcggtgaagccaccgccaagcttttccttcgctacggtgccaaggtcgtcatcgccgacatccaagacaacctcggacactccctatgccaaagtctcaattcctccgacaaaaacaacaacgacgacatttcctatgttcactgcgacgtcaccaacgacaaagacgtcgaaaccgccgtcaacgctgccgtctcgcgacacggcaagctcgacatcctcttcagcaacgccggcatcacgggccgttccgactgttctaactccatcacggccatcgacagcggtgacctgaagagggtcttcgaggtgaacgtcttcggtgccttctacgccgccaaacacgccgctaaggtcatgattcccagaaagaaagggagcattgttttcactgctagcatcgcttctgtgtcgaatgcgggttgggcgcacccgtacgcggcgtcgaagaacgcagtggtgggtttgatgaagaacctgtgcgtggaattggggaaacatggaatcagagttaactgtgtttcgccctatgcggtggggactccaatgctgacacgtgcgatgaggatggagaaggagaaagcagaggagatatatttggaggcggcgaacttgaagggagtggttttaaaggaaaaggatgtggcagaagcaactttgtttttggctagtgatgagtcaaaatacgtgagtggagtgaatctagttgtggacggaggttatactaccaccaattcttcttccaaacaagctttcacaaagttttcttttaatgtttaa

SEQ ID NO: 59817 - protein, 287 aa, Glycine max
MQACSSSDAPLSKRLDGKVALIIGGASGIGEATAKLFLRYGAKVVIADIQDNLGHSLCQSLNSSDKNNNDDISYVHCDVTNDKDVETAVNAAVSRHGKLDILFSNAGITGRSDCSNSITAIDSGDLKRVFEVNVFGAFYAAKHAAKVMIPRKKGSIVFTASIASVSNAGWAHPYAASKNAVVGLMKNLCVELGKHGIRVNCVSPYAVGTPMLTRAMRMEKEKAEEIYLEAANLKGVVLKEKDVAEATLFLASDESKYVSGVNLVVDGGYTTTNSSSKQAFTKFSFNV

SEQ ID NO: 59818 - DNA, 849 bp, Glycine max
  CDS (1)..(849)
atgaatgccatagcagcagaacaagtgctggagccatggcacaagctagacgacaaagtcgttttggtgacgggtgcttcctcggggctcgggcgagatttctgcatcgacctcgccaaagctggctgctgtgtcgtcgcggcagctcgtcgcctcgatcgcctcacttccctctgccacgaaatcaaccaccgatggccctcgaacgtcggaatccaccgcgcggtggcggtggagcttgatgtcgccgccgatggccccgccatcgacagggctgtgcagaaggcctgggacgcctttggccgcgttgattccttgattaacaacgctggtgtcagaggaagtgttaaatcacccttgaaattgtctgaagaggaatgggatcatgtcttcaagactaacctaactggttgttggttggtgtcaaaatatgtatgcaaacgcatgtgtgatatccagcttaagggatcaattattaatatttcttcagtttctggtttaaatcgggggcaattgcctggagctgctgcatatgcatcttcgaaggcaggggtaaacatgctgactaaggtcatggctatggaattggggatgcacaaaattagagtaaattccatatcccctggaattttcaaatctgaaataactgaaaatttattacaaaaagattggctgaatgatgtggtcaggaaaataatgcctttgagaagattaggtacttcagatccagcattaacatctctagctcgttatcttattcatgattcttctgagtacgtcacgggcaacaattttattgtcgattatggaggcaccttaccaggtgtaccaatttattcttctctgtaa

SEQ ID NO: 59819 - protein, 282 aa, Glycine max
MNAIAAEQVLEPWHKLDDKVVLVTGASSGLGRDFCIDLAKAGCCVVAAARRLDRLTSLCHEINHRWPSNVGIHRAVAVELDVAADGPAIDRAVQKAWDAFGRVDSLINNAGVRGSVKSPLKLSEEEWDHVFKTNLTGCWLVSKYVCKRMCDIQLKGSIINISSVSGLNRGQLPGAAAYASSKAGVNMLTKVMAMELGMHKIRVNSISPGIFKSEITENLLQKDWLNDVVRKIMPLRRLGTSDPALTSLARYLIHDSSEYVTGNNFIVDYGGTLPGVPIYSSL

SEQ ID NO: 59820 - DNA, 1077 bp, Zea mays; identical to SEQ ID NO: 40625
  CDS (1)..(1077)

SEQ ID NO: 59821 - protein, 358 aa, Zea mays; identical to SEQ ID NO: 40626

SEQ ID NO: 59822 - DNA, 843 bp, Zea mays
  CDS (1)..(843)
atgtcgtcggcggggccaccgccgccgctgccgccgtggagcaggctggaggggcaggtggtgctggtgacgggcgcttcctccggcatcggacgcgacttctgcctcgacctggcgcgcgccggctgccgcgtcgtcgccgccgcccgccgcgccgatcgtctccgctcgctctgcgacgagatcaacccctccgctgcctcccgagccccccgcgcggtggctgtggaggtcgacgtcgccgccggtggttcggccctggaggcggcggtgcagaaggcctgggacgcctttggccgtatcgacgccttggtcaacaacgccggcatacgaggtgcagtgcattctccattagattggcccgaggatgagtgggacagaatcatcaagacgaaccttaccggatcatggctcgtggccaaacatgtctgtcgacgcatgcgtgatgccaagctgaagggttcagtggttaacatcacctctattgctggccttaaccgtgggcatctgcctggctccacgggatacgcatcctcaaaggctgctgtgcattatgccaccaagattatggctttggaattgggcgcggatcgcatcagagtgaactcgattgcacctggactcttcaaatcagagataactgctcctctgtttcaaaagaggtggttgagcaccgttgcttcaaagatagtgccgcttaaggagcatggcgctactgatcctgcattgacgtcgctggtccgttttctgatccatgaagcatcgtcgtatgtgactggcaacatcttcattgtagactcaggtgccaccatacctggtgttccgatattctcatccctgtaa

SEQ ID NO: 59823 - protein, 280 aa, Zea mays
MSSAGPPPPLPPWSRLEGQVVLVTGASSGIGRDFCLDLARAGCRVVAAARRADRLRSLCDEINPSAASRAPRAVAVEVDVAAGGSALEAAVQKAWDAFGRIDALVNNAGIRGAVHSPLDWPEDEWDRIIKTNLTGSWLVAKHVCRRMRDAKLKGSVVNITSIAGLNRGHLPGSTGYASSKAAVHYATKIMALELGADRIRVNSIAPGLFKSEITAPLFQKRWLSTVASKIVPLKEHGATDPALTSLVRFLIHEASSYVTGNIFIVDSGATIPGVPIFSSL

SEQ ID NO: 59824 - DNA, 762 bp, Zea mays
  CDS (1)..(762)
atggatgtcaagtgccggcgtctggaggggaaggtggccatcgtgacggcgtccacgatggggatcggcctcgccatcgccgagcgcctcggtctggagggcgccgccgtcgtcatctcctcccgcaagcagaagaacgtgaacgaggcggtggaggggctcagggccaagggtatcaccgcggttggtgccgtctgccacgtctccgacgcacagcagcgcaagagcctcatcgagacggccgtcaagagctttgggcacatagatatccttgtctccaatgctgccgcaaatccttctgtagatagcatacttgaaatgaaagagtctgttctcgataagctgtgggatattaacgtcaaggcttctatccttcttattcaggatgctgctcctcacctacggaaggggtcatctgtgattattatttcttcaattgctggttacaatccagaacaaggattgacaatgtatggtgtcacaaagactgctctctttggtctcacgaaggctcttgctggtgagatgggacccgatactcgtgttaactgtatagcccctggttttgttcctacacggtttgctagtttcctcacagaaaatgagaccattaggaaagagcttaacgagaggaccaagcttaagagattgggtactgtggaagacatggctgcggctgcggcttttctggcgtctgacgacgcatcatacattacggctgaaaccattgttgttgctggaggggtgcagtctaggctgtaa

SEQ ID NO: 59825 - protein, 253 aa, Zea mays
MDVKCRRLEGKVAIVTASTMGIGLAIAERLGLEGAAVVISSRKQKNVNEAVEGLRAKGITAVGAVCHVSDAQQRKSLIETAVKSFGHIDILVSNAAANPSVDSILEMKESVLDKLWDINVKASILLIQDAAPHLRKGSSVIIISSIAGYNPEQGLTMYGVTKTALFGLTKALAGEMGPDTRVNCIAPGFVPTRFASFLTENETIRKELNERTKLKRLGTVEDMAAAAAFLASDDASYITAETIVVAGGVQSRL

SEQ ID NO: 59826 - DNA, 939 bp, Zea mays
  CDS (1)..(939)
atggccgctgccacagccgccgccgccgcgctcgcctccccggcgggcctctccacatcgctggcgcgccgcggcctcgtcagcttcgcacccgcgctccgccccggccctgaccgcagctctcgcgccgtcgccctcctcggtgtacgaactcatgtcacggctgttgatcaagccattgtaaaaggtgatacaaagttggaaggtcctgtggttgttgttactggtgcttccagggggattggaaaagccactgcattggctcttggaaaagcaggctgcaaggtcttggtgaattatgctcgatcttcaaaggaggctgaagaagtctccaaggagattgaagcatctggaggccaggccattacctttggaggagatgtttccaaagaggctgatgttgaatctatgataaaagtggctgttgatacatggggaacgattgatgtactagtaaataatgcaggaatcacacgggacacattgttgatgagaatgaagaaatcacagtggcaagatgtgattgatttgaatcttacaggcgttttcctttgcacgcaggctgcaacaaaagtaatgatgaagaagaaaaagggaagaattatcaatatagcatcggttgttggtcttactggtaatgctggacaagctaattatgctgctgccaaggctggggttattgggttcacaaaaacagttgctagggagtatgccagcagaaatattaatgcaaacgttatcgctcctggatttattgcttcagatatgactgctgaacttggtgaagagttagagaagaaaattctgtcaactattcctttagggcgctatggtcggccagaggatgtagcaggcctggtggaattcttagccctcagccctgctgcaagctacatcactggacaggtcctcaccatcgatggaggaatggtaatgtaa

SEQ ID NO: 59827 - protein, 312 aa, Zea mays
MAAATAAAAALASPAGLSTSLARRGLVSFAPALRPGPDRSSRAVALLGVRTHVTAVDQAIVKGDTKLEGPVVVVTGASRGIGKATALALGKAGCKVLVNYARSSKEAEEVSKEIEASGGQAITFGGDVSKEADVESMIKVAVDTWGTIDVLVNNAGITRDTLLMRMKKSQWQDVIDLNLTGVFLCTQAATKVMMKKKKGRIINIASVVGLTGNAGQANYAAAKAGVIGFTKTVAREYASRNINANVIAPGFIASDMTAELGEELEKKILSTIPLGRYGRPEDVAGLVEFLALSPAASYITGQVLTIDGGMVM

SEQ ID NO: 59828 - DNA, 1011 bp, Zea mays
  CDS (1)..(1011)
atgcacgctagcctcgcctcctacgccgcggcagctatgccggcgctggacctccgccccgagatagcgcacgcgcaccagcccgtcatgtcgccctctcaccacggctgggacggcaatggcgccacagccgtgcccacaccgatgcccaagaggctggacgggaaggtggccattgtgacgggcggcgcgcgcgggatcggcgaggccatcgtgcggctgttcgccaagcacggggcccgggtggtgatcgcggacatcgacgacgccgcgggggaggcgctggcgtcggcgctgggcccgcaggtcagcttcgtgcgctgcgacgtgtccgtggaggacgacgtccggcgcgccgtggactgggcgctgtcgcgccacggcggccgcctcgacgtctactgcaacaacgccggggtgctgggccgccagacgcgcgccgccaggagcatcctgtccttcgacgcggccgagttcgaccgcgtgctccgcgtcaacgcgctgggcgccgcgctcgggatgaagcacgcggcgcgcgccatggcgccgcgccgcgcggggagcatcgtctccgtcgccagcgtcgcggccgtgctgggcggcctcggcccgcacgcctacaccgcctccaagcacgccatcgtcgggctcaccaagaacgccgcctgcgagctgcgcgcgcacggggtccgggtcaactgcgtctcgcccttcggcgtcgccacgcccatgctcatcaacgcctggcgccagggacacgacgacaccaccgccgacgccgaccgagacctcgacctcgacctcgacgtcaccgtgcccagcgaccaggaggtggagaagatggaggaggtggtcaggggcctggccacgctcaagggccccacgctcaggcccagggacatcgccgaggcggtgctcttcctggccagcgacgaggccaggtatatatcgggccacaacctcgtcgtggacggcggcgtcaccacatccaggaacctcatcggcttgtga

SEQ ID NO: 59829 - protein, 336 aa, Zea mays
MHASLASYAAAAMPALDLRPEIAHAHQPVMSPSHHGWDGNGATAVPTPMPKRLDGKVAIVTGGARGIGEAIVRLFAKHGARVVIADIDDAAGEALASALGPQVSFVRCDVSVEDDVRRAVDWALSRHGGRLDVYCNNAGVLGRQTRAARSILSFDAAEFDRVLRVNALGAALGMKHAARAMAPRRAGSIVSVASVAAVLGGLGPHAYTASKHAIVGLTKNAACELRAHGVRVNCVSPFGVATPMLINAWRQGHDDTTADADRDLDLDLDVTVPSDQEVEKMEEVVRGLATLKGPTLRPRDIAEAVLFLASDEARYISGHNLVVDGGVTTSRNLIGL

SEQ ID NO: 59830 - DNA, 957 bp, Zea mays
  CDS (1)..(957)
atggccaccgccgccgccaccgcagcagcagcagcagtctcctccccggctgccccacgagcagccggggccgccgccgcctcccgccgggggttcgtcacgtttggtggaggcgccgcccgcttctctcccacgctgcggtccggccgtgggttctctggtgtgcaaacccatgttgccgctgttgaacaagcaattgtaaaagatgctaccaagctggaagctccagttgttgttgttacaggtgcatctagagggattggtaaggcaactgctctagcccttggaaaagcaggatgcaaggttctggtaaactatgcccggtcctcgaaagaggctgaagaggtctccaaagagattgaagcatctggtggtgaggctatcaccttcggaggagatgtttcaaaagaagctgatgtagagtctatgatgaaagcagctctagataaatggggaacaatagatgtgctggtaaataatgcagggattacacgagacacattgttgatgaggatgaagaaatctcagtggcaagacgtaattgatctgaatcttactggtgtcttcctttgtacacaggctgcaacaaaagtaatgatgaaaaagagaaagggaaaaattatcaacattgcatctgtagttggtcttactggcaatgttggccaagctaattatagcgcagccaaggctggagtgattggtttcacaaaaacagttgccagggagtatgcaagcagaaatatcaatgtgaatgctattgcaccagggttcattgcatctgatatgactgccgaacttggagaagagcttgagaagaaaatcttgtcaaccattccgttagggagatatggccaaccagaggaagttgcagggttggtcgagttcctggcccttaaccccgcagctagctatatgactggacaggtgcttacaattgacggagggatggtaatgtaa

SEQ ID NO: 59831 - protein, 318 aa, Zea mays
MATAAATAAAAAVSSPAAPRAAGAAAASRRGFVTFGGGAARFSPTLRSGRGFSGVQTHVAAVEQAIVKDATKLEAPVVVVTGASRGIGKATALALGKAGCKVLVNYARSSKEAEEVSKEIEASGGEAITFGGDVSKEADVESMMKAALDKWGTIDVLVNNAGITRDTLLMRMKKSQWQDVIDLNLTGVFLCTQAATKVMMKKRKGKIINIASVVGLTGNVGQANYSAAKAGVIGFTKTVAREYASRNINVNAIAPGFIASDMTAELGEELEKKILSTIPLGRYGQPEEVAGLVEFLALNPAASYMTGQVLTIDGGMVM

SEQ ID NO: 59832 - DNA, 939 bp, Zea mays
  CDS (1)..(939)
atggccgctgccacagccgccgccgccgcgctcgcctccccggcgtgcctctccacatcgctggcgcgccgcggcctcgacagcttcgcacccgcgctccgccccggccctgaccgcagctctcgcgccgtcgccctcctcggtgtacgaactcatgtcacggctgttgatcaagccattgtaaaaggtgatacaaagttggaaggtcctgtggttgttgttactggtgcttccagggggattggaaaagccactgcattggctcttggaaaagcaggctgcaaggtcttggtgaattatgctcgatcttcaaaggaggctgaagaagtctccaaggagattgaagcatctggaggccaggccattacctttggaggagatgtttccaaagaggctgatgttgaatctatgataaaagtggctgttgatacatggggaacgattgatgtactagtaaataatgcaggaatcacacgggacacattgttgatgagaatgaagaaatcacagtggcaagatgtgattgatttgaatcttacaggcgttttcctttgcacgcaggctgcaacaaaagtaatgatgaagaagaaaaagggaagaattatcaatatagcatcggttgttggtcttactggtaatgctggacaagctaattatgctgctgccaaggctggggttattgggttcacaaaaacagttgctagggagtatgccagcagaaatattaatgcaaacgttatcgctcctggatttattgcttcagatatgactgctgaacttggtgaagagttagagaagaaaattctgtcaactattcctttagggcgctatggtcggccagaggatgtagcaggcctggtggaattcttagccctcagccctgctgcaagctacatcactggacaggtcctcaccatcgatggaggaatggtaatgtaa

SEQ ID NO: 59833 - protein, 312 aa, Zea mays
MAAATAAAAALASPACLSTSLARRGLDSFAPALRPGPDRSSRAVALLGVRTHVTAVDQAIVKGDTKLEGPVVVVTGASRGIGKATALALGKAGCKVLVNYARSSKEAEEVSKEIEASGGQAITFGGDVSKEADVESMIKVAVDTWGTIDVLVNNAGITRDTLLMRMKKSQWQDVIDLNLTGVFLCTQAATKVMMKKKKGRIINIASVVGLTGNAGQANYAAAKAGVIGFTKTVAREYASRNINANVIAPGFIASDMTAELGEELEKKILSTIPLGRYGRPEDVAGLVEFLALSPAASYITGQVLTIDGGMVM

SEQ ID NO: 59834 - DNA, 915 bp, Zea mays; identical to SEQ ID NO: 40627
  CDS (1)..(915)

SEQ ID NO: 59835 - protein, 304 aa, Zea mays; identical to SEQ ID NO: 40628

SEQ ID NO: 59836 - DNA, 843 bp, Zea mays
  CDS (1)..(843)
atgtcgtcggcggggccaccgccgccgctgccgccgtggagcaggctggaggggcaggtggtgctggtgacgggcgcttcctccggcatcggacgcgacttctgcctcgacctggcgcgcgccggctgccgcgtcgtcgccgccgcccgccgcgccgatcgtctccgctcgctctgcgacgagatcaacgcctccgctgcctcccgagccccccgcgcggtggctgtggaggtcgacgtcgccgccggtggttcggccctggaggcggcggtgcagaaggcctgggacgcctttggccgtatcgacgccttggtcaacaacgccggcatacgaggtgcagtgcattctccattagattggcccgaggatgagtgggacagaatcatcaagacgaaccttaccggatcatggctcgtggccaaacatgtctgtcgacgcatgcgtgatgccaagctgaagggttcagtggttaacatcacctctattgctggccttaaccgtgggcatctgcctggctccacgggatacgcatcctcaaaggctgctgtgcattatgccaccaagattatggctttggaattgggcgcggatcgcatcagagtgaactcgattgcacctggactcttcaaatcagagataactgctcctctgtttcaaaagaggtggttgagcaccgttgcttcaaagatagtgccgcttaaggagcatggcgctactgatcctgcattgacgtcgctggttcgttttctgatccatgaagcatcgtcgtatgtgactggcaacatcttcattgtagactcaggtgccaccatacctggtgttccgatattctcatccctgtaa

SEQ ID NO: 59837 - protein, 280 aa, Zea mays
MSSAGPPPPLPPWSRLEGQVVLVTGASSGIGRDFCLDLARAGCRVVAAARRADRLRSLCDEINASAASRAPRAVAVEVDVAAGGSALEAAVQKAWDAFGRIDALVNNAGIRGAVHSPLDWPEDEWDRIIKTNLTGSWLVAKHVCRRMRDAKLKGSVVNITSIAGLNRGHLPGSTGYASSKAAVHYATKIMALELGADRIRVNSIAPGLFKSEITAPLFQKRWLSTVASKIVPLKEHGATDPALTSLVRFLIHEASSYVTGNIFIVDSGATIPGVPIFSSL

SEQ ID NO: 59838 - DNA, 762 bp, Zea mays
  CDS (1)..(762)
atggatgtcaagtgccggcgtctggaggggaaggtggccatcgtgacggcgtccacgatggggatcggcctcgccatcgccgagcgcctcggtctggagggcgccgccgtcgtcatctcctcccgcaagcagaagaacgtgaacgaggcggtggaggggctcagggccaagggtatcaccgcggttggtgccgtctgccacgtctccgacgcacagcagcgcaagagcctcatcgagacggccgtcaagagctttgggcacatagatattcttgtctccaatgctgccgcaaatccttctgtagatagcatacttgaaatgaaagagtctgttctcgataagctgtgggatattaacgtcaaggcttctatccttcttattcaggatgctgctcctcacctacggaaggggtcatctgtgattattatttcttcaattgctggttacaatccagaacaaggattgacaatgtatggtgtcacaaagactgctctctttggtctcacgaaggctcttgctggtgagatgggacccgatactcgtgttaactgtgtagcccctggttttgttcctacacggtttgctagtttcctcacagaaaatgagaccattaggaaagagcttaacgagaggaccaagcttaagagattgggtactgtggaagacatggctgcggctgcggcttttctggcgtctgacgacgcatcatacattacggctgaaaccattgttgttgctggaggggtgcagtctaggctgtaa

SEQ ID NO: 59839 - protein, 253 aa, Zea mays
MDVKCRRLEGKVAIVTASTMGIGLAIAERLGLEGAAVVISSRKQKNVNEAVEGLRAKGITAVGAVCHVSDAQQRKSLIETAVKSFGHIDILVSNAAANPSVDSILEMKESVLDKLWDINVKASILLIQDAAPHLRKGSSVIIISSIAGYNPEQGLTMYGVTKTALFGLTKALAGEMGPDTRVNCVAPGFVPTRFASFLTENETIRKELNERTKLKRLGTVEDMAAAAAFLASDDASYITAETIVVAGGVQSRL

SEQ ID NO: 59840 - DNA, 822 bp, Zea mays
  CDS (1)..(822)
atggccacggtggagacctcgggcacggcgatagggtcctccgggagatgggcactacacggcaagacagccctcgtcaccggcggcacccgcggcatcgggcgtgcggtagtggaggagctggcggcgctgggggcggccgtgcacacatgctcccggaaggcggaggagctcggcgagcgcatcaaggagtgggaggccaggggattcagcgttaccgggtccgtctgcgacctctccgagagggaccagcgggagcggttgctccgcgaggttgccgaccgcttcggcggcaagctcaacatcctcgtaaacaatgtaggaacaaacataaggaaaccaactactgagtttactgcagaggaatactcgtttctgatggctactaatcttgaatctgcatatcacttgtgccaaattgcacatcctcttttgaaattatctgggtcaggcagcattatattcatatcatctgttgctggagcgataggaatctttagtggaactatatatgctatgactaaaggtgccattaaccagctaaccaagaatttagcttgtgaatgggctaaggacaacataagagccaactctgtcgctccgtggtacatcaccacttcacttacggaaggaattttggcaaataagaactttgaggaacaagttgtgagtcgaactccgcttggacgtgtcggagaacctggagaagtatcggcacttgttgcttttctttgcatgccgggttccacttatattagcggccagacgattgcggtcgacggaggtatgactgtgaacgggttttaccctcccaagccctag

SEQ ID NO: 59841 - protein, 273 aa, Zea mays
MATVETSGTAIGSSGRWALHGKTALVTGGTRGIGRAVVEELAALGAAVHTCSRKAEELGERIKEWEARGFSVTGSVCDLSERDQRERLLREVADRFGGKLNILVNNVGTNIRKPTTEFTAEEYSFLMATNLESAYHLCQIAHPLLKLSGSGSIIFISSVAGAIGIFSGTIYAMTKGAINQLTKNLACEWAKDNIRANSVAPWYITTSLTEGILANKNFEEQVVSRTPLGRVGEPGEVSALVAFLCMPGSTYISGQTIAVDGGMTVNGFYPPKP

SEQ ID NO: 59842 - DNA, 792 bp, Zea mays; identical to SEQ ID NO: 40631
  CDS (1)..(792)

SEQ ID NO: 59843 - protein, 263 aa, Zea mays; identical to SEQ ID NO: 40632

SEQ ID NO: 59844 - DNA, 957 bp, Zea mays
  CDS (1)..(957)
atggccaccgccgccgccaccgcagcagcagcagcagtctcctccccggctgcgcgtggagcagccggggccgccgccgcctcccgccgggggttcgtcacgtttggtggaggcgccgcccgcttctctcccacgctgcggtccggccgtgggttctctggtgtgcaaacccatgttgctgctgttgaacaagcagttgtaaaagatgctaccaagctggaagctccagttgttgttgttacaggtgcatctagagggattggtaaggcaactgctctagcccttggaaaagcaggatgcaaggttctggtaaactatgcccggtcctcgaaagaggctgaagaggtctccaaagagattgaagcatctggtggtgaggctatcaccttcggaggagatgtttcaaaagaagctgatgtagagtctatgatgaaagcagctctagataaatggggaacaatagatgtgctggtaaataatgcaggaatcacacgggacacattgttgatgagaatgaagaaatcacagtggcaagatgtgattgatttgaatcttacaggcgttttcctttgcacgcaggctgcaacaaaagtaatgatgaagaagaaaaagggaagaattatcaatatagcatcggttgttggtcttactggtaatgctggacaagctaattatgctgctgccaaggctggggttattgggttcacaaaaacagttgctagggagtatgccagcagaaatattaatgcaaacgttatcgctcctggatttattgcttcagatatgactgctgaacttggtgaagagttagagaagaaaattctgtcaactattcctttagggcgctatggtcggccagaggatgtagcgggcctggtggaattcttagccctcagccctgctgcaagctacatcactggacaggtcctcaccatcgatggaggaatggtaatgtaa

SEQ ID NO: 59845 - protein, 318 aa, Zea mays
MATAAATAAAAAVSSPAARGAAGAAAASRRGFVTFGGGAARFSPTLRSGRGFSGVQTHVAAVEQAVVKDATKLEAPVVVVTGASRGIGKATALALGKAGCKVLVNYARSSKEAEEVSKEIEASGGEAITFGGDVSKEADVESMMKAALDKWGTIDVLVNNAGITRDTLLMRMKKSQWQDVIDLNLTGVFLCTQAATKVMMKKKKGRIINIASVVGLTGNAGQANYAAAKAGVIGFTKTVAREYASRNINANVIAPGFIASDMTAELGEELEKKILSTIPLGRYGRPEDVAGLVEFLALSPAASYITGQVLTIDGGMVM

SEQ ID NO: 59846 - DNA, 21 bp, Artificial sequence
  primer
atgaaaccagttgttcttatc

SEQ ID NO: 59847 - DNA, 20 bp, Artificial sequence
  primer
ttactcggtgctgaggcgtg

SEQ ID NO: 59848 - protein, 296 aa, Artificial sequence
  consensus sequence
  Variant (3)..(5): Xaa in position 3 to 5 is any amino acid
  Variant (7)..(7): Xaa in position 7 is any amino acid
  Variant (10)..(19): Xaa in position 10 to 19 is any amino acid
  Variant (21)..(61): Xaa in position 21 to 61 is any amino acid
  Variant (62)..(89): Xaa in position 62 to 89 is any or no amino acid
  Variant (91)..(93): Xaa in position 91 to 93 is any amino acid
  Variant (98)..(116): Xaa in position 98 to 116 is any amino acid
  Variant (117)..(124): Xaa in position 117 to 124 is any or no amino acid
  Variant (126)..(145): Xaa in position 126 to 145 is any amino acid
  Variant (146)..(153): Xaa in position 146 to 153 is any or no amino acid
  Variant (155)..(158): Xaa in position 155 to 158 is any amino acid
  Variant (160)..(169): Xaa in position 160 to 169 is any amino acid
  Variant (170)..(173): Xaa in position 170 to 173 is any or no amino acid
  Variant (175)..(177): Xaa in position 175 to 177 is any amino acid
  Variant (179)..(188): Xaa in position 179 to 188 is any amino acid
  Variant (189)..(189): Xaa in position 189 is any or no amino acid
  Variant (191)..(198): Xaa in position 191 to 198 is any amino acid
  Variant (199)..(201): Xaa in position 199 to 201 is any or no amino acid
  Variant (204)..(206): Xaa in position 204 to 206 is any amino acid
  Variant (208)..(211): Xaa in position 208 to 211 is any amino acid
  Variant (213)..(252): Xaa in position 213 to 252 is any amino acid
  Variant (253)..(287): Xaa in position 253 to 287 is any or no amino acid
  Variant (289)..(294): Xaa in position 289 to 294 is any amino acid
TGXXXGXIGXXXXXXXXXXGXXXXXXXXXXXXXXXXXXXXXXXXXXXXXXXXXXXXXXXXXXXXXXXXXXXXXXXXXXXXXXXXXXXXXDXXXNNAGXXXXXXXXXXXXXXXXXXXXXXXXXXXNXXXXXXXXXXXXXXXXXXXXXXXXXXXXIXXXXSXXXXXXXXXXXXXXYXXXKXXXXXXXXXXXAXXXXXXXXXXXVNXXXPXXXXTXXXXXXXXXXXXXXXXXXXXXXXXXXXXXXXXXXXXXXXXXXXXXXXXXXXXXXXXXXXXXXXXXXXXXXXXXXXGXXXXXXGG

SEQ ID NO: 59849 - protein, 20 aa, Artificial sequence
  protein pattern
  Variant (2)..(2): Xaa in position 2 is any or no amino acid
  Variant (4)..(5): Xaa in position 4 to 5 is any amino acid
  Variant (6)..(6): Xaa in position 6 is any or no amino acid
  Variant (8)..(8): Xaa in position 8 is Ile or Leu
  Variant (10)..(10): Xaa in position 10 is any amino acid
  Variant (11)..(11): Xaa in position 11 is Ala, Asp, Glu, Gly or Ser
  Variant (12)..(12): Xaa in position 12 is any amino acid
  Variant (13)..(13): Xaa in position 13 is Ala, Cys, Ser, Thr or Val
  Variant (14)..(19): Xaa in position 14 to 19 is any amino acid
TXGXXXGXGXXXXXXXXXXG

SEQ ID NO: 59850 - protein, 36 aa, Artificial sequence
  protein pattern
  Variant (2)..(2): Xaa in position 2 is Ala, Cys, Gly, Asn, Ser or Thr
  Variant (3)..(3): Xaa in position 3 is any amino acid
  Variant (4)..(4): Xaa in position 4 is Ala, Ser or Thr
  Variant (6)..(6): Xaa in position 6 is any amino acid
  Variant (7)..(7): Xaa in position 7 is Ala or Gly
  Variant (8)..(8): Xaa in position 8 is Ile, Leu, Met or Val
  Variant (9)..(15): Xaa in position 9 to 15 is any amino acid
  Variant (16)..(16): Xaa in position 16 is Ala, Cys, Gly or Ser
  Variant (17)..(26): Xaa in position 17 to 26 is any amino acid
  Variant (28)..(28): Xaa in position 28 is Ala, Cys, Gly, Asn, Ser, Thr or Val
  Variant (29)..(30): Xaa in position 29 to 30 is any amino acid
  Variant (32)..(35): Xaa in position 32 to 35 is any amino acid
  Variant (36)..(36): Xaa in position 36 is Ala, Gly, Ser or Thr
YXXXKXXXXXXXXXXXXXXXXXXXXXNXXXPXXXXX

SEQ ID NO: 59851 - DNA, 294 bp, Physcomitrella patens
  CDS (1)..(294)
atgcaagctataggtgctagtgagaaggtttttcagcttcttgagcttccaccgtgcccgcagctgtcttctgtaggtattgttcttcctcaggtgagaggacgcattcaatttgtcgacatctcattcagttatccgacccggccccaggctcatgtgctaaaaaatgtaaatttagacattaagcctggagaaattgtggctgtggttggcctgagtggtagtggcaaaagtactcttgtgagtttactcctacgtctttatgagcctacaaatgggacaggttgtggttaa

SEQ ID NO: 59852 - protein, 97 aa, Physcomitrella patens
MQAIGASEKVFQLLELPPCPQLSSVGIVLPQVRGRIQFVDISFSYPTRPQAHVLKNVNLDIKPGEIVAVVGLSGSGKSTLVSLLLRLYEPTNGTGCG

SEQ ID NO: 59853 - DNA, 3990 bp, Strongylocentrotus purpuratus
  CDS (1)..(3990)
atggtagagggtgacccacctgctgtgggtttctccaatggcaatggaacagtgcagatgaatggaaatggagctagctttgatggaccagccgtgatcgatgtgtcgcctgtacatgaagacgctccttctgctaagcatgcgagagactctcctccccccgcctacaatgatgttgatggaacgaaggaacaggaaaacggaggatctgtggaaggagagggtggagagaaggaagaaaagaaagagacaaaagtagtgggcacgtttgaagtgtttcgctttgcaactggtctagacgttgtgttcattctgctagctcttgtgatttctctgtgccacggagtggccttgcctgccgttcttctcctattcggagaagtcacagattctttcatcaccacagcctccgtgaacgtgacagacaatttggcagcctttgaggaatcagtggacagtattataactttctccatctactattcctacctgggttgtggagtactcgccctggcttactttcaggtggtgctgtgggacgtggcagcggagagacagattcacaaagtgagactccggtttttccatgccatcctccgtcaagagattgcctggtttgatgtccataaaggcggcgaactcaatacaagacttgcagatgacattgacaagatccgcaatggcattggagacaagcttggcatcatgctgcagtacacggccacgttcgttgctggcatcaccatcggcttcgtgaagagctggaagctcacccttgtcatcctggcagtctctctgatactaattgtacccctggttggatctacatctgtgattatccagcggatgaccaagcaagccctggatgcctatgctaaggccggggccattgcgggtgaggtcttctcaggcataaggactgtggtcgcattcaacggggaggagaaggagatggtcaggtactccagcaacttggaccaagctaaatcaaagacggtcaaaaaggattttgccacactacttgcccagggcttccttttcttctccatgttctccagctatgccattgccttctggtatggcacagttctgtatttagataatgaaattacacctggagatatcctaacgacattccttgctgtgctctttggtgcttttgccattggccaagcgggtccaaactatagtgacttcaccacagctcgggcagcagcatctagcatctgggaagtcatagaccagatccctaccatcgactgcttctcgaccgacggaaagaaggagaagattaccggacaggtgacctttgaaggggtccatttctcgtacccgtccagagcatcggtcaaggtgctcaatgggatcaacctgaaggtggacgttgggaagacggtggccatggttggcagcagtggatgcgggaagagcacctgcatccagctcattcagaggttctatgatgttgctgaaggcagcatcaaaattgacggcattgacatccgtgacctcaacgtgagctggcttcgggatcacatcggtgtcgtgagccaggaaccgatcctgtttgcgaccacgatcgaagagaacatccgctacggacgtcttgacgtcacccaggtagagattgagaaagccgccgaggaagccaacgcccatgaattcatctccaaacttccagagggttactccacattggttggagagcgaggagctcagctgtccggtggtcagaagcagaggatagccattgccagggcactggtcagaaaccctacaatcctactcctggacgaagccacatcggctctagacacggagagtgaggctaccgttcaactcgccctcgaaaaggctcagcatggtcgaaccaccctcgtcatcgctcaccgtctctcaaccatcttcaactctgacctcatctgcgctttcaaggagggcatcatctccgagcagggcactcacgaagagctgatgaagaacgagggcggtgtttatcacacgctcgtcatgaagcagggcatgaagaaagaggaggaggaggagaagaaagagaacgaggttccgctcgatgatgatgatgacgaagaggatgatagccaaggtgagaaggtctacagagcaggctctggaaagaagaagctgacacgggtgctatcacggacacagtcacagatgtctggagatgaagaaaaacaggatgaagacgagtatgagaaggagcttgagaagcatttcagcatgatgcgagtctggaagctcaacaccccagagtgtggtttcatcctccttggatgcattggggccgcaatcaatggagccgtccagccgggattcgctgtcgtcttcagtaaaattcttggggcttacagtattacagatagagctgccctctttgatgaagtgactatatactgtgttctgtttgctgcccttggcctactctccttactcgccagtatcatacagggtgttggatttggcaagtctggaggtgagctgacactgaggcttcgtaacatgatgttcagagctatcctcagacagaacatttctttctttgatgacaagaggaatggaaccggtgccttgacaactaaattggcgacggatgtctctcttatacaaggggtgactggagtaagacttggtatgatctttgaagtgctcttcaacatcggtgttggtatcgtgatctcgttcgtctacagctggcagatcgcttgtctccttctctttgccttcctccccatcctgtccttggccggtatgattggttggaagatcctccagggtaactccatcggaacagccggtagccaggctgaggttgggaagcttgtctccgagtgtattgagaacatacgtaccgttcagtccctcaaccgaggacagaccttccatctgaagtactgtgaactccagaaccctccgtacaaacaagggatcaagggagctttcgccgccggtcttgcgttcggcttctctcaagctaccatcttctttgcatactcagctactttccggcttggtgcccaccttgtgggtactggagacctcaccttccctgatgttttcctgtctttctctgccttgatgtttggtgcctttggtctcggtcgcgctgcaggatctgtgccagacttctccaaggctaaggttgcaacaggagagctcttctatttggtcgaccgtagtccagacattgacactttcagcgatgatggggagaagccggcgagctacggtggatcggttagcctcaacaacgttcggttccgctacccgacccgtcctgatgtccctgtcctgagggggctgtccgtctcggtggaccctggcgagaccctggctctggtcggcagcagcggttgcggcaagagcaccaccatacagctgatggagcgcttctatgaccctcactcagggactgtgatgtttgactcccatgacgcctcgctgctcaacactcgctggcagcgcgcccaggtgggcctcgtatcccaggaaccctgcctcttcgacatgtccatcgcagagaacatcaagtacggcgacaactctcgggaagtctccatcgaagactgcatcgaagcggccaagaagtccaacatccatgactttgtggactctcttcccatgaaatacgacaccaacgttggatccaagggcacccagctgtccggcggtcagaagcagaggatagccattgcaagggcactggtcaggaaccccaaggtcctgctcctggacgaagccacatcagccctggacactgaaagcgaaagggttgtacaagatgccctggatgaagccaagaagggccggacctgcatcaccatcgcccatcgcctctcaaccatccacaatgcagaaaagatcgccgtcatccgcgaaggaaagctcgccgagtttggcaagcatgaagagctgatggctatgaagcagcaatattattccctctacactgcccagtctatgcagcattaa

SEQ ID NO: 59854 - protein, 1329 aa, Strongylocentrotus purpuratus
MVEGDPPAVGFSNGNGTVQMNGNGASFDGPAVIDVSPVHEDAPSAKHARDSPPPAYNDVDGTKEQENGGSVEGEGGEKEEKKETKVVGTFEVFRFATGLDVVFILLALVISLCHGVALPAVLLLFGEVTDSFITTASVNVTDNLAAFEESVDSIITFSIYYSYLGCGVLALAYFQVVLWDVAAERQIHKVRLRFFHAILRQEIAWFDVHKGGELNTRLADDIDKIRNGIGDKLGIMLQYTATFVAGITIGFVKSWKLTLVILAVSLILIVPLVGSTSVIIQRMTKQALDAYAKAGAIAGEVFSGIRTVVAFNGEEKEMVRYSSNLDQAKSKTVKKDFATLLAQGFLFFSMFSSYAIAFWYGTVLYLDNEITPGDILTTFLAVLFGAFAIGQAGPNYSDFTTARAAASSIWEVIDQIPTIDCFSTDGKKEKITGQVTFEGVHFSYPSRASVKVLNGINLKVDVGKTVAMVGSSGCGKSTCIQLIQRFYDVAEGSIKIDGIDIRDLNVSWLRDHIGVVSQEPILFATTIEENIRYGRLDVTQVEIEKAAEEANAHEFISKLPEGYSTLVGERGAQLSGGQKQRIAIARALVRNPTILLLDEATSALDTESEATVQLALEKAQHGRTTLVIAHRLSTIFNSDLICAFKEGIISEQGTHEELMKNEGGVYHTLVMKQGMKKEEEEEKKENEVPLDDDDDEEDDSQGEKVYRAGSGKKKLTRVLSRTQSQMSGDEEKQDEDEYEKELEKHFSMMRVWKLNTPECGFILLGCIGAAINGAVQPGFAVVFSKILGAYSITDRAALFDEVTIYCVLFAALGLLSLLASIIQGVGFGKSGGELTLRLRNMMFRAILRQNISFFDDKRNGTGALTTKLATDVSLIQGVTGVRLGMIFEVLFNIGVGIVISFVYSWQIACLLLFAFLPILSLAGMIGWKILQGNSIGTAGSQAEVGKLVSECIENIRTVQSLNRGQTFHLKYCELQNPPYKQGIKGAFAAGLAFGFSQATIFFAYSATFRLGAHLVGTGDLTFPDVFLSFSALMFGAFGLGRAAGSVPDFSKAKVATGELFYLVDRSPDIDTFSDDGEKPASYGGSVSLNNVRFRYPTRPDVPVLRGLSVSVDPGETLALVGSSGCGKSTTIQLMERFYDPHSGTVMFDSHDASLLNTRWQRAQVGLVSQEPCLFDMSIAENIKYGDNSREVSIEDCIEAAKKSNIHDFVDSLPMKYDTNVGSKGTQLSGGQKQRIAIARALVRNPKVLLLDEATSALDTESERVVQDALDEAKKGRTCITIAHRLSTIHNAEKIAVIREGKLAEFGKHEELMAMKQQYYSLYTAQSMQH

SEQ ID NO: 59855 - DNA, 1038 bp, Oryza sativa (japonica cultivar-group)
  CDS (1)..(1038)
atggcttatggaggctggagcttgagtttgaactatctataccattctactcaggtcattgcagtgttgattggagggatatccatcatggctgggaagctaactgctgagcaactgacaaaattcatactctatgctgagtggctaattttgtcaacatggtggattggagacaactggtcctctctgatgcagtctgttggagcaagtgaaaaggtcttccgtttgatggatctacttcctagcagacagcttagttctgaaggccacaggttacagaagttggaaggccggattcagtatgccgatgtatcattttcatatccatcaagacctacggtaccaattctgggtggattgaatctaacacttcatccaaatgaagtagttgcaattgttggtcttagtggaagtggaaagagtactgtagttaacctactacttcggctatatgaacctacagatgggcaaatattagtagatggtgtcccactcagtgagcttgacatcagatggttcagggaaaggattggttttgttggacaggaacctaggctattccgaatggatattagttctaatattaggtatggttgtccaagagaagttagcaatgaagaagtggagtgggctgcaaagcaggcatatgctcacgatttcataatgtctctccctgatggttataacaccattgtcgatgatgctcttcttagtggaggccaaaagcaacgcgttgctattgcgagggcccttcttagggacccatccatcttggtattagatgaagccactagtgcacttgatgctgagagtgaacattatgtgaagaatgtaatcacaaagtttagtactgatcctaaggctagaagaaccgtgatcatcatagctcacagactatctacaattcaagcggctgatagaattatcgtgatggaaaatggtaatattgtggaggatggaaaccacagcgagcttattaataagcacgatggtttgtattccagattagctaggcgacaaaacgacgccctcgattag

SEQ ID NO: 59856 - protein, 345 aa, Oryza sativa (japonica cultivar-group)
MAYGGWSLSLNYLYHSTQVIAVLIGGISIMAGKLTAEQLTKFILYAEWLILSTWWIGDNWSSLMQSVGASEKVFRLMDLLPSRQLSSEGHRLQKLEGRIQYADVSFSYPSRPTVPILGGLNLTLHPNEVVAIVGLSGSGKSTVVNLLLRLYEPTDGQILVDGVPLSELDIRWFRERIGFVGQEPRLFRMDISSNIRYGCPREVSNEEVEWAAKQAYAHDFIMSLPDGYNTIVDDALLSGGQKQRVAIARALLRDPSILVLDEATSALDAESEHYVKNVITKFSTDPKARRTVIIIAHRLSTIQAADRIIVMENGNIVEDGNHSELINKHDGLYSRLARRQNDALD

SEQ ID NO: 59857 - DNA, 1800 bp, Mesorhizobium loti MAFF303099
  CDS (1)..(1800): transl_table=11
atggcgcaatcaagcagcgcagacgagcgccgacgctcgctcaagccgctcaggcgcctgttcccctatatcgctggatatcgcacgctggtcgtcggcgccctcatctcgctggccatcgcggcggcaacgacattgacgctgccgctggccgtacggcggatgatcgatcacggtttctcgtcgtccagcaccactttcatcgccgaatatttcgccgcactggtggcgatggccgccgtgctggcggcggcatccgccggccgctactatttcgtcatcacgcttggcgagcgcgtcgtcgccgatatccgccgcgatgtctttgcccatgtgacgacgctgtcgcccgccttcttcgacaccgcccagtcgggcgagatcgtgtcacggcttgccgccgacaccacgcagatcaaatcggcggtcggcgccaccgcttcggtcgcgctgcgcaacgtcatcctcggtctcggcgcggtgggaatgatggtcgtgaccagtccaaaactgtccggcctggtcattgcagccattcccgtcatcgtgctgccgctggtcgccttcggccgttcggtgcgccgcaagtcgaggcaggcgcaggacacgcttgccgaggcgacagcctatgccagcgagcaaatcggcgcggtgcgcacgctgcaggccttcaccaatgagaagctggtcaccgggcggttttcgggcgcggttgaggctgccttcgaggcggcgcgcgcctcgatcttcgcccgctccttcctcaccttctttgccatcttcaccatcttctcgtccgttgtggcggtgctctggttcggctcgcgcgacgtgctcgaaggcacgatatcgccgggcacgctcggccagttcctgctctattcggtgttcgccgccggcgcgctcggcgcgctgtcggaggtctggggcgaacttgcccaggcagcgggtgcggccgagcggctgaccgagatcctggccgagaacccggcgatccaggcgccggccgagccgaagccgctgcctacggtcgccaagggcgcgatcgtcttcgacgacgtctccttctcctatccggcgcggcccgaccgggccgccgtccacggcttgagtttccaggtcatgcctggcgagacggtagccatcgtcggtccctcgggggccggcaagagcacggtcttctcgctgatcctgcgcttctacgatcccgaaaccggcaagatcctgatcgatggcgtcgacgtgcgcgaagccgatccggtttcggtgcgcgagcgcatcgccatcgtgccgcaggacgtcaccatcttcgcggcgagcgcgcgcgacaatataggcttcggccggccgggcgcaggcaataccgaaattgaggcggcggcgaaggacgcgctggccgacgaattcatcctcaagctcgaacacggctatgacagccaggtcggcgagcgcggcgtgacgctgtccggcggccagcgccagcgcgtggccatcgcccgcgccatcctgcgcgacgcaccgatcctgctgctcgacgaagccacctcggcactggacgccgaaagcgagacgctggtgcagacggcgctagagcggctgatgcagggccgcaccacgatcgtcatcgcccaccggctggcgacggtgctgaaggccgacaggatcctggtgatggatggcggccgcatcgtcgaggaaggcacgcaccagagcctggtcgccaagggcggcatctatgccaggctggccaagctgcagttcgagaccggcgccagcgccttcaggggcgcggcggagtag

SEQ ID NO: 59858 - protein, 599 aa, Mesorhizobium loti MAFF303099
MAQSSSADERRRSLKPLRRLFPYIAGYRTLVVGALISLAIAAATTLTLPLAVRRMIDHGFSSSSTTFIAEYFAALVAMAAVLAAASAGRYYFVITLGERVVADIRRDVFAHVTTLSPAFFDTAQSGEIVSRLAADTTQIKSAVGATASVALRNVILGLGAVGMMVVTSPKLSGLVIAAIPVIVLPLVAFGRSVRRKSRQAQDTLAEATAYASEQIGAVRTLQAFTNEKLVTGRFSGAVEAAFEAARASIFARSFLTFFAIFTIFSSVVAVLWFGSRDVLEGTISPGTLGQFLLYSVFAAGALGALSEVWGELAQAAGAAERLTEILAENPAIQAPAEPKPLPTVAKGAIVFDDVSFSYPARPDRAAVHGLSFQVMPGETVAIVGPSGAGKSTVFSLILRFYDPETGKILIDGVDVREADPVSVRERIAIVPQDVTIFAASARDNIGFGRPGAGNTEIEAAAKDALADEFILKLEHGYDSQVGERGVTLSGGQRQRVAIARAILRDAPILLLDEATSALDAESETLVQTALERLMQGRTTIVIAHRLATVLKADRILVMDGGRIVEEGTHQSLVAKGGIYARLAKLQFETGASAFRGAAE

SEQ ID NO: 59859 - DNA, 3684 bp, Arabidopsis thaliana
  CDS (1)..(3684)
atgcaaccgtcaaatgatccagcaatcgtggacatggcagcggcggagaaggagaagaagcggccaagtgtatcatttcttaagctcttctcatttgctgatttttacgattgcgttctgatggctcttggatccattggtgcttgcattcacggagcctccgttccagttttcttcatcttctttggcaaactcatcaacatcatcggtcttgcttacctcttcccacaagaagcttctcacaaagtcgccaagtactcgttggattttgtatatctgagtgtggtgatactcttttcatcatggttagaggttgcatgttggatgcatacgggagagagacaagcagcgaagattagaaaagcttatttgcggtcaatgttaagccaagacataagcttattcgacaccgagatttccaccggagaagtcatctccgccatcacctccgagatccttgttgtccaagacgctatctccgagaaggtagggaatttcatgcacttcataagccggttcatagccggttttgcgatcgggttcgcgagcgtatggcaaataagtctcgtcactctctccatagtcccattcattgctctcgccggcggaatttacgcttttgtcagcagcggacttatcgtccgtgtccggaaatcatacgtcaaggccaacgagatcgcagaagaggtgatcgggaatgtgaggaccgtacaagcgtttacgggagaagaaaaggcggtgagttcgtaccaaggagctttgaggaacacttacaattacgggagaaaagccggtttagccaaaggactagggcttggttcgttgcattttgtcctgtttttgtcttgggctttgctcatttggttcacaagcatcgttgttcacaagggaatcgctaatggtggcgaatctttcacgaccatgctcaatgttgtcatcgctggcttgtctcttggtcaggcggctcctgacatttccacattcatgcgagccagtgctgctgcgtatccgatttttcagatgattgaacggaacacggaggataaaacaggtcgtaaactcgggaatgtaaacggagacattctattcaaagacgtgactttcacatacccctctcgccctgatgtggtgatctttgacaagctaaacttcgtgatccctgcggggaaagtcgtggctcttgttggaggaagcgggtctgggaaaagcaccatgatatccttaattgaacgattctacgagcctaccgatggagcggtgatgctggatgggaacgatatcagatacttggatcttaagtggttaagaggtcatattggtttggttaatcaagagcctgtcctgtttgcaaccacgattcgcgagaacattatgtatggtaaagacgatgccacctctgaggaaattaccaatgctgcaaagctctcggaagccatctcattcatcaacaacctaccggaaggattcgaaactcaggtaggtgagagaggaattcagctatctggcgggcagaagcagaggatcagtatttctagggcgatagtgaagaatccatcgatcctcttactcgatgaggcaacaagcgcactagatgcagagtcagagaaaatcgtgcaggaagctttggacagggtgatggttgggagaacaacggtcgtggtggctcatagactctccactgtaagaaacgctgacatcatagccgttgttggaggagggaagatcattgagtccggaagccacgacgaactcatatctaaccctgatggagcttattcttctcttcttcgtatccaagaagctgccagccctaacttgaaccacactccaagcttaccagtcagtacaaaacccttgccggaactaccaatcacggagacgacctcgtccattcatcaatcagtaaaccaaccagatacgaccaaacaggccaaagtaacggtgggacgtctttactctatgatccgtccggattggaaatacggattatgtgggacgttaggttcctttattgcgggatctcaaatgccgcttttcgcgcttggtatcgcacaggctttagtatcttattacatggactgggagacaactcaaaacgaggtcaaaagaatctctatcctcttctgttgtggctccgtcatcactgtcatcgtacataccattgagcataccacctttggtattatgggtgagcgtctcactctccgagtccgacaaaagatgttttcagcgatcttgaggaatgaaatcgggtggtttgataaggttgataacactagttcgatgttggcatcgcggcttgaaagtgatgcgactttgcttagaaccatcgtggtcgatagatcgacaattctacttgagaatttaggtcttgttgtgactgctttcatcatttcttttatactcaactggcgtctcactcttgttgtcttggccacataccccttgattataagcggtcatatcagcgagaaaattttcatgcaaggctatggaggaaacttgagtaaagcgtatttaaaggctaacatgttggctggagagtctattagcaacatccgaaccgtggtcgccttttgtgcagaggagaaggttttagacctttattccaaagagcttctagaaccttcagaacgttctttcaggcgtggacagatggccgggattttgtacggtgtttctcaattcttcatcttctcctcctacggccttgccctctggtacggatcgattttgatggagaaaggattatcaagtttcgaatctgtgatgaaaacattcatggttttgatagtaacggcgttagtgatgggtgaagtgttggctctagccccagatcttcttaaaggaaaccagatggttgtttcggttttcgagctattggatcgaagaacacaggttgttggtgatactggtgaggagctgagtaatgtggaaggcactatagagctcaaaggtgttcatttcagttatccttcacggcctgatgtgactattttcagcgatttcaatctactagttccttctggcaaaagcatggcgcttgtgggacaaagcggatctggaaaaagttcggttctttcgcttgttctccggttctacgatcctacagccggaataatcatgatagacgggcaagacatcaagaaactgaagttgaaatcactgcgaagacacattggtctggttcaacaagaaccggctctgtttgcaacgactatctatgagaacatcttgtatggtaaagaaggagcttctgaatctgaagtcatggaagcagctaagcttgcaaatgctcacagtttcatcagctctctccctgaaggttactcaaccaaagtcggtgaacgtggcattcagatgtcaggcggccagagacagagaattgctatagctagagccgtcctcaagaacccagagattctgcttcttgatgaagccacaagcgccttagatgttgaatcagagcgtgtggtacaacaagcattggatcggctaatgagagaccgaaccacggtggtggtggctcaccggctatcgacgatcaagaactcagatatgataagtgtaatacaagacggtaagatcatagagcaaggcagccacaatatcctcgttgagaacaagaatggtccctactctaaacttatcagtcttcagcagcggcagcgccatcatccttaa

SEQ ID NO: 59860 - protein, 1227 aa, Arabidopsis thaliana
MQPSNDPAIVDMAAAEKEKKRPSVSFLKLFSFADFYDCVLMALGSIGACIHGASVPVFFIFFGKLINIIGLAYLFPQEASHKVAKYSLDFVYLSVVILFSSWLEVACWMHTGERQAAKIRKAYLRSMLSQDISLFDTEISTGEVISAITSEILVVQDAISEKVGNFMHFISRFIAGFAIGFASVWQISLVTLSIVPFIALAGGIYAFVSSGLIVRVRKSYVKANEIAEEVIGNVRTVQAFTGEEKAVSSYQGALRNTYNYGRKAGLAKGLGLGSLHFVLFLSWALLIWFTSIVVHKGIANGGESFTTMLNVVIAGLSLGQAAPDISTFMRASAAAYPIFQMIERNTEDKTGRKLGNVNGDILFKDVTFTYPSRPDVVIFDKLNFVIPAGKVVALVGGSGSGKSTMISLIERFYEPTDGAVMLDGNDIRYLDLKWLRGHIGLVNQEPVLFATTIRENIMYGKDDATSEEITNAAKLSEAISFINNLPEGFETQVGERGIQLSGGQKQRISISRAIVKNPSILLLDEATSALDAESEKIVQEALDRVMVGRTTVVVAHRLSTVRNADIIAVVGGGKIIESGSHDELISNPDGAYSSLLRIQEAASPNLNHTPSLPVSTKPLPELPITETTSSIHQSVNQPDTTKQAKVTVGRLYSMIRPDWKYGLCGTLGSFIAGSQMPLFALGIAQALVSYYMDWETTQNEVKRISILFCCGSVITVIVHTIEHTTFGIMGERLTLRVRQKMFSAILRNEIGWFDKVDNTSSMLASRLESDATLLRTIVVDRSTILLENLGLVVTAFIISFILNWRLTLVVLATYPLIISGHISEKIFMQGYGGNLSKAYLKANMLAGESISNIRTVVAFCAEEKVLDLYSKELLEPSERSFRRGQMAGILYGVSQFFIFSSYGLALWYGSILMEKGLSSFESVMKTFMVLIVTALVMGEVLALAPDLLKGNQMVVSVFELLDRRTQVVGDTGEELSNVEGTIELKGVHFSYPSRPDVTIFSDFNLLVPSGKSMALVGQSGSGKSSVLSLVLRFYDPTAGIIMIDGQDIKKLKLKSLRRHIGLVQQEPALFATTIYENILYGKEGASESEVMEAAKLANAHSFISSLPEGYSTKVGERGIQMSGGQRQRIAIARAVLKNPEILLLDEATSALDVESERVVQQALDRLMRDRTTVVVAHRLSTIKNSDMISVIQDGKIIEQGSHNILVENKNGPYSKLISLQQRQRHHP

SEQ ID NO: 59861 - DNA, 2103 bp, Arabidopsis thaliana
  CDS (1)..(2103)
atggctcagcaagtactcggctgcacgagccgccccatccgcgtttctcttcaccggtgttctgttattaccaccagtgacactatcagaaggaagaatctccgattcgttagaaacccgagattgtcgttttctcttcaatcttcaactagaaattatcgtctgccttcgattaattgctcgacggtgaatggagcagtagcggaaactgcggaatattacgaaggagaaggagataacgtttcacttgctgagaaaatccggcaatgtattgatttcctccggacgattttaccaggtggaagctggtggagtttctccgatgaagttgatggtaggttcattgctaagcctgtgactgtttggcgtgcgttaagtcggatgtgggaacttgtggctgaggatcgttgggttatcttcgctgcgttttccactcttatagtagccgcgctttcagagataactattccgcattttttaacagcttcgatcttctcggcacaaagtggtgatatcgctgtgtttcatcgaaatgtcaagctcttggttacgttatgtgttacttcaggcatttgcagtggcatacgaggatgcttctttgggattgctaacatgatacttgtgaaacgaatgagggaaacactatactccactcttctcttccaggatatatcatttttcgactctcaaactgttggtgacttaacaagcagacttggctcagactgtcagcaagtctcgagggtcatcggaaatgatctgaacatgatatttcgcaatgttcttcagggtacaggggcattgatttatttgctaattttgtcttggccccttgggctgtgcacattggtgatatgctgtattttggctgcggttatgttcgtttatgggatgtaccaaaagaagacagcgaagctaattcaggagatcacagcttctgcaaatgaagtcgctcaagagacatactctttgatgagaaccgttcgtgtatatgggacagagaagcaagagtttaaaaggtacaatcactggcttcagagattggcggatataagtttgagacagagtgctgcatatggtatttggaactggagcttcaacactctataccatgcaactcagattattgctgtcctggttggaggattgtctatcttagctggtcaaataacagcagagcagctgacaaagtttctgttgtatagtgagtggttaatctatgctacatggtgggtgggagataatttatcatctttgatgcaatcggttggagcaagtgaaaaggttttccaaatgatggatctcaagccaagtgatcaattcatatcaaaaggaacgagactgcagagactgacaggacatatcgagtttgtagatgtgtcatttagctacccttcaagagatgaggtagcggtggttcaaaacgtaaacatttccgtgcatcctggtgaagtggtagcaatcgttggtctaagtggcagtggcaaaagtacactggttaatcttttgctgcaactctacgaaccaacaagtggtcagattctactagatggggttcctttgaaagagttggatgtcaagtggcttaggcaaagaatcggatacgtggggcaggaaccaaagctcttccgcacagacatcagttcgaacatcaagtacggatgtgatcgtaatatatcgcaagaagatataatatcggctgcaaagcaagcctatgcacatgactttatcacagcacttccgaatggttacaacacaattgttgatgatgatctactcagtggagggcagaaacaacggattgccattgctcgtgccatccttagagatcctagaatcctcatcctcgatgaagccacaagtgcactcgatgcagagagcgaacacaatgttaagggcgtacttcgttctatcggaaacgactcagcaacaaagagaagcgtcatagtgatagcacacagactttctacaattcaagctgcggatagaatagtggctatggacagtggacgagtcgtcgagatgggcagtcacaaagaacttttgagcaaagatggcttatacgcgagattgacgaagagacaaaacgatgccgtcttatga

SEQ ID NO: 59862 - protein, 700 aa, Arabidopsis thaliana
MAQQVLGCTSRPIRVSLHRCSVITTSDTIRRKNLRFVRNPRLSFSLQSSTRNYRLPSINCSTVNGAVAETAEYYEGEGDNVSLAEKIRQCIDFLRTILPGGSWWSFSDEVDGRFIAKPVTVWRALSRMWELVAEDRWVIFAAFSTLIVAALSEITIPHFLTASIFSAQSGDIAVFHRNVKLLVTLCVTSGICSGIRGCFFGIANMILVKRMRETLYSTLLFQDISFFDSQTVGDLTSRLGSDCQQVSRVIGNDLNMIFRNVLQGTGALIYLLILSWPLGLCTLVICCILAAVMFVYGMYQKKTAKLIQEITASANEVAQETYSLMRTVRVYGTEKQEFKRYNHWLQRLADISLRQSAAYGIWNWSFNTLYHATQIIAVLVGGLSILAGQITAEQLTKFLLYSEWLIYATWWVGDNLSSLMQSVGASEKVFQMMDLKPSDQFISKGTRLQRLTGHIEFVDVSFSYPSRDEVAVVQNVNISVHPGEVVAIVGLSGSGKSTLVNLLLQLYEPTSGQILLDGVPLKELDVKWLRQRIGYVGQEPKLFRTDISSNIKYGCDRNISQEDIISAAKQAYAHDFITALPNGYNTIVDDDLLSGGQKQRIAIARAILRDPRILILDEATSALDAESEHNVKGVLRSIGNDSATKRSVIVIAHRLSTIQAADRIVAMDSGRVVEMGSHKELLSKDGLYARLTKRQNDAVL

SEQ ID NO: 59863 - DNA, 3822 bp, Arabidopsis thaliana
  CDS (1)..(3822)
atgtatatctctctcatcttcttcctctctaaccactttcctcccttaatttctatccctatatttattttcctttcattttcctctccaactaattacacacacttgaagctgaaaaaaatgcagccgtccggtgatccggcgccggaaaaggagaaagagatgacgcagccaaaagtgtcactgcttaagctcttctccttcgcagatttctatgattgtgttctaatgactcttggatccgtaggagcgtgcattcatggcgcctcggttccaatctttttcatcttctttggcaaactcatcaatattatcggtcttgcttatcttttcccaaaacaagcctctcacagagtcgccaagtactcgttggattttgtatacttgagtgtggctatactattttcatcatggttagaggttgcatgttggatgcatacgggagagaggcaagcggcgaagatgaggagagcttatctcaggtcaatgttaagccaagacataagcttattcgacaccgaagcttctacaggagaagtcatctccgccatcacctccgacatcctcgtcgtccaagatgctctctccgagaaggtagggaatttcttgcactacataagccggttcatagccggttttgcaattggattcactagtgtatggcaaataagtcttgtcactctatccatagtccccttaatcgctctagctggcggcatctatgcgttcgtcgccatcggacttattgctcgtgtccggaaatcatacatcaaggctggtgagattgcagaagaggtgatcgggaatgtgaggaccgtacaagcattcaccggtgaagaaagggcggtgagattataccgagaagcgctggagaatacgtataagtacgggagaaaagctggtttaaccaaaggattaggtcttggatcgatgcactgtgtcttgtttctatcttgggccttgctcgtatggttcacaagtgttgtggtccacaaggatatcgccgatggtggcaaatcattcactaccatgctcaacgttgtcatcgccggcctgtctcttggacaagcggcgcccgatatttctgcgtttgtacgggcaaaagccgctgcttatccaattttcaagatgattgaacggaacacggtgacaaaaacaagcgcaaaatctggccgtaaactagggaaagtagacgggcacattcaattcaaagacgcgactttcagttacccatctcgccctgatgtggtgatcttcgacaggttaaacctagctatccctgccgggaaaattgtggcacttgttggaggaagcggatcagggaagagcacggtcatatctttgatagagcggttctacgagcctatttctggagcagtgttgctagacgggaacaatatcagtgagctggatattaagtggttaagaggacagattggtttggttaaccaagaaccagctctgtttgcaacaacgattcgtgagaacattctgtatggcaaagacgacgcaactgctgaggagatcacccgtgccgcaaagctctcggaagccatttctttcatcaacaacctccctgaaggatttgagactcaggttggcgagagagggattcaactatctggcggacagaaacaaaggattgctatatcaagagcaattgtgaagaatccatcgatactcttactcgacgaagcaacaagtgctttagacgcagagtcggagaagagcgtgcaagaagcgctggatcgagtgatggttgggagaacaacggtggtggtggctcacagactctcaacggtaagaaatgctgacatcatagcagttgtacacgaaggtaaaatagttgagtttggaaaccacgagaatctcatatctaatcccgacggagcctactcttctcttcttcgtctccaagagactgcctcattgcagcgtaacccttccttgaatcgcacgctaagcagaccacatagtataaaatactcgcgggaactatcaagaacaagatccagcttctgttcagagagggaatcggtaactcgaccggatggggctgatccatccaaaaaagtgaaagtaacggtgggacgtctttactctatgatccgtccggactggatgtatggcgtgtgtggcacgatatgtgcctttatcgctggatctcaaatgccccttttcgcgcttggcgtctcgcaagccttagtttcctattacagtggttgggatgagactcaaaaagagatcaagaagatcgctatcctcttctgctgcgcgtccgttatcactctaattgtctacaccattgagcatatctgctttggcactatgggcgagcgtctcactctccgtgtccgcgaaaatatgttcagagcaatcttgaagaatgaaatcgggtggtttgatgaggtggacaacacaagctcaatgttggcatcgcggcttgagagcgatgcaactttgcttaaaaccatagtggtcgataggtcaacgattctactgcagaacttaggtctagttgtgacctcttttatcatagcatttatactcaactggcgtctcactcttgtcgtcttggccacatacccattggttataagcggacatatcagcgagaaacttttcatgcaaggatatggaggagacttgaacaaagcatacttaaaggccaacatgttggccggtgagtctgttagcaacatccgcacggtcgctgccttctgtgctgaggaaaagattctagaactttattcaagagagcttttagaaccttccaaaagttctttcaggcgtggacaaattgcaggacttttctacggtgtctctcagttcttcattttctcttcctatggcctcgccctctggtacggatcaactttgatggacaaaggattagcgggcttcaaatcagtgatgaaaacattcatggttttgattgtgacggcgttagcgatgggtgagacattggctctagctccggatctgctgaaaggaaaccagatggttgcgtccgtgtttgagatcttggaccggaaaactcagatcgttggagaaaccagcgaggagctgaacaatgtggaaggcacgattgagctcaaaggcgtccactttagctacccttcgagaccagatgttgtaattttccgggactttgatctgatagttcgtgccggaaagagcatggcgctcgttggacagagtggatctgggaaaagttctgttatttcactcattctccggttctatgacccgactgctggaaaagtcatgatagagggaaaagacatcaagaaactagatttgaaagcattgaggaaacacattggtcttgttcaacaagaaccagcacttttcgccacaacaatctacgagaacattttgtatggaaacgaaggagcatctcaatctgaagtcgtcgaatcagctatgctcgcaaatgctcacagcttcattacctctctcccagaaggttactctaccaaagtcggtgaacgtggagttcaaatgtcaggcgggcagagacagaggatcgctatcgctagagccattctcaagaatccagcaattctattacttgacgaagccacaagcgctttggacgttgaatctgagcgtgtggtacaacaagcattggatcggttaatggctaaccggacgactgtggtagttgctcacaggctatcgacgatcaagaacgctgacacgataagtgtattacacggaggtaagatcgtagagcaaggcagccaccgtaagctcgttctaaacaagagtggtccatattttaaacttatcagtcttcagcagcagcaacaaccttaa

SEQ ID NO: 59864 - protein, 1273 aa, Arabidopsis thaliana
MYISLIFFLSNHFPPLISIPIFIFLSFSSPTNYTHLKLKKMQPSGDPAPEKEKEMTQPKVSLLKLFSFADFYDCVLMTLGSVGACIHGASVPIFFIFFGKLINIIGLAYLFPKQASHRVAKYSLDFVYLSVAILFSSWLEVACWMHTGERQAAKMRRAYLRSMLSQDISLFDTEASTGEVISAITSDILVVQDALSEKVGNFLHYISRFIAGFAIGFTSVWQISLVTLSIVPLIALAGGIYAFVAIGLIARVRKSYIKAGEIAEEVIGNVRTVQAFTGEERAVRLYREALENTYKYGRKAGLTKGLGLGSMHCVLFLSWALLVWFTSVVVHKDIADGGKSFTTMLNVVIAGLSLGQAAPDISAFVRAKAAAYPIFKMIERNTVTKTSAKSGRKLGKVDGHIQFKDATFSYPSRPDVVIFDRLNLAIPAGKIVALVGGSGSGKSTVISLIERFYEPISGAVLLDGNNISELDIKWLRGQIGLVNQEPALFATTIRENILYGKDDATAEEITRAAKLSEAISFINNLPEGFETQVGERGIQLSGGQKQRIAISRAIVKNPSILLLDEATSALDAESEKSVQEALDRVMVGRTTVVVAHRLSTVRNADIIAVVHEGKIVEFGNHENLISNPDGAYSSLLRLQETASLQRNPSLNRTLSRPHSIKYSRELSRTRSSFCSERESVTRPDGADPSKKVKVTVGRLYSMIRPDWMYGVCGTICAFIAGSQMPLFALGVSQALVSYYSGWDETQKEIKKIAILFCCASVITLIVYTIEHICFGTMGERLTLRVRENMFRAILKNEIGWFDEVDNTSSMLASRLESDATLLKTIVVDRSTILLQNLGLVVTSFIIAFILNWRLTLVVLATYPLVISGHISEKLFMQGYGGDLNKAYLKANMLAGESVSNIRTVAAFCAEEKILELYSRELLEPSKSSFRRGQIAGLFYGVSQFFIFSSYGLALWYGSTLMDKGLAGFKSVMKTFMVLIVTALAMGETLALAPDLLKGNQMVASVFEILDRKTQIVGETSEELNNVEGTIELKGVHFSYPSRPDVVIFRDFDLIVRAGKSMALVGQSGSGKSSVISLILRFYDPTAGKVMIEGKDIKKLDLKALRKHIGLVQQEPALFATTIYENILYGNEGASQSEVVESAMLANAHSFITSLPEGYSTKVGERGVQMSGGQRQRIAIARAILKNPAILLLDEATSALDVESERVVQQALDRLMANRTTVVVAHRLSTIKNADTISVLHGGKIVEQGSHRKLVLNKSGPYFKLISLQQQQQP

SEQ ID NO: 59865 - DNA, 1656 bp, Helicobacter pylori J99
  CDS (1)..(1656): transl_table=11
ttgaaactctttttcaggcgttattctaaataccttaaagaacattataaaagttttatagtggttttattttcttctttagtggtagctttaagcacggcttgggggacttatttagtcaagcccactttagatgaaatttttatcaataaagacactcacatgctcaaaatcctgccttttttagtgattttggcgtatttgggtaagagtgggggcatgtatgttggcacttatttcactaactttattgggcttgatattgtcaaaaaaatacgcaacgccatgttagaaagccttctcaaaatggaaatggatttttttaacaggactaaaaaaggcgaattgatcgcaaggatcaccaatgatataggtttgattagagcgagtttgtccaattacctttcagagagcctaagagaagggctaacgattgtgggattagtgggggtggtgatctatcaaagccctaaattagcgctagtggggctagtgatcatgccgctagccgccattcctattagtaaaatcattcgtaaggttaaaaaactcgctaaagcccaccaagagagtaacgccaaaatcaccgctcgtttgagtgaagtctttaacaatgtggaagcgattaaaatctctaatggcgaaaaattagagcatagggcttttgtgaaagaaaatgaagcgttttttaaaatcggtatcaaaaacatcgccgtggctgaaatttcttcgcctttaatggagtttttaggctctatcgctatagcgttagtgatctatttaggggggaatgaagtgattaagggtcatattagcgtgggggcgtttttttctttcatcacggccctttttatgctctatacgccgatcaaacgcctaactaggattgtctctaattttcaagaagccttagtcgctagcgataggatccatgagattttagaaagagagccggccattattgatggggaattgacgctggatgatgccatacacaccattgaatttaaaaaggtatggctggcttatgcgctagaagatcaagagcgttatgttttaagcgatattaatttgaaattccaacaaaatgaaatcgtcgctctaaaaggcgaaagcgggagcggcaaaagctcattagtgaatctgatcttacgcctttatgagccaagcaagggcgaaattttcatcaatgatcaaaaaatagagagcatcactcaaaaatccttgagggaaaagattagcgttgtcactcaaagggtgtttatctttaacgggagcgtggctgaaaatgtggcgtatggcttagaaattgatgaaataaaaatcaaagaatgcctaaaaaaagcccaagccttagattttgtggaaaaaatgcctcatgggatagagagcgttttagatgaatttggcgctaaccttagcggcgggcaacgccaaagaatcgccattgcaagagctttgtataaagacgctcaagttttaatctttgatgaagccacttccgctttagacaatcacacagaagagagcgtcaaacaaagcattttagaattgaaacaaaaccgcttgatcattctcatctcgcacaacccaagcacgcttaaattagccactaagcatgtgaaattagagcatgggcgtttgatagaatgttaa

SEQ ID NO: 59866 - protein, 551 aa, Helicobacter pylori J99
MKLFFRRYSKYLKEHYKSFIVVLFSSLVVALSTAWGTYLVKPTLDEIFINKDTHMLKILPFLVILAYLGKSGGMYVGTYFTNFIGLDIVKKIRNAMLESLLKMEMDFFNRTKKGELIARITNDIGLIRASLSNYLSESLREGLTIVGLVGVVIYQSPKLALVGLVIMPLAAIPISKIIRKVKKLAKAHQESNAKITARLSEVFNNVEAIKISNGEKLEHRAFVKENEAFFKIGIKNIAVAEISSPLMEFLGSIAIALVIYLGGNEVIKGHISVGAFFSFITALFMLYTPIKRLTRIVSNFQEALVASDRIHEILEREPAIIDGELTLDDAIHTIEFKKVWLAYALEDQERYVLSDINLKFQQNEIVALKGESGSGKSSLVNLILRLYEPSKGEIFINDQKIESITQKSLREKISVVTQRVFIFNGSVAENVAYGLEIDEIKIKECLKKAQALDFVEKMPHGIESVLDEFGANLSGGQRQRIAIARALYKDAQVLIFDEATSALDNHTEESVKQSILELKQNRLIILISHNPSTLKLATKHVKLEHGRLIEC

SEQ ID NO: 59867 - DNA, 1695 bp, Xylella fastidiosa 9a5c
  CDS (1)..(1695): transl_table=11
atgcgccgccatcttgccttgttctccggatggctgattgcgttggcggtctcctcagcagcaacgctgaccctaccaagcgccttcaaacaaatgattgaccacggtttttccagcgaggggcaaatcaatcggacctttgctctactgttgttagtcgccgtgattctggcagtaggtacagcagcgcgcctgttctccgtctcgctactgggcgagaagatcatcaccgacctgcgtagccacttatacgcacacctcataggattagatgccagctttcacgatcgtaatcgcagcaacgagctggtgtcgcgtcttgccacagacagtgaactgctacgctcaatcattggatccacaatgtcagtagcgacgcgtagcaccgtgactgcaatcggcagtctcatcatgttattcatcaccagtccacgcctcgccagcctttccctggtggtcatcccactcgtgatacttcccattgtcttaggcgcacaacacctccagaaagccgcccgtaccagccaggatcgcattgccgacaccaatagcttcgctgctgaaacattacgtgctttacgtacagtgcaagcctatgcacgtgaacattacgaacgtacacgcttcgaccgcacactggaaacgagtttgcaggccgcgcgacaacgcattcacatccaaacatgggtcaccgctgcaagcatcgtgttgatattcagtgcaatcgtcggagtgttatgggcaggtgcacatgatgtcattgctggccgtatgagcgcgggcacactcggtgaatttgtcctatacgcactgatcggcggtggttccatcggcgcccttgccgaagtgtggaacgaactacaacgtgccgctggtggcatgggccggattttcgaattactcaaagagaaaaacacgctcaccgtaccagccacacctgccttgctaccccagccattgcggggagaaatccgctttgaacgtgtcggcttccactatccacaacgcccagaaacacctgcacttgatgacattgacctgcatatacgcccaggggaaaccatcgcttttgtcggcccatctggtgctggcaaaagcaccctgctatcactattactacgcttctatgatcccacccatggacgcatcctgattgatggtgtggacctacgccaaaccgatccgaaagtattacggacacacattgcactggtacaacaacaaccaacactgttcaccgcgagcgcaatggaaaatatacgctatggacgactggacgccaccactgccgaaatcgagatcgcctcacgctcttccgaagccgatggtttcatccgtgccctgccacagagctatgccaccgagctaggcgagcacggcatgtccctgtccggcggccaacagcaacgtatcgcaatcgctcgcgcactcctcaaagaagcgccgattctactcctggatgaagcgaccaacgcacttgatgcacaaaacgagcaggcagtacaacaggccctggaacgactgatgacagggcgcaccacattgatcattgcacaccgcttagtcaccatcctgaaggctgacaggatcgtggtgatggaccaaggccggatcgtcgcccaaggtacccacagcgaactcatcgccgctggaggcctatacgcaaagctcgcacgcctacaattcatcgaataa

SEQ ID NO: 59868 - protein, 564 aa, Xylella fastidiosa 9a5c
MRRHLALFSGWLIALAVSSAATLTLPSAFKQMIDHGFSSEGQINRTFALLLLVAVILAVGTAARLFSVSLLGEKIITDLRSHLYAHLIGLDASFHDRNRSNELVSRLATDSELLRSIIGSTMSVATRSTVTAIGSLIMLFITSPRLASLSLVVIPLVILPIVLGAQHLQKAARTSQDRIADTNSFAAETLRALRTVQAYAREHYERTRFDRTLETSLQAARQRIHIQTWVTAASIVLIFSAIVGVLWAGAHDVIAGRMSAGTLGEFVLYALIGGGSIGALAEVWNELQRAAGGMGRIFELLKEKNTLTVPATPALLPQPLRGEIRFERVGFHYPQRPETPALDDIDLHIRPGETIAFVGPSGAGKSTLLSLLLRFYDPTHGRILIDGVDLRQTDPKVLRTHIALVQQQPTLFTASAMENIRYGRLDATTAEIEIASRSSEADGFIRALPQSYATELGEHGMSLSGGQQQRIAIARALLKEAPILLLDEATNALDAQNEQAVQQALERLMTGRTTLIIAHRLVTILKADRIVVMDQGRIVAQGTHSELIAAGGLYAKLARLQFIE

SEQ ID NO: 59869 - DNA, 1782 bp, Synechocystis sp. PCC 6803
  CDS (1)..(1782): transl_table=11
gtgactaaacccattgcccccctcctcagccttttaaattacagccgggtccaccgtgccaaaatttactgggcggtaacctgctcattgctgaacaaaatttttgatctggctcccccggccctaattggtttagccgtggatgtggtgatcaaacagcaggattctttcctgtcccgttggggcattgtttccgtacaaagccaactgttggtgctgacggtggcttcggcggttatttgggccctggaatcaatttttgagtatgcctacgagcggctttggcgtaacctcgcccaggatatccaacacgatctgcgcctggatgcctatgcccatttgcaacagctagacctggcctatttcgaggaaaggagtacggggcggctgatggccattctcaacgatgacatcaaccagttggagcggtttttggatgtgggggccaacgaaattttgcaggtgctgaccacagtggtggtgattggtggagcattttttgtcattaccccggacattgcttggatggcggtggtgcccatgccctttgtgctgttggggtcgatctattttcagtctttgctcacttcccgttatgccctagtgcgggaaaaggtcagtaatttgaacagccgtttgtccaataacctcagcggcattatgaccatcaaaagttttgccaccgaagcggaagaggtggaacggctccggcaagacagtgatgcctatcgggacagtaatcaacgggcgatcgccttgagtgcggcctttgtgcctttaattcgggtgattatttttgccggtttttccaccattctctacttcggtggtttggatgcggtgcggggtaatttggcggtgggcagttacagtatgttggtctttttaacccaacgactactctggccgctgacgggtttgggcaaaactctggatttatatcaacgggccatggcttccacccagcgggtgatgcaacttttagcaactcctattcaagctcatccgggggaattaagcctccatcctagccaggtgcaaggggaattagttttccaaaatattagctttgcctatccccatcgttcagcggtgttgaaaaatgtttccctaagggtaccggcggggcaaaccatcggcattgtgggggcaacggggtcgggaaaaagcactctggtcaaactattactgcgactgtacgaatgggatagcggtgacattctcctagacggggtggatctgaagaaatatttcctgggggatttacggcgcagtgtcggtttagtaagccaggacgtgtttttattccacggtacggtgcgggagaatattgcctacggcagtgctgacgccactttggcccaaattgaacgggcggccaacctagcggaggcagaggaattcatcaaccagttaccccagggctacgacaccattattggcgaacggggacaaaaactttccggtggtcaacggcaacggttggcgatcgccagggctattttaaaaaatcctcccattctgattttggatgaagccacgtcagcggtggacaacgaaacagaggcggccattgtccgttccctggaaaaaatcaccaaaaatcgcaccaccattaccattgcccatcgcctttccactgtgcgctatgccgatcaaatttacgtgctggaaaacggcatggtacaagaaatgggcagccacgaaagcctactggctcaccaaggactatatgccaaactgtggcgggtgcaaacggggctaaggagtggggttagttag

SEQ ID NO: 59870 - protein, 593 aa, Synechocystis sp. PCC 6803
MTKPIAPLLSLLNYSRVHRAKIYWAVTCSLLNKIFDLAPPALIGLAVDVVIKQQDSFLSRWGIVSVQSQLLVLTVASAVIWALESIFEYAYERLWRNLAQDIQHDLRLDAYAHLQQLDLAYFEERSTGRLMAILNDDINQLERFLDVGANEILQVLTTVVVIGGAFFVITPDIAWMAVVPMPFVLLGSIYFQSLLTSRYALVREKVSNLNSRLSNNLSGIMTIKSFATEAEEVERLRQDSDAYRDSNQRAIALSAAFVPLIRVIIFAGFSTILYFGGLDAVRGNLAVGSYSMLVFLTQRLLWPLTGLGKTLDLYQRAMASTQRVMQLLATPIQAHPGELSLHPSQVQGELVFQNISFAYPHRSAVLKNVSLRVPAGQTIGIVGATGSGKSTLVKLLLRLYEWDSGDILLDGVDLKKYFLGDLRRSVGLVSQDVFLFHGTVRENIAYGSADATLAQIERAANLAEAEEFINQLPQGYDTIIGERGQKLSGGQRQRLAIARAILKNPPILILDEATSAVDNETEAAIVRSLEKITKNRTTITIAHRLSTVRYADQIYVLENGMVQEMGSHESLLAHQGLYAKLWRVQTGLRSGVS

SEQ ID NO: 59871 - DNA, 1833 bp, Synechocystis sp. PCC 6803
  CDS (1)..(1833): transl_table=11
atgaaccgtgcctcccccatgacccaagctgtgccaggcctctgggcagtgatcaccaccttttggccccaaattcgtgcccagtggcgactcttgctggtagcgatggtgactttgctggcggatgtggggttgcgactgttggaaccctggcccctcaagctgctcattgacggggtactgattcccactcaaacccagccgagtctttctctctggggctttactaacctcaatgccgcttggctgttgatgttaatcgccgttggggtgattatcattgccgtcagtcgggcgatcgctacctattggaataccgtcagtttggcgatcgttggtagtcgcgtcatggcccaggtgcgggatcaactctatgggcatttgcaaaggctttccctgcgttaccattaccaagcccgcagtggcgatctgattatccgagtcagtagcgatgccaaccgtctccaggaaattttgctcacagcagctttgcccctggtggtcagccttttaactttgggcggcatggtgggggtgatggcctggctagacctaaaattaacccttttgtccttggcaacttttcccctgttttggttggccgccaatcgtttaagtgccaaaattcgccatgcttccctcacccaacgtcaccaggaaggggccgttgcctccaccgccgctgaatccctctccgccattaaacttgtccaagctctctccctggaacaagcctttgccgatttgtttagccgccaaaatcaacggagcctccaagaaaacattgaaactaagcgtttagccgccaacctggagcgattggtggacgtgttgattgccttcggtacagctttggtgatgggttacggaggccatctggtcattgaagatgctctgacagcgggaacggttttggtgtttttaacctatctacgcaatgcctacaaaccggtgcagaattttgctaaatacacaggtcgtctggctaaagcggcggcatcgggggagcgaattttgaatattttggcggaaacccccgatattcaggacaaaccaggggctattcctgccccatttttccaggggcgcattgaatttaaatatgtttcctttggctatcatccagatcaagccattcttgacgggttgaatttaacagtgcgaccaggggagaaaattgcccttgttggtgcttctggcagtggtaaatctactcttttaagtcttttactgcgcctgtatgacccaacagcagggaaaattttcattgatggccatgatctgcgggattatcaactgacgagcctacggaaccaaatggcagtggtattacaggagagtttattatttgcggccacgatccgggaaaatatcgcctacggcatcgagggggcgacaatggcagagattgaagcggcggcccgtttagccaatgcccataaatttattctggaactgccccagggttacgacacagtagtgggagaaaggggcactactctctctggtggccagcgacaacggttggcgatcgccagggccgccatgcgacaaacccccattctgatcctggatgaacccaccagcggcttggataaagttaatgaacagttggtttttgaagccctagaacggttagcggaaaatcgcaccacttttttggtaacccataatctgcagttggcgatcgccgctgaccaaattctttacctctaccaggggcaaatcagggaacagggtacccacgccgaattactggctcgtcagggggtctatgctgatctctttcaacggcaaaccctcgcaaccgtcaccaaatccctggggcgttaa

SEQ ID NO: 59872 - protein, 610 aa, Synechocystis sp. PCC 6803
MNRASPMTQAVPGLWAVITTFWPQIRAQWRLLLVAMVTLLADVGLRLLEPWPLKLLIDGVLIPTQTQPSLSLWGFTNLNAAWLLMLIAVGVIIIAVSRAIATYWNTVSLAIVGSRVMAQVRDQLYGHLQRLSLRYHYQARSGDLIIRVSSDANRLQEILLTAALPLVVSLLTLGGMVGVMAWLDLKLTLLSLATFPLFWLAANRLSAKIRHASLTQRHQEGAVASTAAESLSAIKLVQALSLEQAFADLFSRQNQRSLQENIETKRLAANLERLVDVLIAFGTALVMGYGGHLVIEDALTAGTVLVFLTYLRNAYKPVQNFAKYTGRLAKAAASGERILNILAETPDIQDKPGAIPAPFFQGRIEFKYVSFGYHPDQAILDGLNLTVRPGEKIALVGASGSGKSTLLSLLLRLYDPTAGKIFIDGHDLRDYQLTSLRNQMAVVLQESLLFAATIRENIAYGIEGATMAEIEAAARLANAHKFILELPQGYDTVVGERGTTLSGGQRQRLAIARAAMRQTPILILDEPTSGLDKVNEQLVFEALERLAENRTTFLVTHNLQLAIAADQILYLYQGQIREQGTHAELLARQGVYADLFQRQTLATVTKSLGR

SEQ ID NO: 59873 - DNA, 1803 bp, Nostoc sp. PCC 7120
  CDS (1)..(1803): transl_table=11
atgctaaaacccaaaaaatcagctgttcccggtttgtggggagtgctggcttatttctggcctgatattcgtccccagtatggattacttttagtttcggcgatcgctttaattgcagatgtcggactgagagtattagaaccttggccactcaagtttgtctttgattacgttctgctgcgcggcgaaaggctcaatactgttcccctcatagctaatctagaaccaatcacattactgacattctcagccgttgcagtcttaattattacaggcttacgcgccctggctgcctatgggagtactgtaggattagctatagtcggtagccgagtcatggcgaaggtgcggaatcgtttatattgtcatctgcaaaatttatctttggcttatcacaccaaagcccgtagcggtgatttaattatccgtgtcagtagcgatgctagtcgtcttcaagaaatcatgattacggcagcattaccgctagtagtcagcattctctctctatttggcatgattggggtgatgttctggatgaatcgtagcctcaccctgctgtcattaatcacactaccgttcttttggttagtcactaaccgactcagccagcgcatcaaagattcctcattaaagcaacgtcaacaagagggggctgtagcagcaacggcggctgaatcgattgcggcgattaaattagtcaaagccctctccctacaggatgcttttgcgcgagtatttgctcaacaaaatcaaagtagtctgaaagaaagcgtcaaaacccaacggctggcggctcacttggaacgtactgtagatggggtgattgcaatgggaacagcaattattttatggtatggctcttggttggctctgcgagatgctttaacccctggggatgtgctggtattccttacctacctcaagaacgcctttaagccagtgcagaacttggctaaatacacgggacgactcgctaaagcggcggcttctggtgagcgtatcttagatgtgttaaatcagaaaccagatatcagtgattcacctgaagccttccccgccccaattttccggggtgcggtgcgttttgatcgcgtccactttgcatataactcaggacgagtgctactagaagacatcaatttaaacattcaatcgggacagcaagtagcgatagtagggacttctggtggtggtaaatcgacgttagtcagtcttttattacggctttatgatcccacatctgggcgggtgatgattgatgggcgggatattcgagagtatacattggcatcattccgttcccaaattagtgtagttttgcaagatagtctcttgtttgctgccagtattaaagaaaatattgcctacgggattgctggggtgtctgatgcggaaattgaagaggcggcgcgtttagctcatgctcatgattttatccaagctttaccgcaaggatatgacaccctggtgggggaaagaggctcgactctttctgggggacaaagacaacggattgcgatcgctcgtgcggcgattcgtcaagctcctatcttgattttagatgaacctactacggggttagataaggaaagtgagaaggctgtaattgatgctttgcaaaggttgtcagcaaatcgcacgacttttttgattactcatgatcttgattttgctactcgcgcagatatgattatttatctggaaaatgggcggatagctgaacaaggttctcatctggagttgatgcggaaacatgggcgttatgcggctttgtatgaggtgcaggcttctttgagggtttag

SEQ ID NO: 59874 - protein, 600 aa, Nostoc sp. PCC 7120
MLKPKKSAVPGLWGVLAYFWPDIRPQYGLLLVSAIALIADVGLRVLEPWPLKFVFDYVLLRGERLNTVPLIANLEPITLLTFSAVAVLIITGLRALAAYGSTVGLAIVGSRVMAKVRNRLYCHLQNLSLAYHTKARSGDLIIRVSSDASRLQEIMITAALPLVVSILSLFGMIGVMFWMNRSLTLLSLITLPFFWLVTNRLSQRIKDSSLKQRQQEGAVAATAAESIAAIKLVKALSLQDAFARVFAQQNQSSLKESVKTQRLAAHLERTVDGVIAMGTAIILWYGSWLALRDALTPGDVLVFLTYLKNAFKPVQNLAKYTGRLAKAAASGERILDVLNQKPDISDSPEAFPAPIFRGAVRFDRVHFAYNSGRVLLEDINLNIQSGQQVAIVGTSGGGKSTLVSLLLRLYDPTSGRVMIDGRDIREYTLASFRSQISVVLQDSLLFAASIKENIAYGIAGVSDAEIEEAARLAHAHDFIQALPQGYDTLVGERGSTLSGGQRQRIAIARAAIRQAPILILDEPTTGLDKESEKAVIDALQRLSANRTTFLITHDLDFATRADMIIYLENGRIAEQGSHLELMRKHGRYAALYEVQASLRV

SEQ ID NO: 59875 - DNA, 3909 bp, Drosophila melanogaster
  CDS (1)..(3909)
atggtcaagaaggaggaatcacggctgccacaagctggtgactttcagcttaaggaaggatcagtcgtggatgcgacccgaaagtacagttactttgatctgttcagatactcaaccagatgcgagcgcttcctgttggtagtcagtctgctggtggccaccgctgcgtccgcatttattccctacttcatgattatctacggagagttcacatccctgctcgtggaccgaacagtcggcgtgggcacatcctcgccagcctttgctctgcccatgtttggtggcggtcagcaattgacaaatgccagcaaagaggagaacaaccaggcgatcattgatgatgcgactgcctttggcattggcagtctggtgggatctgtggccatgttcctgctcatcacactggccatcgacttggccaaccggatagccctcaaccaaatcgatcgcatccgaaagctcttcctggaggcaatgctgcgacaggacatcgcctggtacgacaccagttcgggctccaacttcgccagcaaaatgacagaagacctggacaaactgaaggaaggcattggcgagaaaatagtgattgtggtattcctgatcatgacctttgtgattggaatagtgtctgctttcgtctacggatggaagctcaccctggtcgttctgagttgtgtgcccttcatcattgcagccaccagtgtggtggctcgactccagggatcgctggccgagaaggagctgaagtcctactccgatgcagccaacgtggtcgaggaggtattcagtggaattcgcacagtgttcgcattcagtggtcaggagaaggaaaaggaacgctttggcaagctgctcattcccgcagagaatacgggtcgcaagaagggtctatactcgggcatgggaaacgcactgtcctggctgatcatctacctgtgcatggctcttgccatctggtatggtgtgacgctcattctggacgagcgtgatcttcccgatcgcgtttatactccggccgttctggtcattgtcctgttcgccgtgatcatgggtgcccagaatctcggttttgcctctccacacgtggaagccattgctgtggccacggcagctggccagaccctgttcaacatcatcgatcgtccgtcgcaggtggatccaatggacgagaagggaaacaggccggagaataccgctggacacattcgtttcgagggcatacgcttccgttaccccgcccgtccggatgtggagatcctcaagggtctgaccgtcgatgtgcttccgggtcagacggtggccttcgtgggcgcatctgggtgtggcaagagcaccctcatccaactgatgcagcggttctacgaccccgaagcgggcagtgtcaaactggatggacgggatcttcgaacactgaatgtgggctggttgcgttcgcagatcggagtggtgggccaggaaccggttctcttcgccaccaccattggcgagaatatccgatacggaagaccatcggccactcaggcggatatagagaaggcggcgcgagcggccaactgtcatgatttcatcactcgcctacccaagggctacgacacccaggtgggcgagaagggcgctcagatttctggtggccagaagcagcggattgccattgcccgggctttggttcgacagccccaagtgcttcttctcgacgaggccacctctgccctggatcccacctctgagaagcgggtgcaaagtgccctagaactggccagccagggaccaaccactctagttgtggcccaccgactgtccaccatcaccaatgccgacaagattgtcttcctcaaggacggtgtagtggcggagcagggtacgcacgaggagctcatggagcgacgtggtctctactgcgaactggtgagcatcacccagcggaaggaggccacggaggcggacgagggagcggttgccgggcgacctctgcagaagtcgcagaacctgtctgacgaggaaaccgatgatgacgaggaagatgaagaggaggacgaagagccggagctgcagacttcgggcagctccagggacagcggattcagagccagcacgcgacgcaagcgtcgctcgcagcgtcgcaagaagaagaaggacaaggaagtggtatccaaggtgtccttcactcaactaatgaagcttaattctccggagtggcgtttcattgtcgtcggaggcattgcatccgtaatgcatggcgccacattcccgctttggggtctcttctttggcgacttctttggaatcctctcggacggtgacgatgacgttgtgcgagccgaggtcctgaaaatctccatgatctttgtgggcattggcttgatggccggattgggcaacatgctccagacctacatgttcacaacggccggcgtgaagatgacaacgcgattgcgtaaaagggcttttggaacgattattggtcaggatattgcctacttcgatgacgagcgaaattcagtgggagcactgtgctcccggctggccagcgattgttccaacgttcagggtgcaaccggagctcgtgtgggcacaatgctccaggccgtggccactcttgtggttggaatggtcgtcggtttcgttttctcctggcaacagacgctcctcacactggtcaccctgcccctggtctgtttgtccgtctacttggagggccgttttatcatgaagagcgcccagaaggctaaggcgtcgatcgaggaggcttctcaagtggcagtcgaagctattaccaatatccgaacggtcaatggtctttgcctagagcgccaggtcttggatcaatacgttcagcagatcgatcgcgtggatatcgcctgcaggcgtaaggttcgcttccgtggtctggttttcgctttgggacaggcggctcctttcctggcttacggcatctccatgtactatggtggtattctggtggcagaggagcgaatgaactatgaggacatcatcaaggtggccgaggctctgatctttggctcctggatgttgggacaggccctggcctacgcgccaaatgtaaacgatgctattctgtccgccggacgcctaatggatctcttcaagcgcacctcaacgcagcccaatccgccacagagtccctacaatacagttgagaaatccgagggagacattgtctatgaaaacgtgggcttcgaatatcccaccaggaagggcactcccattctgcagggcctaaatctcaccatcaagaaatcgacgacggttgctctggtgggtccatctggttccggcaagtccacctgcgtgcaactgctgcttcgctactacgatcccgtatcgggatccgtgaatctgagcggagtgccgagcacggaattcccgttggacacactgcgctccaagctgggcctggtctcgcaggaacccgtgctcttcgatcgcaccattgccgagaacatagcttatggcaacaatttccgtgacgatgtgtccatgcaggagattattgaggcggccaagaagtcgaatatccacaactttataagtgctttgccccaaggctacgacacccgactgggcaagacatcgcagctctctggaggtcagaagcagcgcatcgccatcgctcgagccctggttagaaacccgaagatactcatcctggacgaggccacctctgcgctggacttggagagcgagaaggtggtgcaacaggcgctggatgaggcgagatcaggccgcacatgcctgacgattgcgcatcgtctgaccaccgtgcggaatgcggatctcatctgtgtgctaaaacgcggcgtggtagtggagcacggcacccacgatgagttgatggcactgaacaaaatctacgccaatctctatctgatgcaacaggtgtcgggctaa

SEQ ID NO: 59876 - protein, 1302 aa, Drosophila melanogaster
MVKKEESRLPQAGDFQLKEGSVVDATRKYSYFDLFRYSTRCERFLLVVSLLVATAASAFIPYFMIIYGEFTSLLVDRTVGVGTSSPAFALPMFGGGQQLTNASKEENNQAIIDDATAFGIGSLVGSVAMFLLITLAIDLANRIALNQIDRIRKLFLEAMLRQDIAWYDTSSGSNFASKMTEDLDKLKEGIGEKIVIVVFLIMTFVIGIVSAFVYGWKLTLVVLSCVPFIIAATSVVARLQGSLAEKELKSYSDAANVVEEVFSGIRTVFAFSGQEKEKERFGKLLIPAENTGRKKGLYSGMGNALSWLIIYLCMALAIWYGVTLILDERDLPDRVYTPAVLVIVLFAVIMGAQNLGFASPHVEAIAVATAAGQTLFNIIDRPSQVDPMDEKGNRPENTAGHIRFEGIRFRYPARPDVEILKGLTVDVLPGQTVAFVGASGCGKSTLIQLMQRFYDPEAGSVKLDGRDLRTLNVGWLRSQIGVVGQEPVLFATTIGENIRYGRPSATQADIEKAARAANCHDFITRLPKGYDTQVGEKGAQISGGQKQRIAIARALVRQPQVLLLDEATSALDPTSEKRVQSALELASQGPTTLVVAHRLSTITNADKIVFLKDGVVAEQGTHEELMERRGLYCELVSITQRKEATEADEGAVAGRPLQKSQNLSDEETDDDEEDEEEDEEPELQTSGSSRDSGFRASTRRKRRSQRRKKKKDKEVVSKVSFTQLMKLNSPEWRFIVVGGIASVMHGATFPLWGLFFGDFFGILSDGDDDVVRAEVLKISMIFVGIGLMAGLGNMLQTYMFTTAGVKMTTRLRKRAFGTIIGQDIAYFDDERNSVGALCSRLASDCSNVQGATGARVGTMLQAVATLVVGMVVGFVFSWQQTLLTLVTLPLVCLSVYLEGRFIMKSAQKAKASIEEASQVAVEAITNIRTVNGLCLERQVLDQYVQQIDRVDIACRRKVRFRGLVFALGQAAPFLAYGISMYYGGILVAEERMNYEDIIKVAEALIFGSWMLGQALAYAPNVNDAILSAGRLMDLFKRTSTQPNPPQSPYNTVEKSEGDIVYENVGFEYPTRKGTPILQGLNLTIKKSTTVALVGPSGSGKSTCVQLLLRYYDPVSGSVNLSGVPSTEFPLDTLRSKLGLVSQEPVLFDRTIAENIAYGNNFRDDVSMQEIIEAAKKSNIHNFISALPQGYDTRLGKTSQLSGGQKQRIAIARALVRNPKILILDEATSALDLESEKVVQQALDEARSGRTCLTIAHRLTTVRNADLICVLKRGVVVEHGTHDELMALNKIYANLYLMQQVSG

SEQ ID NO: 59877 - DNA, 3942 bp, Drosophila melanogaster
  CDS (1)..(3942)
atgaccgttaagaacggcgatgtcgtcaaggacgatgtgaattcgcgatcgcagtacaaaacgaacatcgtcctgggcgccaaactagaggattcggatcgagatcgaaagagctttgagcccaacaagtcgaaaaagaagtccaagcatgacgagtcggatgccagcgatgaggaggatggctcccagtaccatgaggatgtcaagcaggttagctacttccagctctttcggtacgccaccaaaaaggatcgagcgctctatgtgatcggactactgtctgccgtggccacaggcctgaccactccggccaacagtttgatattcggtaatctcgccaatgacatgattgacttgggtggactgcttgagagcggaaaatcatatcgagctgacgatgctatttctactttgcttctggacaaagtgcggcagttctccctgcaaaacacctacatcggcatcattatgctggtgtgttcctatctctcgatcacctgcttcaactacgcggcccactcccagatcctcaccatccgctcaaagttctttcgctccattctgcatcaggacatgaagtggtacgacttcaaccagagtggcgaagtagccagccgaatgaatgaagatctctccaaaatggaggatggcttggccgaaaaagtggtcatgttcgtccattaccttgtcgccttcgtgggatctttggtgctagcctttgtcaagggctggcagctatccctggtgtgcttgaccagtttgccactaacattcatcgccatgggcctggtggccgtggccacgtcccgcctggcgaaaaaggaggtgaccatgtatgctggtgctgccgtggtggctgaaggcgctctctccggaattcgaacggtaaaggcttttgagggcgaggcgaaggaggtggctgcgtacaaggagcgtgtggttgctgccaagatcttgaatatcaagagaaatatgttctccggaatcggattcggtctgctttggttcttcatctacgcatcctatgctctggccttctggtatggagtgggtctggtaatcaagggataccacgaacccgcgtatgagaactacgatgctggcaccatgatcaccgtattcttttccgtgatgatgggttccatgaatattggaatggcggctccctatatcgaggcatttggcatcgcgaagggcgcctgcgccaaggttttccacattatcgagcagattccggaaattaatcccattgatggggagggtaaaaagttaaatgagccccttaccaccattgagtttaaggaagtggagttccagtatcccacgcgaccggaggtttctattctgaacaaactgaacctgaaaatccatcgtggccagacggtggctcttgttggtccatccggctgtggcaaatcaacctgcatccaactggtccagcgattctatgacccccaggctggtaatcttttgttcaatggcaccaatcttaaggacctcgacatcaactggctacgctctaggattggagtggtgggtcaggaaccaatcctcttcgccacttccatatacgagaatatcaggtacggtcgagaggacgccactcgcgaggagatcgaggcagcagctgccgcagccaatgcagccatctttattaagaagctacccaaaggatatgatactttggtgggagagcgaggagctcagttgtccggagggcagaagcagaggatagccattgctcgcgcattgattcgtgatcccgaaatcttgctgttggatgaagccacatctgcattggataccgccagtgaggctaaagtacaagctgccctggagaaagtcagcgctggaaggacgaccatcatcgtggcccaccgtttgtccaccgttcgtcgggcagacaggattgtggtgatcaacaagggtgaggtggtggagagtggaacgcatcaagagttgatggagttgaaggatcactactttaatcttgtaaccactcaactgggtgaggatgatggctcggtccttagtcccactggtgatatctacaagaactttgacatcaaggatgaagatgaggaagagatcaaagtacttagcgaggacgaggacgaagatgtgatggtcactgacgagaaaaataagaaaaagaaaaagaagaaggtcaaggaccccaacgaggtgaaacccatgttggaggtgatgaaaatgaacaaaccggaatggcttcagatcgcagtgggttgcatctcctccgtgatcatgggctgcgccatgcccatctttgccgtgctctttggtagcatccttcagattctttcggttaaggataatgatcaatacgttcgcgaaaactccaaccagtacagcttgtacttcttgattgccggtatcgtagtgggcattgccacgttcctacagatatacttctttggtatcgccggtgagagactgacggaacgccttcgaggactcatgttcgaggccatgctgcgccaggaggtggcctggttcgatgacaaggcgaacggtaccggaagcctttgtgcccgactctccggagatgctgctgcagttcagggtgccactggtcaacgaattggaacgatcgttcaatcgatctccactctggcattgggcattgccttgtccatgtattacgagtggagtctgggattggtggcccttgcctttacgcccttcatcctgatcgccttctacatgcagcgtactctaatggcaaaagagaacatgggctccgccaagaccatggagaactgcaccaagctggccgtcgaagtggtttccaatattcgtactgtagcttctctgggtcgtgaggaaatgttccaccagaactacattggcatgctgattccagctgttgagatttccaagagaaatacccacttccgaggattggtctacggtctcgcccgttccctgatgttctttgcctatgctgcttgcatgtattatggaacatggtgtgtgattcaccgcggaattttgtttggagatgtattcaaagtatcccaagccctgatcatgggtacggcttccattgccaatgcattggcctttgctcccaatatgcagaagggagtttcggcagccaagaccatctttacgttcctccgccgccagccgtcgattgtggaccgaccgggagtgtctcgtgatccttggcatagcgagggatatgttcgcttcgacaaggtgaagttcagctatcccacacgcagtgagattcaggtactcaagggtctggagcttgctgtgagcaagggtcagaagatcgccctagtgggtccatcgggctgtggcaagtccacgtgcatccagctgatacagcgattctacgatgtagatgagggagctacccttatagatgagtgtgatgtgcgcaatgtttctatgaccaatctgcgcaaccagttgggtatcgtgtcgcaggagcccattcttttcgatcgcacaatccgagagaatatttcctacggtgacaatgccaggaatgtgactgatcaggagatcatctcggcgtgcaaaaagtccaatatccacgaattcatcgctaacctgcccttgggttatgatacgagaatgggcgagaagggtgctcagttgtccggaggtcagaagcagcgcatagctattgcacgagccctcatccggaatccgaaaatcatgctgcttgacgaggccacttctgccttggacgctgaaagtgaaaaggttgtccaagatgcactcgatgccgcctctgaaggacgtaccacgatcagtatagcccaccgactttccaccgttgtccactccgacgtaatattcgtcttcgagaacggattagtgtgtgaagctggagaccacaagcaactgcttgcgaatcggggtctctactacacgctgtacaaacttcagagcggagccatgtag

SEQ ID NO: 59878 - protein, 1313 aa, Drosophila melanogaster
MTVKNGDVVKDDVNSRSQYKTNIVLGAKLEDSDRDRKSFEPNKSKKKSKHDESDASDEEDGSQYHEDVKQVSYFQLFRYATKKDRALYVIGLLSAVATGLTTPANSLIFGNLANDMIDLGGLLESGKSYRADDAISTLLLDKVRQFSLQNTYIGIIMLVCSYLSITCFNYAAHSQILTIRSKFFRSILHQDMKWYDFNQSGEVASRMNEDLSKMEDGLAEKVVMFVHYLVAFVGSLVLAFVKGWQLSLVCLTSLPLTFIAMGLVAVATSRLAKKEVTMYAGAAVVAEGALSGIRTVKAFEGEAKEVAAYKERVVAAKILNIKRNMFSGIGFGLLWFFIYASYALAFWYGVGLVIKGYHEPAYENYDAGTMITVFFSVMMGSMNIGMAAPYIEAFGIAKGACAKVFHIIEQIPEINPIDGEGKKLNEPLTTIEFKEVEFQYPTRPEVSILNKLNLKIHRGQTVALVGPSGCGKSTCIQLVQRFYDPQAGNLLFNGTNLKDLDINWLRSRIGVVGQEPILFATSIYENIRYGREDATREEIEAAAAAANAAIFIKKLPKGYDTLVGERGAQLSGGQKQRIAIARALIRDPEILLLDEATSALDTASEAKVQAALEKVSAGRTTIIVAHRLSTVRRADRIVVINKGEVVESGTHQELMELKDHYFNLVTTQLGEDDGSVLSPTGDIYKNFDIKDEDEEEIKVLSEDEDEDVMVTDEKNKKKKKKKVKDPNEVKPMLEVMKMNKPEWLQIAVGCISSVIMGCAMPIFAVLFGSILQILSVKDNDQYVRENSNQYSLYFLIAGIVVGIATFLQIYFFGIAGERLTERLRGLMFEAMLRQEVAWFDDKANGTGSLCARLSGDAAAVQGATGQRIGTIVQSISTLALGIALSMYYEWSLGLVALAFTPFILIAFYMQRTLMAKENMGSAKTMENCTKLAVEVVSNIRTVASLGREEMFHQNYIGMLIPAVEISKRNTHFRGLVYGLARSLMFFAYAACMYYGTWCVIHRGILFGDVFKVSQALIMGTASIANALAFAPNMQKGVSAAKTIFTFLRRQPSIVDRPGVSRDPWHSEGYVRFDKVKFSYPTRSEIQVLKGLELAVSKGQKIALVGPSGCGKSTCIQLIQRFYDVDEGATLIDECDVRNVSMTNLRNQLGIVSQEPILFDRTIRENISYGDNARNVTDQEIISACKKSNIHEFIANLPLGYDTRMGEKGAQLSGGQKQRIAIARALIRNPKIMLLDEATSALDAESEKVVQDALDAASEGRTTISIAHRLSTVVHSDVIFVFENGLVCEAGDHKQLLANRGLYYTLYKLQSGAM

SEQ ID NO: 59879 - DNA, 1941 bp, Brucella melitensis 16M
  CDS (1)..(1941): transl_table=11
gtgatattcgcaagcctgacggtctttaaaaggaagatttccgtccatgcgctttcctgcggatttcggaaaactgctttttcagccgttaaggcgcgcgttgagcagcctcgaagcgaccgacagagtattgaaatcgatatgaatcgcgaattgactgcagaagaaggccgtaaacgccgctcgctgaaaccgctgaagagaatgatgccattcctggcgccctataaggttctggttgccggggcgcttttttcattggtgctggctgcggtcacgacccttgccgttccggtggcgctgcggcgcatgatcgatcacggttttaccggctcgaatgcggtcttcgtcaataattacttcggtatgctggtgctgctggcgtttgccctcgctctggcttcgggcctgcgttatttctttgtgatctcgcttggtgagcgcgtgctggcggacctgcgcaatgccgtcttttcgcatgtcaccgcgctttcgccggaatttttcgaccgttcgcagtctggcgaaatcgtgtcgcggctttcgtccgacacgacgcagatcaagtcggtcgtcggggcaaccgcatcggtggcgctgcgcaatatgatactgggtatcggtgcgctggcgatgatggtcgtgacgagcccgaaactttccgctctggtcattgccgctattccgattatcgttattccgcttatcgccttcgggcgctcggtgcgccgccgctcccgcatgacgcaggacatgctggcgagagccaatgcctatgccagcgaacagattggcgcgatgcgcacgctacaggccttcaccaatgaaagcatggtggtgggcagttttgcccatgccgtggaaaaggcctatcaggcggcccgctcctccattcaggcgcgcgccatcctcactgcttttgcgatttttctggttttttccagtattgttgccgttctgtggttcggctcgcgcgatgtgctggcgggcaccatgtcggcgggcacgctcggccagtttgtgctctatgcggtgtttgcgggcagttccttcggggccttgtcggaagtcggcggcgaacttgcgcaagcggccggtgcaaccgagcgcctcgtggaaattctcgatgagaagccgggcattaccgcgcctgcccatccggttgcgctgccgaagccgccgcgtggtgagattgccttcgagaatgtttatttttcctaccccacacgccccgatgcgccgtcgctgaacggccttggcttcacggtcaagccgggcgagacggttgccattgtcggcccatccggggcaggcaaaagcacgatcttctcgctcgtcatgcgctattacgatccgcaatcggggcgcgtcctgatggatggcgtggcgctgccgaatgccgatccgcatgatgtgcgcagtcgcatcgccatggtgccgcaggatgtggccatttttgccaccacgattcgcgaaaatatcggtttcggcaagccgggggccagcgatgcggaaatcatcgctgccgccaaggctgcgcttgcgcatgagttcattatggcgctcgacaatggctatgacacggaagtcggcgagcggggcataacgctttccggcggccagtgccagcgcatcgccattgcacgcgcgcttttgcgcgatgcgccgatcctgcttctggacgaggcgacatccgcgctcgatgccgagagtgaaatgctggtgcaaaaggcgttggatgggctgatggccgatcgcacgacgctcgttgtcgcgcatcggctggccacggtattgaaggccgaccgcatcctcgtgctcgatcatggccgcattgtagaagaaggcacacacgagagccttgtcgcgaagggcggcatctatgcccgccttgccaagctgcaattcgaggcgggtgcgggagcctttgctgcccagtga

SEQ ID NO: 59880 - protein, 646 aa, Brucella melitensis 16M
MIFASLTVFKRKISVHALSCGFRKTAFSAVKARVEQPRSDRQSIEIDMNRELTAEEGRKRRSLKPLKRMMPFLAPYKVLVAGALFSLVLAAVTTLAVPVALRRMIDHGFTGSNAVFVNNYFGMLVLLAFALALASGLRYFFVISLGERVLADLRNAVFSHVTALSPEFFDRSQSGEIVSRLSSDTTQIKSVVGATASVALRNMILGIGALAMMVVTSPKLSALVIAAIPIIVIPLIAFGRSVRRRSRMTQDMLARANAYASEQIGAMRTLQAFTNESMVVGSFAHAVEKAYQAARSSIQARAILTAFAIFLVFSSIVAVLWFGSRDVLAGTMSAGTLGQFVLYAVFAGSSFGALSEVGGELAQAAGATERLVEILDEKPGITAPAHPVALPKPPRGEIAFENVYFSYPTRPDAPSLNGLGFTVKPGETVAIVGPSGAGKSTIFSLVMRYYDPQSGRVLMDGVALPNADPHDVRSRIAMVPQDVAIFATTIRENIGFGKPGASDAEIIAAAKAALAHEFIMALDNGYDTEVGERGITLSGGQCQRIAIARALLRDAPILLLDEATSALDAESEMLVQKALDGLMADRTTLVVAHRLATVLKADRILVLDHGRIVEEGTHESLVAKGGIYARLAKLQFEAGAGAFAAQ

SEQ ID NO: 59881 - DNA, 2079 bp, Drosophila melanogaster; identical to SEQ ID NO: 7369
  CDS (1)..(2079)

SEQ ID NO: 59882 - protein, 692 aa, Drosophila melanogaster; identical to SEQ ID NO: 7370

SEQ ID NO: 59883 - DNA, 2286 bp, Drosophila melanogaster; identical to SEQ ID NO: 7371
  CDS (1)..(2286)

SEQ ID NO: 59884 - protein, 761 aa, Drosophila melanogaster; identical to SEQ ID NO: 7372

SEQ ID NO: 59885 - DNA, 4410 bp, Schizosaccharomyces pombe 972h-
  CDS (1)..(4410)
atggaaaactttcaccatcgtccgtttaaaggtggttttggagttggtcgtgtaccaacctctttgtactattccctttcagatttttctttatctgcgatatctatttttcctacacattatgatcaaccttacttaaatgaggcaccatcatggtataaatattctttggagagtggtcttgtgtgtttatatctgtatttaatttatcgatggattactcggtcgtttactgttaaacagaccgtcggcagtgaattttcagggctgcgaaaagctcatggaattttgttatggcttctgtctattctctttttgggaatgactgctttcatgtttgtaaatgacgcttttcctactgcattttctgatcctcctgtaaaaatatgcttacttgcatattccgtccatttgtttcttttgcattctcttcgaatgatttatccacgtgcgcgaccgaccttgtatcatgcagcagttttgcttaatttactccttcttccccccatctttcatttctactcttaccccttttttttcgtagaccatcctcctctctctagctattctcctttcctatggttttacttttttattaccattgtggggaattttatcccattgttcaccccccgtgtttggtatcctttatttcctgaggataactatcagccttctgctgaacaggtctgtagtatgttcaattttgcatgctcctatggatacctgaatccattagttttgacagctaagcgtcgtgtcgttgaagttgacgatactccggttataccagattatgataagaacaaagcttggacatatcgtttcgaacgcatgaaaaccccttccctatttattactatacataagatattttggagacaaatcttggggatgggtgtttccagttttatggtcagcgtctgtcagtttctttctcctattgccttaaatcgtcttctaaagcatttggaatcaccttcatctagttcagttaatccattggtttggattgtccttttgttaactggcccctttctcacttctctttttacccagttttatttgttcatgtcgactcgttacctcgcgcgttcttacacaactcttgtacagcaaatatacaacaaagtcattcgatctcgatttgttcaaaacaaatcgggggattcaaaagttggaagatccaacaatttaatttctactgatgtggatgatattggtgaaattcgtgagtttattcatatcattgttcgtgcgcctgttgaaattgctggatccatttatcttctccaaaaacttttagggtggagtgcgtatgttggtttagcgttaactgttttaacttgttccgtccctattgttttaggacctttggtcgcaaagcttacattgcgagctaatcgtgcaactgattcgcgtatcgagctcatgtcagaattattgcagagcatccgtattaccaaattttttggatgggaattgccaatgcttgatcgagtgaaacaacggagacaagtcgaactcaatcgtacttggaagttattactaatggagatttgtatacaggtgttagttgaatcacttcctgtgtttagtatgttcgcaacttttgtagtttttactaccataatgggccaaactattacaccatcaatagcttttacctctatatccttattttctttcattcgtacacaattttcttggattgcctatcttatgcgtcaaatagttcaaattttcgtttccattggtagggtttctgactttttaaatgaccccgatgaagtggatcctgtcaatactattgaagatacttcccaggaaattggttttttcaatgcttctttaacttgggtatccaatccgtctcctggagatttttgcttacgagatttgaacattgtgtttcccagaaataaactgtcaattgtaataggtcccaccggttctggcaaaagttcgctaatttccgcattactgggagaactcagtttaaataaaggttcatacaacctacctagatcaaaaggcgtttcctatgtttctcaagtaccttggttgagaaatgccactatacgagacaatatcttatttgattatccgtacatcgaggagagatataaaaaggttatccaagcttgtggattgctcactgacctacaaagttttgttgcaagtgatctaaccgaaattggcgaaaaaggtgtaacgttatctggtggccaaaagcagcgtattgctcttgcgagggcagtatactccccaacatcaattgttttaatggacgatgttttctctgcgttggatattcatacttccaattggatttataagcattgctttcaaagttctctgatggagaatagaacagttattttagtaacacacaatgtccatttatttatggattctgctgctttcatagttactgtcaagaatggatctgcttttcccgttactgataagtcatcccctcttttatttttggctgagcaggcagcatcagcttccgaagcagctgctccagatcttgctgctatacctatcccaaatgaagtcgatgatgcggaagctgctgacgaaaaagatggaaagctggttgaggaagagcagcgggttacaggcgatgttgtatttagtgaaatctttagctatatgaaacattttggctctggattttacgtcgctgctgttttactgtttttcgtcactactcaagctacttcaattttgatcgatttgtgggttgctttttggacaaacagctccgtgaattctcctgacgtcaataataacaagtttttgtttgtgtatggtacaatgttattagcatattctttgcttgattttttgagaaccgtgtcttatgaccgcggtgcttggtgggcatcaagaaagcttcacgattctatgcttgaaagcgtattcggtacctttgcctcttggttcgataaaacgccaacggggagaattgtcaatagatttgctaaagatataaggtctattgatatgaatttatcgggatggcttttcttttccattaattgtttcctatccgtcgctggaggtattttatcggtgtcttccgctatgcctattttcatgatacctgcagtaatagtttgtttagcaggatattacttcggcttgttgtatactagggcacaggttggcgttaaaagattaatttcaatttatacttctcctatctttagtctgcttggcgaaagtatcgtcggtgtgagtgtaattcgcgcattcaatcgacaaaccatttttaagcaaatgttttctgagcgacttgataatctcgtgcgcttacaatcaacctcttataatttgaacagatgggttgctgttagaacagatggcatcagtggtctagttggtgcaattgccggtttaatcgctcttttgcagaaagacttgtctccaggtgtggtgggtttttctcttaatcaggctgttattttcagttcttcggttctgttatttgtaaggtcatgtaattcgttgcaagctgagatgaacagctatgaacgagttttagagtatagcaaacttccgcaagaaccagcacccactattgcaggccaggtaccagctacatggcctaaggagggagatattgtgtttaatcatgttagtgttagctattccgcagccggtcctactatccttaaagacgtgaatcttcatataaatccgagtgaaaaggttgctgtggtcggtcgtactggtagcggaaagagtactcttggccttacactattacggtttacacatcgtattagtggtgaaatatatattaacggtcgtgaaacacaatcggtaaacctaaacgctttaaggcaacgtatatcatttatccctcaagatccaatcttattttcaggtaccgtacgcagtaatttagatcctttcgacgagcttgaagacaattttcttaatgaagctctcaaaacaagtggagccagttcaatgattatggctcatactgatgatcaaaaacctattcatatcacactagatacacatgttgcttctgaaggttctaatttttcacaagggcaaaaacaagtccttgcattagcacgcgcaatagttagacgttccaaaattattattctagatgagtgtactgcctctgtggatgatgctatggatcagaaaattcaaaaaacattgcgtgaagcatttggcgatgcaactatgttatgtattgcccatcgtttgaaaactattgttgattatgacaaagtcatggtcttggataagggtgtattggtagagtatggtcccccagccgtactttatcataataatggtcactttcgacgtatgtgcgatggcagtggaattacttttctgcctcctgaaactcgaggttcgaaatcagcatga

SEQ ID NO: 59886 - protein, 1469 aa, Schizosaccharomyces pombe 972h-
MENFHHRPFKGGFGVGRVPTSLYYSLSDFSLSAISIFPTHYDQPYLNEAPSWYKYSLESGLVCLYLYLIYRWITRSFTVKQTVGSEFSGLRKAHGILLWLLSILFLGMTAFMFVNDAFPTAFSDPPVKICLLAYSVHLFLLHSLRMIYPRARPTLYHAAVLLNLLLLPPIFHFYSYPFFFVDHPPLSSYSPFLWFYFFITIVGNFIPLFTPRVWYPLFPEDNYQPSAEQVCSMFNFACSYGYLNPLVLTAKRRVVEVDDTPVIPDYDKNKAWTYRFERMKTPSLFITIHKIFWRQILGMGVSSFMVSVCQFLSPIALNRLLKHLESPSSSSVNPLVWIVLLLTGPFLTSLFTQFYLFMSTRYLARSYTTLVQQIYNKVIRSRFVQNKSGDSKVGRSNNLISTDVDDIGEIREFIHIIVRAPVEIAGSIYLLQKLLGWSAYVGLALTVLTCSVPIVLGPLVAKLTLRANRATDSRIELMSELLQSIRITKFFGWELPMLDRVKQRRQVELNRTWKLLLMEICIQVLVESLPVFSMFATFVVFTTIMGQTITPSIAFTSISLFSFIRTQFSWIAYLMRQIVQIFVSIGRVSDFLNDPDEVDPVNTIEDTSQEIGFFNASLTWVSNPSPGDFCLRDLNIVFPRNKLSIVIGPTGSGKSSLISALLGELSLNKGSYNLPRSKGVSYVSQVPWLRNATIRDNILFDYPYIEERYKKVIQACGLLTDLQSFVASDLTEIGEKGVTLSGGQKQRIALARAVYSPTSIVLMDDVFSALDIHTSNWIYKHCFQSSLMENRTVILVTHNVHLFMDSAAFIVTVKNGSAFPVTDKSSPLLFLAEQAASASEAAAPDLAAIPIPNEVDDAEAADEKDGKLVEEEQRVTGDVVFSEIFSYMKHFGSGFYVAAVLLFFVTTQATSILIDLWVAFWTNSSVNSPDVNNNKFLFVYGTMLLAYSLLDFLRTVSYDRGAWWASRKLHDSMLESVFGTFASWFDKTPTGRIVNRFAKDIRSIDMNLSGWLFFSINCFLSVAGGILSVSSAMPIFMIPAVIVCLAGYYFGLLYTRAQVGVKRLISIYTSPIFSLLGESIVGVSVIRAFNRQTIFKQMFSERLDNLVRLQSTSYNLNRWVAVRTDGISGLVGAIAGLIALLQKDLSPGVVGFSLNQAVIFSSSVLLFVRSCNSLQAEMNSYERVLEYSKLPQEPAPTIAGQVPATWPKEGDIVFNHVSVSYSAAGPTILKDVNLHINPSEKVAVVGRTGSGKSTLGLTLLRFTHRISGEIYINGRETQSVNLNALRQRISFIPQDPILFSGTVRSNLDPFDELEDNFLNEALKTSGASSMIMAHTDDQKPIHITLDTHVASEGSNFSQGQKQVLALARAIVRRSKIIILDECTASVDDAMDQKIQKTLREAFGDATMLCIAHRLKTIVDYDKVMVLDKGVLVEYGPPAVLYHNNGHFRRMCDGSGITFLPPETRGSKSA

SEQ ID NO: 59887 - DNA, 3924 bp, Drosophila melanogaster
  CDS (1)..(3924)
atgcaggccagtaaacttccacccaatccccgcgagtcggcaggtatcctatcctcgctcatgttctgctttgccctgcccattctgttcaagggtcgcaaacagacgcttcagcccacggatctgtacaaaacgctgaatgagcatgaagcagcgagcctgggcgatgagttcttccagggatgggaggacgaggtggctcggtgccgccgaaaaggtgattccggccgtaaaccaagtgtcctgcgggtcatcggacgcgtcttcggctggaggctcattatgtccggtataacaattgccgccttggaactgggaaccagggccactgtgccgcttcttctggccggactcatatcggagttcagcgagcatggaaacggccatagctacaatgcccaaatttacgctgtgctccttatagcctgtatcttggccagcgttcttctaacccacccatacatgatgggaatgatgcacttggccatgaaaatgcgggtggcagtaagtagcgctatataccgaaaagccctgcggctcagtcgcacttcgctgggaggcaccacaaccggacaggtggttaacttgctctccaacgatcttaaccgcttcgatcgatgtcttatccattttcactttctgtggctggggccattggagctgctgattgcctcctacttcctgtacgaacagattggaatggcttccttctacggaatcagcatcctagtactctatctaccactgcaaacctacttaagccgcgtaacatcaaagctgcggctgcagacggcactcaggacggatcagcgagtacgcatgatgaacgaaatcatctcgggcatccaggttatcaagatgtacacctgggagcgtccatttggtaaacttatagggcagatgcggcgcagcgagatgagctccattcgccagatgaaccttttgcgcggcatcctgctctccttcgagataaccctgggtcgcatagccatctttgtgagccttctgggattcgtcctgggcggaggcgaactgacggcagagcgcgccttctgcgtcaccgccttctacaacatccttaggcgtactgtgagcaagttctttccgagtggaatgtcgcagttcgctgaactgttggtctcaatgcgtcgtataactaattttatgatgcgggaggaggcaaatgtaatagatatgtcggagcgaagggacgaaaaagccgaagaggagcaacatttactgaaagaagtggagaagaggtcttatcccgttggcattggcaaggaaccagataccttagtggaaatcaaagccttgagagcacgctggggccaggagcaacacgatcttgtcttaaacaacgtcaatatgtcgctgcggcgcggccaattggtagctgtgattggacccgtgggatcgggcaaatcaagcctcattcaggctattctaggagagctgccgcctgaatctggatcggtacaagtctcgggaaagtattcctacgcctcccaggagccctggcttttcaatgcatctgttcgcgacaacattctatttggcttgcccatggacaagcagcgctatcgaactgtgctcaagcggtgtgccctggagcgggatttggagttgttgcacggtgatgggacaatcgtgggcgagcgcggagcttcactgtccggtggacagcgagcgagaatatgtttggccagagctgtttaccgcagggcggatgtataccttttggacgatcctctcagcgcagtggacactcatgtgggtaggcacctgttcgatgaatgcatgcgcggcttcctgggcaaacagctggtgatacttgtcacccatcagctgcagtttctggaggacgccgatctaattgttatcatggacaagggtcacgtctcggcgtgcgggacttacgaggagatgctcaagagcgggcaggactttgcccagctcttggtggaaagtacccagaacagcgggggaggggatgagatcataacgtcgccgaacctttcccgccagagtagcgctttaagcactaaaagttccaatggaagctcatcctcgctagaatccatggtggaaaaggagaaaccaaagcccagtgcggtgtcgtcgcaggagtcgcgcagtggtggtcaaattggcttgtccatgtacaagaaatactttggcgcaggctgcggcgtcctggtttttgttgtcctgataatgctgtgtattggcactcagattctggcgtctggcggggactattttctttcctactgggttaagaacacagcttcttcatcaacgctggatatctactacttcactgccattaatgtgggcctggtcatttgtgctttgctccgaactctgcttttcttcaacatcaccatgcactcctccactgagctgcacaacaccatgttccagggcttatcacgcacggctttgtacttttttcacaccaatccctccggtcggatcctcaatcgattcgccaatgacctgggtcaggtggatgaggtgatgcccgccgttatgttggattgtatacagatcttcctcaccctgacgggcatcatctgcgtgctgtgcgtgaccaacccgtggtacttgatcaacacctttgcaatgatgttagcattttactattggcgcgatttttacctgaagacgtcgagagatgtgaagcgcttggaggccgtggctcggtcgccgatgtactcgcacttcagtgccactcttgttggacttcccacaatccgggcgatgggcgcccagcaaactctgatcggccagtatgacaactaccaggatctgcacagctccggctactacacctttgtttctaccagtcgtgccttcggctattacctagatcttttctgtgtggcgtacgtgatatcggtgatactgcacaacttcttcaatcctcctctgcacaatgctggccagataggtctggcaattacccaagcactgggtatgacaggaatggtgcagtggggcatgcgtcagtctgcggagctggagaacgcaatgacctcagtggagcgagtcttagaatacaaagatctggatcctgaaggggattttaattcgcctgcggaaaagcaacctccgaagagttggcccaaagaaggaaaattggtgaccaaggacttgagcctgagatatgagcccgataccaattcgccttgtgtgctgaagggactgagcttcacgattcagcccatggagaaagtgggcatcgtaggacgcacaggtgcgggaaagtcgtcccttatcaatgcacttttcagactatcctacaacgatggagcaatactcatcgacagtctggacacaaatgatatcggtctgcacgatttacgtagcaagatatccattattccacaggaacccgttctgttctccggcacaatgcgatacaacttggatcccttcgagcaatatcccgatgataagctttggaaggccctcgaggacgtccacctcaaggaggaaatttcggagttgccttcgggtctgcagagcatcatatctgagggcgggaccaactttagcgtaggccaacgccagttagtctgcttggcaagggccattctgcgcgagaatagaatcctagttatggacgaggcaacggcaaatgtggatcctcagacggacgccctgattcaggccaccattcgaaacaaattcaaggactgcacagtactcacgatagctcatcgtctaaacaccattatggactccgacaaagttttggtgatggatgctggtcacgtcgtcgagttcggttctccatatgagctgttgaccgcgtcaaaggctaaagtgttccatggaatggttatgcagacgggaaaggccagctttgatcatctactgaaagttgcagagaataccaaacaaaaccatatttga

SEQ ID NO: 59888 - protein, 1307 aa, Drosophila melanogaster
MQASKLPPNPRESAGILSSLMFCFALPILFKGRKQTLQPTDLYKTLNEHEAASLGDEFFQGWEDEVARCRRKGDSGRKPSVLRVIGRVFGWRLIMSGITIAALELGTRATVPLLLAGLISEFSEHGNGHSYNAQIYAVLLIACILASVLLTHPYMMGMMHLAMKMRVAVSSAIYRKALRLSRTSLGGTTTGQVVNLLSNDLNRFDRCLIHFHFLWLGPLELLIASYFLYEQIGMASFYGISILVLYLPLQTYLSRVTSKLRLQTALRTDQRVRMMNEIISGIQVIKMYTWERPFGKLIGQMRRSEMSSIRQMNLLRGILLSFEITLGRIAIFVSLLGFVLGGGELTAERAFCVTAFYNILRRTVSKFFPSGMSQFAELLVSMRRITNFMMREEANVIDMSERRDEKAEEEQHLLKEVEKRSYPVGIGKEPDTLVEIKALRARWGQEQHDLVLNNVNMSLRRGQLVAVIGPVGSGKSSLIQAILGELPPESGSVQVSGKYSYASQEPWLFNASVRDNILFGLPMDKQRYRTVLKRCALERDLELLHGDGTIVGERGASLSGGQRARICLARAVYRRADVYLLDDPLSAVDTHVGRHLFDECMRGFLGKQLVILVTHQLQFLEDADLIVIMDKGHVSACGTYEEMLKSGQDFAQLLVESTQNSGGGDEIITSPNLSRQSSALSTKSSNGSSSSLESMVEKEKPKPSAVSSQESRSGGQIGLSMYKKYFGAGCGVLVFVVLIMLCIGTQILASGGDYFLSYWVKNTASSSTLDIYYFTAINVGLVICALLRTLLFFNITMHSSTELHNTMFQGLSRTALYFFHTNPSGRILNRFANDLGQVDEVMPAVMLDCIQIFLTLTGIICVLCVTNPWYLINTFAMMLAFYYWRDFYLKTSRDVKRLEAVARSPMYSHFSATLVGLPTIRAMGAQQTLIGQYDNYQDLHSSGYYTFVSTSRAFGYYLDLFCVAYVISVILHNFFNPPLHNAGQIGLAITQALGMTGMVQWGMRQSAELENAMTSVERVLEYKDLDPEGDFNSPAEKQPPKSWPKEGKLVTKDLSLRYEPDTNSPCVLKGLSFTIQPMEKVGIVGRTGAGKSSLINALFRLSYNDGAILIDSLDTNDIGLHDLRSKISIIPQEPVLFSGTMRYNLDPFEQYPDDKLWKALEDVHLKEEISELPSGLQSIISEGGTNFSVGQRQLVCLARAILRENRILVMDEATANVDPQTDALIQATIRNKFKDCTVLTIAHRLNTIMDSDKVLVMDAGHVVEFGSPYELLTASKAKVFHGMVMQTGKASFDHLLKVAENTKQNHI

SEQ ID NO: 59889 - DNA, 1803 bp, Methanosarcina acetivorans C2A
  CDS (1)..(1803): transl_table=11
atgagccacgaacacagcacacacttcgatctgcctgtaggacaggtatttcgaaaagtaagaatcattgatcggttgttgaccatctatcacctggatctctggaaagtgcggattgccagcgtcgtgattcaggtgctgggcatcctatcggcaattaccggagcgtatctcgtaggggcggtaatcacaggggttcccgttgccgagctatggccggtgatcgggctgttgctcctgttcaccattacgcaattcgggatctcaaacctcaacagctactggtctcatgtcatcgcgttccggtcgctggccgagattcgcaaggcgctataccggaaactggacgagcttgccccggcatatgtgatcaagcagcggtcaggcgacctggcccgatccgcgctctccgatatcaacctgcttgagctatacattgcccacacactgcccgagtttctacaggcgatcgtggtgacacctttagcgctgatcttcatcgggcttatccactggagcctgatgatagtgcttgctccgttccttatagccgcagtaacggtgccagactggttcgctcgccgggcggaagcgcagggcaaggcccacagggaatcggcgggagcgatgagcgcagacgtgatcgattatatccagggcatgaaagagatcgtggccttcggggcgataaaattgtcgatgagccggctagatgccagccagcagaagtactcggacacttacgtagcctacgagagtcgcagcggcatggaacgtggagccggcgatgcattgctggcgggaggaatgttcgtcaccgtagcgctaggaggttggctctctatcatgggctacatgaacattgcactataccctgtagcagcagtcctcactgcaatggcgttttcacccgttatgcacttgctgaatatcgcccgacagctcagtcagaccgcggcagcagccgacagagtgttcggcataatgaatactcaaccttcggtcgtcgatcggatagtttcccctcctaaggggccgattatcccgaaaatacgctttgaagacgtgaggttccggtatgaccccgaaggacccgaagtactgaagggtgtgaacctgacggtatcgccgggagagacggtcgcactggttggtccttcaggtgcgggaaagtcgacctgtacttacctgttactcaggctatgggacccttctgaaggctcggtcaggatcggcgggtacgacctgcgtcagttccctcaggagtaccttcgggatatgatcgcctatgtgcctcaagatgtctacctgttcaatatctcagtgagggaaaatatcctcctcggcaggagtgacgctaccgacgccgaagttcgggaagcggcccgtcgggcattcgctcttgatttcatcgaggctttgcccgataagtggaacaccgtgcttggagagcgtggcgagacactttcgggtggccaacgccagaggattgcgatagcgcgggcatttctgaaaaacgcacctatactggtcatggacgaagcagtttccagcctggacaccgaatcggaggtcgcagtgcgccgggctatggcagaggtctccagggacaggacaacgattattgtagctcaccgtccttcgacgattcgtagtgcggatacggtagtcatgttagacaaaggccgtgtagcagaatccgggaaatacgacgaattagtaatggcaggagggaatttcgagagccttatcaccgggaaaacatcaggagcgataccgtttccccttaaaacccgaatttaa

SEQ ID NO: 59890 - protein, 600 aa, Methanosarcina acetivorans C2A
MSHEHSTHFDLPVGQVFRKVRIIDRLLTIYHLDLWKVRIASVVIQVLGILSAITGAYLVGAVITGVPVAELWPVIGLLLLFTITQFGISNLNSYWSHVIAFRSLAEIRKALYRKLDELAPAYVIKQRSGDLARSALSDINLLELYIAHTLPEFLQAIVVTPLALIFIGLIHWSLMIVLAPFLIAAVTVPDWFARRAEAQGKAHRESAGAMSADVIDYIQGMKEIVAFGAIKLSMSRLDASQQKYSDTYVAYESRSGMERGAGDALLAGGMFVTVALGGWLSIMGYMNIALYPVAAVLTAMAFSPVMHLLNIARQLSQTAAAADRVFGIMNTQPSVVDRIVSPPKGPIIPKIRFEDVRFRYDPEGPEVLKGVNLTVSPGETVALVGPSGAGKSTCTYLLLRLWDPSEGSVRIGGYDLRQFPQEYLRDMIAYVPQDVYLFNISVRENILLGRSDATDAEVREAARRAFALDFIEALPDKWNTVLGERGETLSGGQRQRIAIARAFLKNAPILVMDEAVSSLDTESEVAVRRAMAEVSRDRTTIIVAHRPSTIRSADTVVMLDKGRVAESGKYDELVMAGGNFESLITGKTSGAIPFPLKTRI

SEQ ID NO: 59891 - DNA, 1710 bp, Xanthomonas axonopodis pv. citri str. 306
  CDS (1)..(1710): transl_table=11
ttgtggcccttcatccaacgccagcgcggcctgttcgttgcctggatggtcgcgctgacgatttccgctgccgccacactgagcctgccggcagcggtcaagcgcatgatcgatcaaggcttctccggcgatgcgcagatcaatcaggcgttcgcgctgttgttcgtagtctcggtggtgctggcggtggcgaccgctgcccgcttctatttcgtcgcactgctgggcgaaaaagtggtcgccgacctgcgtggccggctgtacgcacacctgatcggcctggacgccggatttcatgaccgcagccgcagcggcgaactggtgtcacgcctgtcggccgacagcgaattgctgcgtgggctgatcggcagcaccatgtcggtggccttgcggagcgtggcaacggtcattggcagcgtggtgatgttgttcgtcaccagcccgcgtctggccggcttcaccttgatcggcatcccgctggcggtactgccgatcgtgctgggcgcacgccgcctgcagaagatttcgcgcgcaagccaggaccgcgtggccgacgccaatacgctggcggccgaaaccctgggcgccgtgcgcaccgtgcaggcgcatgcgcgcgagcgttacgaaagccaacgtttcagtacggcactgctgaccgccatcgacaccgcaaaggtgcgcatccgcacccaggccaccgtgaccgcagtggcgatcatgctgatcttcggtgcgatcgtcgcggtgttgtggctgggcgcgcacgatgtgatttctggccgcatgacgcccggcacgctgggccaattcgtgctgtacgcgctgatcggcggcggttcggtcggtgcactggccgaggtctggaacgagttgcagcgtgccgccggcggcatgggccgggtgagtgaattgctcgacgaacaaccgctgatcgtggcgccggccacgccgcaggccttgccgcagccgctgcgcggcgcgatccatttcgaccaggtggtcttccattacccgcaccgcccggacgcgccggcgctggacgggttcgacctgcatgtcagccccggcgaaaccgtggcgctggtgggcccgtccggagcgggcaagagcacggtgctgtcgatgctgctgcgtttccacgacccggtcagcggcaaggtgcgcatcgacgacatcgacctgcgcgacgccgacccggtcctgctgcgcgagcacatcgcgctggtaccgcagcaacccacgttgtttgccgccagcgccgccgacaacatccgctacgggcgcctgcacgccagcgatgccgaggtggaagcggcggcggcggcggccgaagccgatgtcttcatccgcgccctgccccagggctacgccagcgaactgggcgagcgcggcacgcgcctgtccggcggccagcagcaacgcgtggcgattgcgcgtgcgctgctcaaggatgccccgatcctgctgctggacgaagccaccagcgcgctcgatgcgcacagcgagcgcgccgtgcagcaggcgctggagcggctgatggaaggccgcaccacgttggtgatcgcgcatcgcctggccaccgtactcaaagccgaccgcatcgtggtgatggatgccggccgcatcgtcgcgcagggtacgcatgcgcagttgatcgccgaaggcggtctgtatgcggagctggcgcggctgcagttcatcgaccaatga

SEQ ID NO: 59892 - protein, 569 aa, Xanthomonas axonopodis pv. citri str. 306
MWPFIQRQRGLFVAWMVALTISAAATLSLPAAVKRMIDQGFSGDAQINQAFALLFVVSVVLAVATAARFYFVALLGEKVVADLRGRLYAHLIGLDAGFHDRSRSGELVSRLSADSELLRGLIGSTMSVALRSVATVIGSVVMLFVTSPRLAGFTLIGIPLAVLPIVLGARRLQKISRASQDRVADANTLAAETLGAVRTVQAHARERYESQRFSTALLTAIDTAKVRIRTQATVTAVAIMLIFGAIVAVLWLGAHDVISGRMTPGTLGQFVLYALIGGGSVGALAEVWNELQRAAGGMGRVSELLDEQPLIVAPATPQALPQPLRGAIHFDQVVFHYPHRPDAPALDGFDLHVSPGETVALVGPSGAGKSTVLSMLLRFHDPVSGKVRIDDIDLRDADPVLLREHIALVPQQPTLFAASAADNIRYGRLHASDAEVEAAAAAAEADVFIRALPQGYASELGERGTRLSGGQQQRVAIARALLKDAPILLLDEATSALDAHSERAVQQALERLMEGRTTLVIAHRLATVLKADRIVVMDAGRIVAQGTHAQLIAEGGLYAELARLQFIDQ

SEQ ID NO: 59893 - DNA, 2601 bp, Drosophila melanogaster
  CDS (1)..(2601)
atgctgtactgcccgcccaacgtgaccctcagcgaggtgtggacgcagcatggcatctcgcattgcttcatggacaccgtgggaccggcggtatacggtggattccttctgctcttcggcagcattcagttgctgatgtaccggaagtatgccaccaggattacggatcccacgcaaatctccaagtcacgactgttcgcgatgcaactctttctgttgctcctgctcccggttttggctctattgcggtttctgatgaatgcacgtatttatccagatagtgcggtgtacggctatatgatcttctccacttgcgttgtgtgcttctcctacccgttcagcatctgtttgatactcaaggagcgctactaccagctgccctcaatgcccacccgaggacatggacttgttctattgctattctggacgttggctttcattaacgagtcgctggccttcataaatttgcgccacgaggactggtggttccacctaaaaacgaacaaggatcaaattgagatgggcttgtttgtcacccggttcctgtgctccctgctcatcttcgttttgggtctgaaagctcctggcatcatggccccgtacaatccacatcagcggctggacaatgataccgccaacgaatcgcagggaaacgtgcagacaggatctgctttcaggaacggatggcgcaagctgcgcaccgtctttccgtacctctggcctaaaaagaatattgctctgcagatagccgtcatcgtttgcattatactgctgcttgccggtcgagtcataaagctgtttttgccgatttatcgcaagaagttggttgacagtcttaccattgcaccgatcgtctttcgctgggactttgtgctgatctatgtggcattgtccttcctccagggtggcggcactggtagcatgggattatttaataaccttcgcaccttcctctggatacgggttcaacagtacacgacccgggagatcgagattgagctgttccggcatctgcaccagctttcgcttagatggcacttgcaacgcaaaacgggagaggtgttgcgtgtcatggatcgcggcacggactcgatcaacaacctcctcaactatattgtcttctcgatcgcaccaaccattctcgatctactcgttgccgtggcatactttgtttacgccttcaattggtggtttggcctaatcgtcttcctcaccatgttcctgtatatagcctctaccattgcaatcactgaatggagaaccaagtaccagaggagaatgaacctggcggacaatgagcagcgagctcgcagcgtggactcccttctcaatttcgaaacagtcaagtactacggagcggagcactacgaggtggattgctacagggaggccattctcaagtaccaaaaggaagagttcctctcaatgctgacactcaacatgctgaacacagcccagaatattattttgtgcttgggcctactggccggatcgctgctctgtgtatacttggtagttcaccatcaaaccctcaccgtgggcgattttgtgctcttctccacctatctgatggaattgtacatgccactgaattggttcggcacctattaccgagccatacagaagaacttcgtggacatggagaacatgttcgatctgctgaaagaggaggaagagattgtggatgccccaggctgttcgccccttctaactgccggcggtggcattgagttctcaaacgtgacctttggctattcaccggagaagatagtgctgcgcaatgtgagcttcacagttccggccggtaagacggtagcgattgttggaccctctggagccggtaagagcaccatcatgcggctgcttttccgcttttacgatgtgcagactggtgctatcctgattgacggacaaaacatcaagcttgtgcagcagcagagtctgcgaaaggccattggagtggtgccccaggatacggttctctttaacaacaccatcttctacaacattgaatatgccaagttgggcgcttcggacgaagctgtctatgaggctgctcgcgccgccgacattcacgaaaggattctcggctttccggagaaatatgagacaaaggtgggcgaacgaggtctgcggctcagtggaggtgaaaagcaacgcgtagccatcgccagaacgcttcttaaggcgcccattattgtgctcctggatgaagccacctcagctttggacacccacacagaacgcaatattcaggctgctttggccagggtgtgcgcaaatcgtaccaccatcattgttgcccatcgtctttccaccatcatccatgcggacgagattctggtcctgcagcagggaagcatagcggagcgtgggcgacacgaagagcttgtgctgcgcgaagatggcatctacgcggacatgtggcaacagcaactcaagaatctagatgcagaacagagtggtggttctgataacggagacgctagtgcagaatcgggatcggagaaacgcagggcaggaggagcaggaggaccaagtggtactggaacgggtggtgcccacttcagggcaggacatgctcatgggggagcacgctag

SEQ ID NO: 59894 - protein, 866 aa, Drosophila melanogaster
MLYCPPNVTLSEVWTQHGISHCFMDTVGPAVYGGFLLLFGSIQLLMYRKYATRITDPTQISKSRLFAMQLFLLLLLPVLALLRFLMNARIYPDSAVYGYMIFSTCVVCFSYPFSICLILKERYYQLPSMPTRGHGLVLLLFWTLAFINESLAFINLRHEDWWFHLKTNKDQIEMGLFVTRFLCSLLIFVLGLKAPGIMAPYNPHQRLDNDTANESQGNVQTGSAFRNGWRKLRTVFPYLWPKKNIALQIAVIVCIILLLAGRVIKLFLPIYRKKLVDSLTIAPIVFRWDFVLIYVALSFLQGGGTGSMGLFNNLRTFLWIRVQQYTTREIEIELFRHLHQLSLRWHLQRKTGEVLRVMDRGTDSINNLLNYIVFSIAPTILDLLVAVAYFVYAFNWWFGLIVFLTMFLYIASTIAITEWRTKYQRRMNLADNEQRARSVDSLLNFETVKYYGAEHYEVDCYREAILKYQKEEFLSMLTLNMLNTAQNIILCLGLLAGSLLCVYLVVHHQTLTVGDFVLFSTYLMELYMPLNWFGTYYRAIQKNFVDMENMFDLLKEEEEIVDAPGCSPLLTAGGGIEFSNVTFGYSPEKIVLRNVSFTVPAGKTVAIVGPSGAGKSTIMRLLFRFYDVQTGAILIDGQNIKLVQQQSLRKAIGVVPQDTVLFNNTIFYNIEYAKLGASDEAVYEAARAADIHERILGFPEKYETKVGERGLRLSGGEKQRVAIARTLLKAPIIVLLDEATSALDTHTERNIQAALARVCANRTTIIVAHRLSTIIHADEILVLQQGSIAERGRHEELVLREDGIYADMWQQQLKNLDAEQSGGSDNGDASAESGSEKRRAGGAGGPSGTGTGGAHFRAGHAHGGAR

SEQ ID NO: 59895 - DNA, 4209 bp, Drosophila melanogaster
  CDS (1)..(4209)
atggatagcagtgcaaagccaacgcggaaaaatccgcgacagcatgcaaatattatttcacaactaatatttgcctgggcgataccattactatatcgaggttcccgcagaggccttaatacggatgacctgacacaatgtctgaaggaagatcgatccgagcagttgggcgaccgtttggaggatcaatggtttaaggaactagagcgatctcaccgcaagaaacagaagccgcatctcagaaacgcacttttccgctgtttcctaggacccacgatcatcaatggcctcatttgctttatctacatagtgatcaagaccttaattccagctgttcttgcacagctgttgattcagtttcaaaaaactcctgttgcgcaattaagaaatatcgatgtcaatgatatttcaatatcagattccctgaatcgaacagcacgggcaattccaaactatgtgctgagtcaggctgtcgccaactctagtggatctccaggggatgcacttttccccaaatcgctggacaaagcgggtccactggagccgattcagcctccagtagaggaagtggatcacaatgcaaccgctgtgcgaagcatcttggatcagaccgtcgagcacatgtggaacgatatgaacagtctgggcgccgtcctggttctttcgacgctgttctgctgcttcctgttgcaccacgtcgatctccgacagcgcctaatgggtgcacggatgcgaatagcctgctgctcgctgatctaccggaaaactctacggctctcgatgaaaacggctggtcagacgccagctggttacctaatcaaccttctttcgaatgatgtgaatcgtttggactatggcttcatattcatgcactggatctggattatgccattgcaggcgatgctcacgtgctacctgatttggctgaacattggcatcccagcaattgtgggtgtagttggactgctgctaaaaacggtgcccgtgcagacggccttgagcaaggtaacctctgtgctgcggatgagaattgcggagcgaacggacgcgagagtgggcattatgaacgagctggtgcagggcattcaggttataaagatgtacgcctgggaaaaaccgttccaggcggtggtggccgaagctcggcgtagcgagatcaagcagatccgatatgcatcttacctgcgtggcttctacctcagcaccatggtgttcacggagcgatccactttgtacatcaccctggcagcggctgctttgatgggccaaaccataaccgcagactttgtgttctcagcagccagttactacaatatcctgcaactggtggctgccatttggtatccactagctgtaagctttggagcggaagcattggtttctctgcgtcggattcaggacttccttatgctcgagggacgtgaggagcgcactcaaggacttacccataagcgagatcaggaaggtggagactccagagcagtgaccattaaggacattaatgccagctgggatattgagaagccacagaaaacgctccaaagcattaatctgcagatcgagaagggccaactgtgcgcagttattggaccggtaggtgccggaaagagttctatcctccagttactgctgggtgaactgcccgttatcgatggaggcgtttttatccagggtgacctctcctatgcagcccaggaaccatggttatttacgggatcggtgcgaaataacatccttttcggtgaagagtttgataggaagcgttaccaggaggtaacacggtgttgtgcccttagcacggatttccaacagctgccaaacggagacaaaactcttgtgggtgagcgtggggcatccctttccggaggccaaagagcacgcatcagcttggcccgagctgtctataagcccgcacagatttacttgatggatgatccgctaagtgctgttgatgcgcacgtgggcaggcatctcttcgatgaggtgattggacccagaggacgactggctcagctgaaggcgactcgcattctagtgacccaccaggtgcacttcctgtccgaggccgacgttattgttattgtcgaccaaggaagaattttaaggcaaggcacctaccaggagctgatcaacagtgatctggacttcgctaggctccttgagcgacccaaggaggaggaggaaggggaaaacagtcgcaatcaaacatccccgctgagtgtcaattcactggagagtgacgacgaggacatacctttcatcgatggtgtaaaagatgggtaccagcagttgagaaaacagagcagctcggtacatggcagcaagtcgttggacagtacccaactggatgataatgtcgatgaggatgatctggccgaggcccaagcatctggtggcatttcaccacgcgtttggtacgagtacttccatgcgggcagtactcttctgagcttcagcttcatggtctttgttatggtgatgtcccaggtggtgtgcagtagttccgatttctttgcgaacatctggacacagcaggagcatcagaggtcgcagggagaggccactttctcaaccttcgagtgcatgtacatatacggtgctctgatcatcgccgtggtgatcatgaccacattccgtggcttcctgttctttaagatttgcatgcatgcctccaaggtgctgcacgatcgcatgtttgcctgcatcctgcacgccaccatgagattctttgacaccactccgtctggaaggattctgaatcgcttctccaaggatatgggcgccattgatgagttgctgccgcgggccatgatggattttatacagatcgctctggtgatgtttggaattctgattgttattggtatactgaatccggttttggtggccgccatgttggtggtagccgttgtggatgtgctcatcctgaagttgtacctgagaccttcgcaggatctcaagcgattggagggcatatgccgcagtccggtgttttcccatctcagtgcttcccttacgggtctggccatcattcgatcccgccagttgcaggatgtggtggccaaggagtttgatttgctgcaggatgtgcacagtagcgtgtggcagctgaccatggcagtgaatacgactttaggcttgtggctggactgtgtcagttgcatcttccttacctctgtcaccttcagcttcattatctccagtgaaaccacttatagcggcaacgtaggcttggccattgcccaggccatgatcctaaccggaatggtgcaatatggagtgcgacaagtggccgagtccttgcagcaaatgaccagcgtggagcgcgtcctgcaatacaccgaactggagcaggagccggcgctgggcgaaaaaacgccaccgcagcagtggcccacacgcggtcaggtggagttccgcaatatgagctgtcgttatgatccaaatggatcgccggtgcttaggaacctgaatctcaccatcgaggcgggctggaaggttggcattgtgggacgtacaggagctgggaaatcgtcgctaattggagctctcttccgattggctcacatcgagggagagatttttatcgatggcatagagacgggaacgatttcattggaaattctgcgcacccgcatctcgattataccccaggatccggtactgttttccgctaccatccgctacaatctggaccccttcgagcggtataccgacgctgagctgtggagcgctttggaagatgtggagctgcgtaaagccattcccggtctggactacatggtaacggagaggggcggcaatttcagcgtgggccaacgtcaattgctctgcctggccagggcgattctgcgaaacaacaaggtgctggtactggatgaggccacggccaatgtggatccacaaaccgatgccctgatccagcgcaccatacgcatcaagttcaagcagtgcacagtgctcaccgttgcccatcgattgcacacagtcatggattcggatcggattatagtaatggatgctggtgtcgccgtggaattcgatgtgccgtacttgctgttgaagaagtcacagggacatctccggcaaatggtagaggccacaggcggggaatcggaagcactgaagaagacggccagtgacagccacaaaagaatgcaaagagaacgggacgagcgagatcgcgatcaggatgagagccaggagtga

SEQ ID NO: 59896 - protein, 1402 aa, Drosophila melanogaster
MDSSAKPTRKNPRQHANIISQLIFAWAIPLLYRGSRRGLNTDDLTQCLKEDRSEQLGDRLEDQWFKELERSHRKKQKPHLRNALFRCFLGPTIINGLICFIYIVIKTLIPAVLAQLLIQFQKTPVAQLRNIDVNDISISDSLNRTARAIPNYVLSQAVANSSGSPGDALFPKSLDKAGPLEPIQPPVEEVDHNATAVRSILDQTVEHMWNDMNSLGAVLVLSTLFCCFLLHHVDLRQRLMGARMRIACCSLIYRKTLRLSMKTAGQTPAGYLINLLSNDVNRLDYGFIFMHWIWIMPLQAMLTCYLIWLNIGIPAIVGVVGLLLKTVPVQTALSKVTSVLRMRIAERTDARVGIMNELVQGIQVIKMYAWEKPFQAVVAEARRSEIKQIRYASYLRGFYLSTMVFTERSTLYITLAAAALMGQTITADFVFSAASYYNILQLVAAIWYPLAVSFGAEALVSLRRIQDFLMLEGREERTQGLTHKRDQEGGDSRAVTIKDINASWDIEKPQKTLQSINLQIEKGQLCAVIGPVGAGKSSILQLLLGELPVIDGGVFIQGDLSYAAQEPWLFTGSVRNNILFGEEFDRKRYQEVTRCCALSTDFQQLPNGDKTLVGERGASLSGGQRARISLARAVYKPAQIYLMDDPLSAVDAHVGRHLFDEVIGPRGRLAQLKATRILVTHQVHFLSEADVIVIVDQGRILRQGTYQELINSDLDFARLLERPKEEEEGENSRNQTSPLSVNSLESDDEDIPFIDGVKDGYQQLRKQSSSVHGSKSLDSTQLDDNVDEDDLAEAQASGGISPRVWYEYFHAGSTLLSFSFMVFVMVMSQVVCSSSDFFANIWTQQEHQRSQGEATFSTFECMYIYGALIIAVVIMTTFRGFLFFKICMHASKVLHDRMFACILHATMRFFDTTPSGRILNRFSKDMGAIDELLPRAMMDFIQIALVMFGILIVIGILNPVLVAAMLVVAVVDVLILKLYLRPSQDLKRLEGICRSPVFSHLSASLTGLAIIRSRQLQDVVAKEFDLLQDVHSSVWQLTMAVNTTLGLWLDCVSCIFLTSVTFSFIISSETTYSGNVGLAIAQAMILTGMVQYGVRQVAESLQQMTSVERVLQYTELEQEPALGEKTPPQQWPTRGQVEFRNMSCRYDPNGSPVLRNLNLTIEAGWKVGIVGRTGAGKSSLIGALFRLAHIEGEIFIDGIETGTISLEILRTRISIIPQDPVLFSATIRYNLDPFERYTDAELWSALEDVELRKAIPGLDYMVTERGGNFSVGQRQLLCLARAILRNNKVLVLDEATANVDPQTDALIQRTIRIKFKQCTVLTVAHRLHTVMDSDRIIVMDAGVAVEFDVPYLLLKKSQGHLRQMVEATGGESEALKKTASDSHKRMQRERDERDRDQDESQE

SEQ ID NO: 59897 - DNA, 1851 bp, Thermosynechococcus elongatus BP-1
  CDS (1)..(1851): transl_table=11
gtgggcagttctttagcctatcttaagaatgaggcgagttatctgcttgccgccgattatcctgcactttggggagaccaagaagccttgcatccgtttctacgactcctacaccacagccaacgctaccaacgccaagtggggtttgcttccctttactctatcctgaataaaatttttgatctggctccccctgttctaattggcattgcggtggatttggtggtgaagcggcaggattccctctttgcccgctgggggctagcaagttttgagcagcaactcttggctttagcgagtctgtcgtttgtgatttggagcttggagtcgctctttgagtatgcctatgcccgcagttggcgcaatttagcccagcagatccaacacgacctgcgccttgaggcctatgcccatatccaagaaatggatttggccttttttgaggagcgcagcagcggtgttttgctctcgattctcaacgatgacattaaccaactggagcgatttttggatggcggtgccaatgaagtgttgcaagttacaaccaccgtcgttgttattggtggcattttcttttatttggcccccaatgtcgcaatctggggaatgctgcccatgccctttattctctgggggtcggtgatctttcagcggcgacttgcacctcgctatcgggatgtgcgggaaaaggcgggactcctcaatgaacgcttggccaacaatattacgggcattcaaacgatcaagagctttacggctgagccctacgaactggagcgcctgcgctgggacagtgaagcctaccaacagagtaatcgccgcgccattcgcctcagtgctgcctacgttccattgatccgctttctgattttatttggttttacgggaaccttggtgctgggcggcttggcagcttttcaggggcgcttggatgtgggtgcctatagcacgatggtctatctgattcaacgcttgctctggccgctgacccgtttgggggaaaccctagatcagtatcagcgagccatggcctcaacgcagcgggtgctgaatttgctggaaacaccgatcgcgattggtacgggcgatcgccccctggatccgtgccatgttcaaggggaagtgcgctttgaagccgttagctttgcctatgctggccgtgcccctgtactgaaaaatgtgactttacatgtccctgcgggtcagacgatcgccattgtcggctccaccggatccggcaaaagtacccttgtgaaattgttactgcgattctatgaggttcaagaggggcgcatcctcattgatggcgtagatattcgcgagtattgcctgcgggatttgcgtagagccattggctgggtgagccaagatgtctttctcttccacggcaccgtctttgagaacattgcctatggcagtccgggggcaacccttgctgatgtcatccacgctgcaaaactggctgaagcccatgattttattgagcaactgccccagggctatgacacggtggtgggggaacggggtcaaaaactctctggtggtcagcggcaacggctggcgatcgcccgcgcgattctcaaagacccgccgattcttgttctcgatgaagccacatccgctgtggataacgaaaccgaagccgccatccagcgatcgctggcccagattaccgcccatcgcaccacgattgccattgcccaccgcctctccaccattcgccatgccaactgcatctatgttcttgagggcggtgaaattgtcgagcaagggaaccacgaggcactcctggctcagcagggagtctattacggcctttggcaagttcaagcgggaattctggcgacttag

SEQ ID NO: 59898 - protein, 616 aa, Thermosynechococcus elongatus BP-1
MGSSLAYLKNEASYLLAADYPALWGDQEALHPFLRLLHHSQRYQRQVGFASLYSILNKIFDLAPPVLIGIAVDLVVKRQDSLFARWGLASFEQQLLALASLSFVIWSLESLFEYAYARSWRNLAQQIQHDLRLEAYAHIQEMDLAFFEERSSGVLLSILNDDINQLERFLDGGANEVLQVTTTVVVIGGIFFYLAPNVAIWGMLPMPFILWGSVIFQRRLAPRYRDVREKAGLLNERLANNITGIQTIKSFTAEPYELERLRWDSEAYQQSNRRAIRLSAAYVPLIRFLILFGFTGTLVLGGLAAFQGRLDVGAYSTMVYLIQRLLWPLTRLGETLDQYQRAMASTQRVLNLLETPIAIGTGDRPLDPCHVQGEVRFEAVSFAYAGRAPVLKNVTLHVPAGQTIAIVGSTGSGKSTLVKLLLRFYEVQEGRILIDGVDIREYCLRDLRRAIGWVSQDVFLFHGTVFENIAYGSPGATLADVIHAAKLAEAHDFIEQLPQGYDTVVGERGQKLSGGQRQRLAIARAILKDPPILVLDEATSAVDNETEAAIQRSLAQITAHRTTIAIAHRLSTIRHANCIYVLEGGEIVEQGNHEALLAQQGVYYGLWQVQAGILAT

SEQ ID NO: 59899 - DNA, 1788 bp, Shewanella oneidensis MR-1
  CDS (1)..(1788): transl_table=11
gtgtctcaacaatcttcttacgcctcggttagccagcgggcggtgttaccttggatttggcaatttcttaagccctatcgcccgcgggttgtcgcggcgattgtattcttattgatcggttctttggcttggttatccctcggccaaggtgtgcgtttgatggtggacgaggggtttattaaggataacgcccagcgccttaatgagatcattctgttcgtactggtgattactgctgtgagtggcactgcggtgttctgccgcttttatctgatgacatggcttggggagcgtgtcagtgccgatattcggcttgcggtttacaatcaattacttaagttatctccggcgttttatgccaaggtgcgtactggcgaggtgatttcgcgttttaccgccgattccactttactgcaaacagtggtcggctcgagtctttctatggcactgcgctccggcgtgacggttattggtgggctggcgatgatgggaatcaccagcgtgaagatgacactactggtgctactggcggtacctttagtgcttggaccggttagtttttttggcagaaaggtgcgcaccttagcgcgcgagagccaagatagggtggcggatctcggtgcctatgtggatgaaaccttgcatgagatccacacagtgcaggcctatggccatgaggataaggaccgcagtttatttaacggccgtgtcgaagatgtgatgaccgccgccagcggccgcattcgttaccgcgcgctgctgatttcatcagtgatgttcctcagtattgccgctattgcgctagtgacttgggtcggcgcccacgatgtgatgtcgggtaagatgacgggcggcgaactctcagcctttatgttttatgccgtgatggtcgctggcgcggttgcgaccattagtgaagtggtgggggaaatccaacgcgcctcgggcgccgccgaacgtttaatcgagttggctgagactgaggtcgatattccggcgccgctggtgcctaaaactttgcccacgaaagtgcgtggcgagctgcaattacatcagctgaacttccattatcccgagcaaactcagttagtgctcagcgacttaaaccttgtaataaatgccggcgagcgggtggctttggtcggcccgagtggtgccggtaagagtaccctgtttcagttattgcagcggttttatgtgccttcatcgggcagtatcttattggatgggattgatattgctgcgctttcaccacaggatttacgggcacagtttgcgctggtgccgcaggattcggttatttttgccaccagtgtgctggaaaacgtgcgctatggccgcgtcgatgctagcgagcaagaagtgattgatgcctgtattgcagcccgagcacatgagtttatcagtgaatttagcgagggatatcaaacctatttgggtgagcgtggcgtgcgtttatctggcgggcaaaaacaacggattgccattgcgagggccattttagccgacagacccatcctattactcgatgaggccaccagtgcactcgatgccttgagtgagcaaaaagtcaaacaggcgctcgatgagttaatggcaggtaaaaccacgctaatcatcgcccatcggctagccaccgtaattaatgcggatcggattattgtgtttgataaggggcgaatcgttgccagcggcaaacatcaagatttaattaaaaccaatgctttataccgcgagtttgcgactctgcagctattgacggatgaggctatgccactgagtgattaa

SEQ ID NO: 59900 - protein, 595 aa, Shewanella oneidensis MR-1
MSQQSSYASVSQRAVLPWIWQFLKPYRPRVVAAIVFLLIGSLAWLSLGQGVRLMVDEGFIKDNAQRLNEIILFVLVITAVSGTAVFCRFYLMTWLGERVSADIRLAVYNQLLKLSPAFYAKVRTGEVISRFTADSTLLQTVVGSSLSMALRSGVTVIGGLAMMGITSVKMTLLVLLAVPLVLGPVSFFGRKVRTLARESQDRVADLGAYVDETLHEIHTVQAYGHEDKDRSLFNGRVEDVMTAASGRIRYRALLISSVMFLSIAAIALVTWVGAHDVMSGKMTGGELSAFMFYAVMVAGAVATISEVVGEIQRASGAAERLIELAETEVDIPAPLVPKTLPTKVRGELQLHQLNFHYPEQTQLVLSDLNLVINAGERVALVGPSGAGKSTLFQLLQRFYVPSSGSILLDGIDIAALSPQDLRAQFALVPQDSVIFATSVLENVRYGRVDASEQEVIDACIAARAHEFISEFSEGYQTYLGERGVRLSGGQKQRIAIARAILADRPILLLDEATSALDALSEQKVKQALDELMAGKTTLIIAHRLATVINADRIIVFDKGRIVASGKHQDLIKTNALYREFATLQLLTDEAMPLSD

SEQ ID NO: 59901 - DNA, 1764 bp, Pseudomonas putida KT2440
  CDS (1)..(1764): transl_table=11
atgcccgaatcggtttccctgcgccaacgccgtgccttgcgcctggcctggcagttcgttcgcccttatcgccgccaggtgctgctggcattgctggcgctggtggtcaccgctgccatcaccctgtcgatgggccaaggtatccgcctgctggtggatcaaggcttcatgacccgctccgcgcaccagctcaatcagaccatcgggctgttcctgctgctggtgctggcgctggcggtgggtaccttcagccgtttctatctggtgtcgtggattggcgagcgttgtgtggccgatatccgtcgtgcggtcttcgatcacctgatcggcctgcacccaggttttttcgaggacaaccgcagctccgagatccagtctcggctgactgcggacaccaccttgctgcaatcagtgatcggttcatcgctgtcgatgttcctgcgcaacgcgctgatggtcattggcggtgtggtattgctgttcatcaccaaccccaagctcaccagcatcgtggtggtaacgctgccgctggtgttggcaccgatcctgttgttcggccgtcgggtgcgcagcctgtcgcggcagagccaggacagagtcgccgatgtgggcagctacgtggctgagacgctggggcagatcaagaccgtgcaggcctacaaccaccaggcgcacgaccgcgaactgttcgccgatacggtcgaagcagcgtttactgttgcccgcaagcggattacacagcgtgcctggctgattaccctggtgatcgtgctggtgttgggggcggtgggggtgatgctgtgggtcggcggcatggatgtgatcgccgggcgtatatccgcaggcgagctggcagcattcgtgttctacagcctgatcgtcggcagcgccttcggtaccctcagtgaggtgatcggcgagctgcaacgggccgcgggtgcagccgagcgcattgccgaactgttggccgcgcgcagtgccatcctgccccccgacgtggcgcaggtgctgccgcagccgcgggccagcggtcatatcgagctgcaacaggtcgtgttcgcttacccttcacggcccacggtggcagctgtcgacggcctgagcctgaccatcgaacccgggcagaccgtcgccctggtaggcccttccggggcaggcaagtcgaccctgttcgatctgttgctgcgcttttacgacccacagcaagggcgcatcctgctcgatggtcagccggttaccgactttgatcccgaccagctacgccggcagttcgctttggtggcacaaaacccctcgctgttccgtggcacggtggaggccaacattcgttatggccggcccgaggcgaccttggctgaagtcgaagcagcagcccgcggcgcccatgccgacgaattcatccggcaattgccccaaggctaccagaccccgctgggggagggcggcatcggcctttccggcgggcaacgccagcgcctggcgattgcccgggccttgctggtcgatgcgccgatcctgttgctggacgaagccaccagtgcccttgatgcacaaagtgaatacttgatccagcaagcgctgcccagcctgatggccggccgtaccacgctggtgatcgcccatcgcctggccacggtacagcatgccgagcgcatcgcggtcatcgaccagggccggctggtggcggtgggcacccaccgtcagttgattgaggacagcccgttgtatgcgcggctggcagcgctgcaattcaccacgggctag

SEQ ID NO: 59902 - protein, 587 aa, Pseudomonas putida KT2440
MPESVSLRQRRALRLAWQFVRPYRRQVLLALLALVVTAAITLSMGQGIRLLVDQGFMTRSAHQLNQTIGLFLLLVLALAVGTFSRFYLVSWIGERCVADIRRAVFDHLIGLHPGFFEDNRSSEIQSRLTADTTLLQSVIGSSLSMFLRNALMVIGGVVLLFITNPKLTSIVVVTLPLVLAPILLFGRRVRSLSRQSQDRVADVGSYVAETLGQIKTVQAYNHQAHDRELFADTVEAAFTVARKRITQRAWLITLVIVLVLGAVGVMLWVGGMDVIAGRISAGELAAFVFYSLIVGSAFGTLSEVIGELQRAAGAAERIAELLAARSAILPPDVAQVLPQPRASGHIELQQVVFAYPSRPTVAAVDGLSLTIEPGQTVALVGPSGAGKSTLFDLLLRFYDPQQGRILLDGQPVTDFDPDQLRRQFALVAQNPSLFRGTVEANIRYGRPEATLAEVEAAARGAHADEFIRQLPQGYQTPLGEGGIGLSGGQRQRLAIARALLVDAPILLLDEATSALDAQSEYLIQQALPSLMAGRTTLVIAHRLATVQHAERIAVIDQGRLVAVGTHRQLIEDSPLYARLAALQFTTG

SEQ ID NO: 59903 - DNA, 1794 bp, Mycoplasma penetrans HF-2
  CDS (1)..(1794): transl_table=4
atgaaacaacatattggatatataagtgtatttaaaagactaatattgatgttgagtaaaaacaaaaaagctttttatggtgcaatctttttgtcattattgaaaactactttttctgttgctacttcaattggtttaggaattgtgattcaaaactttttctatgatttaaatagcaattcaccagcttctgcatttattaacttctcaattggttgtgctttaatcatgataggttatactttatacttttttgcatatattatcagtcaaaaactaatcttaaaattgacctatcatattggttattctattagagaattattctttaataagattagaagaatgccttttaaaattgttgaaaaagcagcaaggggagatttaattagtagaggtacaactgatactaatgcacttgcaattaatttatctgtttgtattggggaaatctttacagcaccacttgtagtaattggtgtgtttattggattacttattatttcaccaatcttaactgctatcacattaggtttttatttagtgttagttacagtgtcatttattatctctttaaaagcaggaccaaaatacatgagaatgcaaaatgaagttggtaaattaaatggagttgttgaagaatatgtttctggaagaaaagcaattaaatctttttgttatgaagaaaaagcatttaatttatttaaagaaataaatcataatcaagctaaagaatctagaggggctgaaatgattttaaatttcatttgaccttgaaatgattttattgaaacagtgatgtatgcttttatttatgtgttaggaattatcttttttgtaaacaatattaatagtggaagtatcttttttccaagttatgaaataggattattaacttcttttgttttattggcaagaattgcaactggtgaaacaagtaattcattaagacttgctggaactttacaaaaaacaacagtagcatcaaaaagagtgtttgcagtgttggatgaaatcaatgaagtggatcaaggaaaacttgaacctacagttcaaggaaaaattgaatttaaaaatgttaatttttcatatgttgaagatagaccaattttaaaaaatgttagtttcacaatcaaccctaatgaaacagttgcaattgttgggccaacaggaagtggtaaaaccacaatggcatctttgatttcaagattttatgaaattgattcaggagagattttgattgatggaactaatattaaagatattagtaaacaaagtttatttaaaaacatttcaattgttttacaagatcctttcttattttcagaaagtattgaaaaaaatatttgatatggaaacactaatgcaacagctgaacaagttatagatgtttgtaaaaaatctaatgttgattactttattaaaaaattaccagatgggtatgagactatcatgtctgaaaaaatgagtgatttgtcacttggtcaaattcagttaatttcaattgcaagagcatttatgtcagaagctaaaatattagtattagatgaagcaacttcatctgttgacacaaagactgaaattgatattcaaaatgctttaatgaaaattactaataacaaaactgtaattgttattgcacaccgtttatctactgttgtcaaagcagataaaattattgttttaaaagatggtgaaattcaagaaattggtaatcataaacaactattaaaaaataaagggttttactatagtttatataaagcaaatgctgtcatggaagaccatgaataa

SEQ ID NO: 59904 - protein, 597 aa, Mycoplasma penetrans HF-2
MKQHIGYISVFKRLILMLSKNKKAFYGAIFLSLLKTTFSVATSIGLGIVIQNFFYDLNSNSPASAFINFSIGCALIMIGYTLYFFAYIISQKLILKLTYHIGYSIRELFFNKIRRMPFKIVEKAARGDLISRGTTDTNALAINLSVCIGEIFTAPLVVIGVFIGLLIISPILTAITLGFYLVLVTVSFIISLKAGPKYMRMQNEVGKLNGVVEEYVSGRKAIKSFCYEEKAFNLFKEINHNQAKESRGAEMILNFIWPWNDFIETVMYAFIYVLGIIFFVNNINSGSIFFPSYEIGLLTSFVLLARIATGETSNSLRLAGTLQKTTVASKRVFAVLDEINEVDQGKLEPTVQGKIEFKNVNFSYVEDRPILKNVSFTINPNETVAIVGPTGSGKTTMASLISRFYEIDSGEILIDGTNIKDISKQSLFKNISIVLQDPFLFSESIEKNIWYGNTNATAEQVIDVCKKSNVDYFIKKLPDGYETIMSEKMSDLSLGQIQLISIARAFMSEAKILVLDEATSSVDTKTEIDIQNALMKITNNKTVIVIAHRLSTVVKADKIIVLKDGEIQEIGNHKQLLKNKGFYYSLYKANAVMEDHE

SEQ ID NO: 59905 - DNA, 1884 bp, Bradyrhizobium japonicum USDA 110
  CDS (1)..(1884): transl_table=11
gtggagcacatctgtctccctgggtccgatctcatgagcgctgtggaacggcttgacgaccagtaccgcgacgagcgcgatgccgcgccgcctgaggccccgtccatcgaagccgagctgatcgagcagcccgccaagggccgcgccaagctgcggccgctgctcgcgctcgcgccctatgtggcccgctatcgcggccgggccgcgctcgccttcgtcgcgctcacgatcgccgcgctgaccacgctgctggtgccggtcgcggtgcgccggatgatcgatttcggcctgacgcctgagggcatcgagctgatcaacagctacttctcggtgatgatcgcggtcgtcgccgtgctcgcgctggcaagcgccgcgcgctactacctcgtgatgacgatcggcgagcgcatcgtcgccgacctcaggcgcgatgtcttcgctcatttgctgtcgctgtcgcccgccttcttcgattccgcgcgcagcggcgaattgatctcgcggctcaccgccgacaccacccagctcaaatccgccgtcggcgcctcggtgtcgatcgcgctgcgcaacctgatgatgttcttcggcgcggtggcgatgatggtcatcaccagcccgaagctgtcgggcttcgtgctgctggccattcccctgatcgtgctgccgctggtcgccttcgggcgctgggtgcggcgtctgtcgcgcaatgcgcaggacacgctcgccgaggcctccgcctatgcgggcgagctggtcggcgcgatccgcaccgtgcaggcctataccagcgaagggttggctgcgaagcgcttcggcggcgaggtcgagcaagcctatgaagccgcgcgcacctcgacgcaggcgcgcgccgtgctcaccgccatcatcatcttcatcgtgttcgcaagcgtggtcgcgatcctctggatcggctcgcatgacgtgctcaccggcgcgatctcgccgggccggctcggccagttcgtgctttatgccgcgttcgcggccgccggcctcggccagctcagcgaggtctggggcgaagtctcggcggcctcaggcgctgccgagcggctgttcgagatcctgcatgtgcagcccgacatcaaggcgcccgcctcaccgcgcgcgctgccggtgccggcgcgcggcgaggtcgggttcgaccaggtcagcttcgcctatccggcacggctcgacgtcaaggtgctcgacgccgtgtcgttcaccgtgcggcccggcgagaaggtcgcgatcgtcggtccctccggcgccggcaagagcacgatctttcatctgctgctgcgcttctacgatccgcgcagcggcgcgatctcgctcgacggcgtgccggtcaggtccgccgatccccgtgatttccgttcccgcatcgcgctggtgccgcaggaatcgaacgtgtttgccgcgagtgcccgcgagaacatccgcttcggccggcccgatgcgaccgacgccgaggtcgagcgcgccgccgagctcgcgcatgccgccgagttcgtccgtcgcctgcccgaaggcttcgacaccccgctcggcgagcgcggcgtgacgctgtccggcggccagcgccagcgcatcgcgatcgcgcgcgcgatcctgcgcgatgcgccgctgctgctgctcgatgaagccacctccgcgctcgacgccgaaagcgagacgctggttcagaccgcactcgaagagctgatgaagcaccgcaccacgctggtgatcgcccacaggcttgccaccgtgctctcctgcgaccgcatcctggtgatggaccagggcaagatcgtcgagcagggcacgcatgccgagctggtggctgcgaacgggctctatgcgaggctcgcgaggctgcagttcgagggggcgtga

SEQ ID NO: 59906 - protein, 627 aa, Bradyrhizobium japonicum USDA 110
MEHICLPGSDLMSAVERLDDQYRDERDAAPPEAPSIEAELIEQPAKGRAKLRPLLALAPYVARYRGRAALAFVALTIAALTTLLVPVAVRRMIDFGLTPEGIELINSYFSVMIAVVAVLALASAARYYLVMTIGERIVADLRRDVFAHLLSLSPAFFDSARSGELISRLTADTTQLKSAVGASVSIALRNLMMFFGAVAMMVITSPKLSGFVLLAIPLIVLPLVAFGRWVRRLSRNAQDTLAEASAYAGELVGAIRTVQAYTSEGLAAKRFGGEVEQAYEAARTSTQARAVLTAIIIFIVFASVVAILWIGSHDVLTGAISPGRLGQFVLYAAFAAAGLGQLSEVWGEVSAASGAAERLFEILHVQPDIKAPASPRALPVPARGEVGFDQVSFAYPARLDVKVLDAVSFTVRPGEKVAIVGPSGAGKSTIFHLLLRFYDPRSGAISLDGVPVRSADPRDFRSRIALVPQESNVFAASARENIRFGRPDATDAEVERAAELAHAAEFVRRLPEGFDTPLGERGVTLSGGQRQRIAIARAILRDAPLLLLDEATSALDAESETLVQTALEELMKHRTTLVIAHRLATVLSCDRILVMDQGKIVEQGTHAELVAANGLYARLARLQFEGA

SEQ ID NO: 59907 - DNA, 1875 bp, Xylella fastidiosa Temecula1
  CDS (1)..(1875): transl_table=11
atgcgaaggtacccacctgcacatgccttgcccactggatcagctccatacattgaaaacttggctaagcaacaccatcggccccctgctacagcctgtaggaaactcccacccatgcctgcaccacacatccccaaccgcctacaacgcctgaaccatctgcgcatcttgtggccattcatgcgccgccatcttgccttgttctcgggatggctgattgcgttggcggtctcctcggcagcaacgctgaccctaccaagcgccttcaaacaaatgattgaccacggtttttccagcgaggggcaaatcaatcggagcttcgctctactgttgttagtcgccgtgattctggcagtaggtacagcagcgcgcctgttctccgtctcgctactgggcgagaagatcatcaccgacctgcgtagccagttatacgcacacctcataggattggatgccagctttcacgatcgtaatcgcagcaacgagctggtgtcgcgtctggccacagacagtgaactgctacgctcaatcattggatccacaatgtcagtagcgacgcgtagcaccgtgactgcaatcggtagccttatcatgttattcatcaccagtccacgcctcgccagcctttccctggtggtcatcccattcgtgatacttcccattttcttaggcgcacaacacctccaaaaagccgcccgtaccagccaggatcgcattgccgacaccaatagcttcgctgctgaaacattacgtgctttacgtacagtgcaagcctatgcacgtgaacattacgaacgtacacgcttcgaccgcgcactggaaacgagtttgcaggccgcgcgacaacgcattcacatccaaacatgggtcaccgctgcaagcatcgtgttgatattcagtgcaatcgtcggagtgttatgggcaggtgcacatgatgtcattgctggccgtatgagcgcgggcacactcggtgaatttgtcctatacgcactgatcagcggtggttccatcggctcccttgccgaagtgtggaacgaactacaacgtgccgctggtggcatgggccggattttcgaattactcaaagagaaaaacacgctcagcgtaccagccacacctaccttgccaccccatccattgcggggagaaatccgctttgaacgtgtcggcttccactatccacaacgcccagaaacacctgcacttgatggcattgacctgcatatacgtccgggggaaaccatcgcttttgtcggcccatccggtgctggcaaaagcaccctgctatcactattactacgcttctatgatcccacccatggacgcatcctgattgatggtgtggacctacgccaaaccgatccgaaagtattacggacacacattgcactggtacaacaacaaccaacactgttcaccgcgagcgcaatggaaaatatccgctatggacgactggacgccaccactgccgaaatcgagatcgccgcacgctcttccgaagcagatggtttcatccgcgccctgccacagggttatgccaccgagctaggcgagcacggcctgtccctgtccggcggccagcagcaacgtatcgcaatcgctcgcgcactcctcaaggaggcgccgattctactcctggatgaagcgaccaacgcacttgatgcacaaaacgagcaagcagtacaacaggcactggaacgactgatgacagggcgcaccacattgatcattgcacaccgcttggtcaccatcttgaaagctgaccggatcgtggtgatggaccaaggccggatcgtcgctcaaggcacccacagcgaactcatcgccgctggaggcctatacgcaaagctggcacgcctacaattcatagaataa

SEQ ID NO: 59908 - protein, 624 aa, Xylella fastidiosa Temecula1
MRRYPPAHALPTGSAPYIENLAKQHHRPPATACRKLPPMPAPHIPNRLQRLNHLRILWPFMRRHLALFSGWLIALAVSSAATLTLPSAFKQMIDHGFSSEGQINRSFALLLLVAVILAVGTAARLFSVSLLGEKIITDLRSQLYAHLIGLDASFHDRNRSNELVSRLATDSELLRSIIGSTMSVATRSTVTAIGSLIMLFITSPRLASLSLVVIPFVILPIFLGAQHLQKAARTSQDRIADTNSFAAETLRALRTVQAYAREHYERTRFDRALETSLQAARQRIHIQTWVTAASIVLIFSAIVGVLWAGAHDVIAGRMSAGTLGEFVLYALISGGSIGSLAEVWNELQRAAGGMGRIFELLKEKNTLSVPATPTLPPHPLRGEIRFERVGFHYPQRPETPALDGIDLHIRPGETIAFVGPSGAGKSTLLSLLLRFYDPTHGRILIDGVDLRQTDPKVLRTHIALVQQQPTLFTASAMENIRYGRLDATTAEIEIAARSSEADGFIRALPQGYATELGEHGLSLSGGQQQRIAIARALLKEAPILLLDEATNALDAQNEQAVQQALERLMTGRTTLIIAHRLVTILKADRIVVMDQGRIVAQGTHSELIAAGGLYAKLARLQFIE

SEQ ID NO: 59909 - DNA, 1767 bp, Enterococcus faecalis V583
  CDS (1)..(1767): transl_table=11
atgcaaactaaaaaaattcattttggtgccttctcacgttttaagccgtatttactacgctatccaaaagaaattattggcgccttaatcctaggaattctcagtggtttttcgactgtcctcatgacttattatataggtaaatccgttgatacaatggtgggtaaaggacaagtcaatgctgcgcaactcatcaaaattttaggtttattagcagggattttactcgtaaccgttctaagtcaatggctgattcaacgtctcggtaatcgcgtgtcttatttatcgaccacacagctgagaaaagatgcctttgcccatttaaatcaattaccgttaagttattatgaccaaacgtcacacggaaatatcgtcagtcgctttaccaacgatattgacaatatttcaatggcttgctcggctgtcttcaaccaattattttctggcatggccaccgtcgttgttgctttgctctttatgattcggctaagtcccctgctcacattagtggttcttatcagtacgccgattatttttattgtaaactggcttgttgcaaaagcttcacaaaaaaactttgctgcacaacaaacgattgttggtgaaatttccggtttcgtttcagaaatggttggcaaccaaaaaattgttaaagcctttcaacaagaacaagctacgcaagaaacatttgaagcattgaatcaaacgttgtatgaaaaaggacagaaggctcagttttcttcctccttaaccaacccactttctcgatttatcgaccatttatcttatttatcgattggattagtcggtggcttgttagttttaagtggcaatcctttagtcacagttggtgttatttccagtttcaccatttactctagtcaattttctaaaccttttattgaactctcaggaatcaccaaccaaatccaagccgccttagctggattggaacgtacctttgatatgatggatcaaccagttgaacgtcctgatgcctcgaacgcaattgttttgaaagaagcgcgaggccgtgttgaatttaaagacgttgatttttcttacacgccgacgcgacctttaatcgaaaactttaatttaattgctgaaccaggagaaacaattgccattgttgggcgaactggtgcgggtaaatcaacattagtgaatttgttaatgcgcttttacgaggtcgaccgtggccaaattacggttgatactcacgacattactcaaattactcgggacagcttgcgaaaaagttttggtatggttctccaagatacttggctattcgatagctccattcgggaaaatttaacgtacggaaatcctgaagcctctgacgaagaaattatagaagccatgaaaaaagcccatatttttgatttcgtcatgcgtttacctcaaggactagataccgagattggttcccaaggcgttaaaatttctgaaggacaacgacaattaatgactattgcacgcacgatgattagtaatccgccgatgcttattttagatgaagcgaccagttcagttgatacattgaccgagcaaaaaattcaggatgcttttttacaaatgatgactggccggaccagttttgttattgcccatcgcttagcaacaatcaaaagtgctgaaaaaattctagttatggataatggtcaagtggttgaaattggcacccatgacgaattattgcaaaaagaacagggttattatcgtgacctttacgaagcacagtttaatcaaaaagcacaataa

SEQ ID NO: 59910 - protein, 588 aa, Enterococcus faecalis V583
MQTKKIHFGAFSRFKPYLLRYPKEIIGALILGILSGFSTVLMTYYIGKSVDTMVGKGQVNAAQLIKILGLLAGILLVTVLSQWLIQRLGNRVSYLSTTQLRKDAFAHLNQLPLSYYDQTSHGNIVSRFTNDIDNISMACSAVFNQLFSGMATVVVALLFMIRLSPLLTLVVLISTPIIFIVNWLVAKASQKNFAAQQTIVGEISGFVSEMVGNQKIVKAFQQEQATQETFEALNQTLYEKGQKAQFSSSLTNPLSRFIDHLSYLSIGLVGGLLVLSGNPLVTVGVISSFTIYSSQFSKPFIELSGITNQIQAALAGLERTFDMMDQPVERPDASNAIVLKEARGRVEFKDVDFSYTPTRPLIENFNLIAEPGETIAIVGRTGAGKSTLVNLLMRFYEVDRGQITVDTHDITQITRDSLRKSFGMVLQDTWLFDSSIRENLTYGNPEASDEEIIEAMKKAHIFDFVMRLPQGLDTEIGSQGVKISEGQRQLMTIARTMISNPPMLILDEATSSVDTLTEQKIQDAFLQMMTGRTSFVIAHRLATIKSAEKILVMDNGQVVEIGTHDELLQKEQGYYRDLYEAQFNQKAQ

SEQ ID NO: 59911 - DNA, 1626 bp, Bacillus cereus ATCC 14579; identical to SEQ ID NO: 7417
  CDS (1)..(1626): transl_table=11

SEQ ID NO: 59912 - protein, 541 aa, Bacillus cereus ATCC 14579; identical to SEQ ID NO: 7418

SEQ ID NO: 59913 - DNA, 1749 bp, Nitrosomonas europaea ATCC 19718
  CDS (1)..(1749): transl_table=11
atgacgagcaatcgctggcaggctgttttgaaaacggctgctttcctcaaaccttataaactatcgttaagttttagtctggcagcgttattcctgactgccggaattaccttatcgctagggcaagggatacggctgatggtggatcgtggattcgctacacagtcgcctgatctgctgacccggtatgtgttggtttttctgttgttggtggtactgcttgcgataggtacgtttacacgttactactgggtgacctggctgggggagcgggtgatcgcagatatacggcgcaaagttttcgcacatctgatcgagctgcatcctggatttttcgaagccaaccgtagccttgagatccagtctcgcttgactgcggatatgactttgctgcaatccgtagtgggttcttccatttcggtagcgttacgtaacctgattatgctggccggtggcatcgtctggttgtttattaccaatgtcaagctgacggtgatcgttatgctgagtattccattggtcatagttcccatcttgctgtttggccgacgcgtgcgtgtgctgtcgcgacaaagccaggatcgggtagcggccgttggcgcttatgttggggaaatgcttgggcagatcaagacagtgcaggcctataaccatcaggcaatggataaaatgcatttcgatcagtatgttgaggatgcgtttcatatcgcccgccagcggacattacaacgtgcctggttgatcgcggtggtaattgttctggtattcggtgcgatcggtatgatgctctgggtcggtggcatggatgtgatcgaaggtaaaatcagtgggggagaactggcggcattcgttttttacagcatcatcattggctcggcggtagggtcgatatcagaggtactgggggaattgcagcgtgctgcgggggctgcggagcgaaccatggagctgttggaggagcccagccagatcagttcgcctgtcgatcctcgtcaattgccggcagtgacaggcaatatcgtgttccagcgagtatgttttgcttatccatcacggcctgaaatacaagtgatcaatgatttttcattggcggtacgcccgggtgaaacgttggcgctggttggtctctcgggcgcaggcaaatcaactttattcgatttgctgctgcgtttctatgatgtgcggtcgggctgcatcagtctggaaggtgtgaatatccgcgatctggatttgtctgatctcaggcgcagttttgcattggtatctcagaatcctgtgctgtttcatggcagtatcgagcagaatctgcgttatgcgtgcccggatgcttcggatgcggaaatcgaaatggcggctaaagctgcttttatacatgatttcattgtttctctaccacaaggttaccagaccagcctgggtgataccggactggggttgtcgggtggccagaaacagcggctggcaattacccgggctattctggcagatgctccggttttattactggatgaagctaccagtgcactggacagtcagagtgagcactgggtgcaacaggcaattaccagattgagtacaggcaggacaaccattgtcattgcccatcgcctgagtaccatcctgacttctgatcgcattgctcttattcatcatggccgtctggaagcactgggtacacacgtggaattgatggaatctagtgaactgtatgcgcgtctggcgatagcgcagtttcaaatccccggctga

SEQ ID NO: 59914 - protein, 582 aa, Nitrosomonas europaea ATCC 19718
MTSNRWQAVLKTAAFLKPYKLSLSFSLAALFLTAGITLSLGQGIRLMVDRGFATQSPDLLTRYVLVFLLLVVLLAIGTFTRYYWVTWLGERVIADIRRKVFAHLIELHPGFFEANRSLEIQSRLTADMTLLQSVVGSSISVALRNLIMLAGGIVWLFITNVKLTVIVMLSIPLVIVPILLFGRRVRVLSRQSQDRVAAVGAYVGEMLGQIKTVQAYNHQAMDKMHFDQYVEDAFHIARQRTLQRAWLIAVVIVLVFGAIGMMLWVGGMDVIEGKISGGELAAFVFYSIIIGSAVGSISEVLGELQRAAGAAERTMELLEEPSQISSPVDPRQLPAVTGNIVFQRVCFAYPSRPEIQVINDFSLAVRPGETLALVGLSGAGKSTLFDLLLRFYDVRSGCISLEGVNIRDLDLSDLRRSFALVSQNPVLFHGSIEQNLRYACPDASDAEIEMAAKAAFIHDFIVSLPQGYQTSLGDTGLGLSGGQKQRLAITRAILADAPVLLLDEATSALDSQSEHWVQQAITRLSTGRTTIVIAHRLSTILTSDRIALIHHGRLEALGTHVELMESSELYARLAIAQFQIPG

SEQ ID NO: 59915 - DNA, 1740 bp, Chromobacterium violaceum ATCC 12472; identical to SEQ ID NO: 7425
  CDS (1)..(1740): transl_table=11

SEQ ID NO: 59916 - protein, 579 aa, Chromobacterium violaceum ATCC 12472; identical to SEQ ID NO: 7426

SEQ ID NO: 59917 - DNA, 1752 bp, Gloeobacter violaceus PCC 7421
  CDS (1)..(1752): transl_table=11
atggcctggttaccagaaaactatcgccgcctgataccctatgttgcgccgcaccggcgcgtgattttcgcggcgctggcctcgatgatcgggtttgtttcgacgatgccgctgttggcctacatggttgggcggctgaccaaatttttgggtgagggcaatctctcggcgattacggagcttgcctggatcacctttggggtgttcgtggtgcgcggtatttttcagtacggccaggacactctgatggccaaagccgctctgcaggcgatcaccgacttgcgcgcgcgcgtctacgcccacttgcagtcgctggatctggcgagttttgcttcccagcgcacgggggatttgaccgtgcgtttgaccagcgacatcgacaaacttggcgaaattttgcggcgcttctttaaccagttcatcccctgtgtgctcacgattatcgcggtggtgagctatctcatctacctcaactggcagttgaccctggtgacgctggtggtctccccgctcatcggctggcttttcgggtggttcggcaacaagctggctgatttgtcgcgcaccagccaggagcagatcgccgatttgtcctcgcgactttatgaaattttcagtgccatccgcatcatccgggcttttgccgccgaagattacgagcagcgccgttttggcgaattgtccgatgaaaaccggctggcgcgctttcgcaccgaacagatcaaagccatccagtatccggtcatcggtttgatgcaggctctgggggtgctgttggttttctgggtaggcgcctggcagattagcgccggcaacctgccggctttcgaatttgcctcttttgccaccggcatcggcctactccttgatccggtgcggatgatcaccgagaaccttaacgagttacgccaggccggtgcttctgctgaccgggtcttcgaattatttgatttgaagccgaccgtgttgcaggcgccggatgccgttcccctcagtccggtcaaaggacgcatcgagtttagcaatatcgatttttcctacgccgacgatcgcccggtgctcaacaatgtcaacttgcgtgtcgagccgggagaggtggttgccctagtcggtccttccgggtccggcaagtcttcgctggtgaatctgctgccccgcttctacgacccacagcagggcaccgtgcgcatcgatggaacggacgtgcgcgcggtgaccttcaagagcctgcgccgtcagatcggtattgtgcctcaagaaacgctgttgttctccggcaccatcgcccagaacattgcctacggctgcgacgaggccgacatcaagggcatgctggacagaattgtccgggcggccaagattgccaacgcccacgagtttattcaggacttgcccgggggctacgacgcgaaggtgagcgaggggggacggggtttatccggcggtcagcgccagcgcatcgctatcgcccgcgccgtgctgttggatccgaagattttgatcctcgatgaagcaaccagcgcccttgacaacgaatcggaggcgctggtgcaagaagcgctcaaccgtctaatgcaagatcgcaccgtgatcatcgtcgcccatcgcctgtccaccatccgcgacgccgatcgcatcctggtgcttgagcgcggccggattatcgaggctgggaatcatctcagcctgatcgacagcggcggcgtttacgcggcgctctacaaccgccagttcgaacgcgcctcggtttga

SEQ ID NO: 59918 - protein, 583 aa, Gloeobacter violaceus PCC 7421
MAWLPENYRRLIPYVAPHRRVIFAALASMIGFVSTMPLLAYMVGRLTKFLGEGNLSAITELAWITFGVFVVRGIFQYGQDTLMAKAALQAITDLRARVYAHLQSLDLASFASQRTGDLTVRLTSDIDKLGEILRRFFNQFIPCVLTIIAVVSYLIYLNWQLTLVTLVVSPLIGWLFGWFGNKLADLSRTSQEQIADLSSRLYEIFSAIRIIRAFAAEDYEQRRFGELSDENRLARFRTEQIKAIQYPVIGLMQALGVLLVFWVGAWQISAGNLPAFEFASFATGIGLLLDPVRMITENLNELRQAGASADRVFELFDLKPTVLQAPDAVPLSPVKGRIEFSNIDFSYADDRPVLNNVNLRVEPGEVVALVGPSGSGKSSLVNLLPRFYDPQQGTVRIDGTDVRAVTFKSLRRQIGIVPQETLLFSGTIAQNIAYGCDEADIKGMLDRIVRAAKIANAHEFIQDLPGGYDAKVSEGGRGLSGGQRQRIAIARAVLLDPKILILDEATSALDNESEALVQEALNRLMQDRTVIIVAHRLSTIRDADRILVLERGRIIEAGNHLSLIDSGGVYAALYNRQFERASV
